United States Patent Application Publication US 2011/0183924 A1 - sequence listing, part 150

SEQ ID NO: 387549 - DNA, 736 bp, Homo sapiens
ggcgctggctcgatttgactccgagctttaccgattacttgtgtgactttgtgcaagttaattaacatctcagcttgttttctcatctgtgaaatggggatgatactagcatgtacctcctaggactatagtgaacttttaattaagataattattgaatttaacaggtagtttattaatgaaatttacataggtaattgtggcgcagtgagcccaggggctcaaggtgttagcagtcatcaacagtgctatttgaaactgtgggtggatgaagaggtgaactcaacaccacaaatatcacagagcagtaaccaccatggaaaagaaaagagagcttatgtgtctaggacaccccaagaaatctcttctgaatgaatgatggcaatgaaatagccattaacagagggtaggctggtttgtgcagggttggaggcttttccaaaaataaataactttcaaaaaatctcagccaggcgcggtggctcatgcctgtaatcccagcactttgggaggctgaggtgggtgaatcatgaggtcaggagttcaagacaagcctggccaagatggtgaaaccctgtctctacgaaaaatataaaaattagctgggcacggtggcaggagcctataatcccagctacggcaggagaatcgcttgaacccaggaggcggaggttgcagtgagctgacatagcaccgctgcaccctagcctgggcaacaaagcaagacttcgtatca

SEQ ID NO: 387550 - DNA, 241 bp, Homo sapiens
ttatataatcgcctgtgggccctatagctacataatttattatagaaattaaaatcaatgggagtaacctacataaacatacttgcacacatttatgcaatcacagagagaaatatgtgtacctgggtatgtgattacaaagttaacttttttatttcactgagctcatacctcctgctacaaatgccacacgtgattttttctctcaattaagttttacagcttataaaagcactttttt

SEQ ID NO: 387551 - DNA, 345 bp, Homo sapiens
ctgagtatgggtctgtcagcatgtggggacacttaatgtgaatgtttgatcattattttaacgtgtgccctttgtacaacttgacattgacactaccgtgaaatgtaaattacacggaactccatgggaccactaaaccctctcccactcagctacagagttagcagaatgaacgcgtgacccagttagatagctatcgcgtaacttatctgagttctctccgcttgttttcagtctccttaaccactttcaaaatcatcatgtaaaagtctgttgcacactctttccctagctgttcagactaagctccaaaagtccatagcttcggaagacgcatggacacct

SEQ ID NO: 387552 - DNA, 429 bp, Homo sapiens
cccaacacagataacagcaacaaaaaaagaaatgctcagttaatgagtctgataaaaatggtatttttgtttgctgcagtagaactttcaatggaaatttataacaagagcaattgagatgcttatacttttaacttttagccaggcgtggtacacgcgcatgcagtcctagccactcgggagggtgaggagggaaaattgcttgagcctaggagttcgagactacagtgagctgtgattgtgcccctgagtgacagagtaagacctcatttaaaaaaccaaaacaaatgaacaaaaaaaagatgcctatactttagattctagtagttctacttttgaaaatgtatcttgaggaactagtttaatacaaacatgaaaaggatacacatatatattaagttgttcatttgtggtctacttaaatagcca

SEQ ID NO: 387553 - DNA, 104 bp, Homo sapiens
taagtgccccagcgtctcagctgagctccctggtgtgagagacccaactggacagaagatgtcacacagtgggacgcgctgccaaggggagaggtctgcaactg

SEQ ID NO: 387554 - DNA, 412 bp, Homo sapiens
gaataatcaggctattgtaattatctaagtaagagaggataaggacctgaccctaagataggaagtagaaaagagggaatcttgtgggagagatggtaagatgatggaattgatagaatttggtgactgacttctgtatgtgtgtgggagtggatgctctgtgtgataacagagagatgagtttctagtcttatatgattgggtaaatggtcatactcctatttatttaaaagtacctataacatgggagtagaaagctctgaaaatgtggcatatgatctgttttaagaaaaaagaggatgaggggaaatagagagagaggaaagtgaggaatttcttttgacgactttttggacaaacttgctattttagttcactccctttttactcctagttctactaggagtaaacg

SEQ ID NO: 387555 - DNA, 209 bp, Homo sapiens
gtttgttcagtatgtttgaaagttacagggatttctgtgttttcctttttgaaatagttctgttttaaattatgtaaaatctttgaaacaataagttgtttcaaaaaaaatacactaaaacaagatacactcaaaaattcagtttccatccctttccactctacatttttccttcctctccatttttattttttgattatcctttattg

SEQ ID NO: 387556 - DNA, 289 bp, Homo sapiens
gttgtgtctcgggattcttcttttcccatattattttgttacgtctgtaaaccacctttgagtacccctcccaacactggaagaggaaacagagaccagtgcgctgtgcagtctcacttaactagaatgcacaactcctgcttttatcaccattctgggaaatccccgctgcatttcatggccagggcagcacttcatagttggaaaaggatggtgtggacttgccgcagaggccctagagaaggccatcctgtgttcctgctctccttctcatccggcttctaccccc

SEQ ID NO: 387557 - DNA, 375 bp, Homo sapiens
gaaattggccaaatatgtatgactgaatatggatccaaatctgacaggctgagttgtgcactatattaagatttgaatcctcagtttggctccttccttaggctcttgggccattgttcatccagggaagatttattgagcctgactctgagccaggcagtgtgcaaggtgtccagaggtcctaattcatttctctaggccatcattctccttggcaattagttcacaactcttctctgtcctcaacctcccagtctttcattcatccacctctctctcagctgatgagctttctgttcaattcactgagaaatagaagttaacagaagaacactttcacaggtctaccaactatatcttcacttccctaattgg

SEQ ID NO: 387558 - DNA, 339 bp, Homo sapiens
caaacacatgtgcacccacacacaaatgcatacactcacaaatgcacacactcacagagacccacacacaaatgcacatagtcacacacagacccacacacaaatgtacacacacacacggacccacacacaaatggacacactcacatatgtgtactgccacactcacatacacataaatattcacatgcatatttacccccacgcgtgtgtgcacacatgctcccccatcagcccacccggggttaagttatctctgagggagcttccacacacacctcagattcccctctcccaacttctccgatccctctgttcctcttcctttgtgaaagtccc

SEQ ID NO: 387559 - DNA, 675 bp, Homo sapiens
cagtgatgttcatcagggatattggtctaaaattctctttatttgttgtgtctctgccagactttggtatcaggatgatgctggcctcataaaatgagttatggaggattccctctttttctattgattggaatagtttcagaaggaatggtaccagctcctctttgtacctttaaattcggctgtgaatccatctggtcctggactttttttggtttgtaggctattaattattgcctcaatttcagagcctgttattggtctattcagggattcaatgtcttcctggtttagtcttgggagggtgtatgtgtccaggaatttatgcatttcttctagattttctagtttatttgcatagaggtgtttatagtattctctgatggtagtttgtatttctgtgggatcagtggtgatataccctttatcattttttattgcgtctatttaatctcctggtgtgccatttgctaagaccgttggaaaagtgcagtattaaggcaggagtgtcccacttttcctggtacagtcttcccttggctaggaaagggaaatcccctgacccgaccccttgtgcttaccaggtaaggcgatgctccactctgcttcagcttgccctccgtggctgcacccactgtccaaccagtcccagtgagatgaaccaggttcatctca

SEQ ID NO: 387560 - DNA, 270 bp, Homo sapiens
cccttccccatgccactgtctaataagtcatctgtgcacacacttaaacgcgccaggcaagctgcaacccaaagcaatttgttttcaaactaagaggacatagttcatctattgttctaaatacaggattttcttaaagtaggatatagatggtattatagtacatttttcagatgcacatatttcaccaactaaaataagtaatactccaagtttacagttttaaaaagtttttctttctttttttcttttcttttttttttttttttt

SEQ ID NO: 387561 - DNA, 535 bp, Homo sapiens
gagaaatgttcctggaaccagggtctgtttcaggaaaccaatttaaattcatgaagcttctggtatttatgataaaatgaaagtaaatctagttgaagcaaagacctacattcccaagacaactgaccattcatttattagttgctgcccctagctaacacccaaaccacaagctgccgttgctcgacctccctgcaggaaccctggtcattcagaagtaccagggtgaagctgaaaaagaagggggaacaaatagctttaaatcaagggacacaccctctacagccaaggtcaacacccaggaagggcagcagggctcggacagtggcagaaagactccacccatacagcactttgaacagaagctctcttccaactggaggcatagagctagctgctaatctgacggacgcccaaaacagagaagtgggtaaaaataaaattacgactgctcccgtgagaaggccaggaagagaacatatcgaaacaatcatggcctgcagccctgcctaacaccagtgctgctaagtgacct

SEQ ID NO: 387562 - DNA, 318 bp, Homo sapiens
cctggtacccgggcccactgtaatcaggtggcgctggttctatctcaggttggggaccttagcttttctaggctgaaagaatggagcccttctgttcagtggtgtccatctgggccctggactctggatttgacagaggccctggaggggagggccatggagttgtgcttgtgtgtcatgtgcacggtcctggtttactgtgcaccttctctaactagatccttagccaagggcttcacatacagcgtggttatgtttattaatgagtctgtcttatgaagtgacccttgtatgctgaaaattcaggtatatttgtac

SEQ ID NO: 387563 - DNA, 694 bp, Homo sapiens
ggagaactaaataaggatgtttgctattatcacatttcattattgtctattaaatgagaaagggaaagtatgaggattagaaagaaagataaaaagatcattttttgctgatggtatgattatgtacatagaatataaaaccctattaataagttactagagttagtaagagaattcagagttgctggatatgagtaacaccaaagaatagctttcctaaataatcagtgaaaaacttaattggaaaaaagatccctttcacaaaggcaataaagtaacatacataaggaataaatgaaatccaaacatttttaagatcattatctaggaacctccaaattatttttttttaagacataaaagattcagcaagtgaagaactacatcatgtccatgggtagaaagacttaaatgagaaagatgccagttcttcagttaatccacaggttcagtggatctgcagtaagaatcccaacatgatgttttgtgccacttgataagctgctcttaaaattcatatggaatggccaggcgcggcggctcatgcctgtaatcccaacactgtaggaggctgaggcaggagaattgcttgagcccaggatttcaagaccagcctggacaacattgggagaccccatctctacaaataattttttaaagtaaaaaataaatttatatggaagagccaaagacc

SEQ ID NO: 387564 - DNA, 341 bp, Homo sapiens
ctactaatcatatgttgaatattgagctagcccctattagatgccatgcacaggaataaaagaatgagaaaccttctcttctttctcatacccctcaagtggcttacaatctaccaacatggagaccacacagtaagtcctctacttaacaacttcagcaggttctcggaaactatgactttaagcaaaacaatgtataatgcaatcattttttccccccaatcaacattattaagaaacgtttttcagccaggcctggtggctcatgactgtaattctagtactttgggaggccaaggtgggaggactgctcaagcccaggagtttgaaaccagcctggg

SEQ ID NO: 387565 - DNA, 178 bp, Homo sapiens
ggaatcgagctcggtaccggtttaaagtaaatgtttttctaaataaagctttaaaatgcaacactcccttaacaaactctggtggagggaagtgaacagagaactgagactcagaggcctgggttccatcccgcccttcacggcacattgcatatggttttaaaaccacacacaactc

SEQ ID NO: 387566 - DNA, 348 bp, Homo sapiens
atggtgaatatcgttaatgataatatatttttgaaatatgctgagagtggatgttaggggttctcaccacaaaaatgacagctatgttaagtaatgcatttgttaataagctggatttaacattccacatgtatgtatacttcaacatcgtgctgtacacaataaatacatacaattttatcttttagtttctaaaaaatttaaaatgaattttaaaaagtagaattaggccgggcgtggtggctcacgcctgtaatcccaacactttgggaggccgaggcgggcagatcatgaggtcaggagatcgagaccatcctggctaacacggtgaaaccctgtctctactaa

SEQ ID NO: 387567 - DNA, 131 bp, Homo sapiens
ggcgtttgaagcccaatgtgcactctaaactgacgtgcacgaggaaagcagggcgcaggggctgtggctctggcacgaggtactttctggtctccctgccaccacttcctaggtacagctgtaacaccttg

SEQ ID NO: 387568 - DNA, 481 bp, Homo sapiens
gtagagacggggtttctccatgttggtcaggctggtctcgaactcctgaactccaggtgatctgcccaccttggcctcccaaagtgctggaattacaggcatgagccaccgtgcctggccccagtatcatatttctaactacattaggacatctctatctaacatatctgaggacatctctatctagcatatttgaaaccaaattatagcctggaatctgaaatggattagaaagcacttattactgggaaatatctcaaactccaagggtaggaagtacagctgggtaccataaagacttaagtcaagaactggaaagtcaggaaacacaatccctgtatcagctttgatttaatcagagaatttggactattaatattatgaaataaggaatacatgagagaaataaaaccttatgtaattgtggcaggatctgaggaagtaaagatccaaaatgcatcagagaaaattcactgacaag

SEQ ID NO: 387569 - DNA, 169 bp, Homo sapiens
ctcgtgatctgcccacctcggcctcccaaagtgctgggattacaggcgtgagccaatgtgactggccaattctttatcatatatgtaattaaataaaatttattactaaaataatttccccaaaggtgttttacttttttaaaaacagtggctacaaaaaaattttgag

SEQ ID NO: 387570 - DNA, 213 bp, Homo sapiens
aacagagctgatactctaatgaggttaataaatgggtcgtgaataagtgacacgcaatgtgcatccatttatcatttattcattgactgcattcagtgtgtcaacaccatgtcacaggggctggagtggagaaaacgtaggggaagcagtggaggctggaaggagagagtggtcattggagggtccaagaatgcctaatagcatcttgagttg

SEQ ID NO: 387571 - DNA, 198 bp, Homo sapiens
ttgcatcttagtgacttatgttggagggacacaagaaaaaagttgttgaatgaatgcttcatgcttaatacaaacacttctaatggctcattgattataatgtattatcacattttattttatcctcagacatgattgactttctaaaggcttgaatcaaatattgatcgactataatgtgtattatcaccactcttt

SEQ ID NO: 387572 - DNA, 379 bp, Homo sapiens
ttgttaacagcttgtcttctccctgctggcttcgttcaaggccattcattcatttagttcattcatttagtcaagtcacctaacacttactgataggtgttatagtccagggcttgggctaggtgctctcacatttaattacctgatttaatcctgacaataactgttgaacaactttgattatccccattttacagatgaggatattaaaaccagaaaggtgaagtgattttccagggttccacactaaagagtggcagagccagagcccacattgaaacccaatgtagttctgtgttggatccagagaatagttcctgagggtccctgacaagtgtctcatggcaagtatggacctactgtaagattacccagggta

SEQ ID NO: 387573 - DNA, 354 bp, Homo sapiens
caaggcaattagtgctcccacaagcattcaatggagtgtttcttttattccataacttcacaaacacttggtatattcaactctaacatttttgccaatcttgtgggtatgaactggttttaatttttatcttgttactgatgaaacgtttcatatacttttggactatatattttgttttcagtgaaacgcctgctttgtcttttgcctgtttttaattctatatttgtttgacttttatatttttttcttgaaattctttatagtgtttatagtgttccagtcttctgttactccttcaagtctgtggttgttttttcacttcctttctggtatgtgtggtaaccatgggag

SEQ ID NO: 387574 - DNA, 440 bp, Homo sapiens
gtctgttagcctctctgaggcttcaaaggttcctcatctgtaaaatggtaataatcataccattgctacagggctgttttgaagactaattaggactatgtaagtaaacatgatgatggctattattactgttccccgccaggggccatgcaagggttgctgattcacatagactgtcttataatcctctcaataactccaagaggtagccagcacctcagatatacataaaatgacttaagcccagagaggtgaagtaagttgcccacagccacacaactagtaaatagcccaaacaagctggattcccagttagactccgttaatagcactgctctttaccttaagtcattacaatgcctaatatgaaatagaatcgcttctttcttagggttcaagtggttaattatttaatgtattcattcaacaaaccatcatcg

SEQ ID NO: 387575 - DNA, 289 bp, Homo sapiens
ccacttcctggattcaagcaatcctcccacctcaggcccccaagtagctgggactataggcgtgtaccatcacgcccaactaatttttgtattttttgtagagatgagatctcgccatgttgcccaggctggtctcaaacccctaggctcaagcagtctgcccaccttggtctcccaaagtgctgggactacaggcatgagccaccatgcccggccagctttagtgtttgaggatagctattgctggacagctatcctagacagcccacagtcatctcaagttctgcgt

SEQ ID NO: 387576 - DNA, 966 bp, Homo sapiens
aaatgttgatgaattgctaatacctggatttcccaggagtgtaactaacattatctgggaagaatgaatctgaatcagcttctccttggaatccagcatcctagtcccagcgcttgggaatactacttttccagccatggtctttcttgagttgctgttaccagtgaaaccttgggctgcccccaggtgtgtttagcccagaggagaggactttcttgccctttctttccatcttttagctccttatcatatactggttcagttgtacccttttaccttacccatttctactatcatggaggttcagaattcacatctgaattcaaaagataattgggagccaggcatggtggtgtgtgcttaataatcccagttacccaggaggctgaggcaggcagcagaggatcacttgagcccaggagtttggaggctacagtaaacttcagttgtgttattgcattccaacctgggcaacagagcaaggccctgtttctaaaaaaaataataggccgggcacagtgtctcacacctgtaatcccagcacttcggaaggccaaggcgggcggatcgtgaggtcaagagattgagaccatcctggcgaacatggtaaaaccccgtctctactaaaaatacaaaacaaaaaaaaaaaaaaaaaaaaaaatgggggggggcggggccaggaaaacgttttaaacccatcgtttggggggcgggccacggtgggacatgcaaccgggccacaaggtgtggcaagagaaaccgggcatgacagggcgcgggttcccaccaataaaaaagcgcgcgggacaccgaccgtttggcacatcccgtggggccgggggctaccggtccacacagggtccaggacccgattcccgccccagcggggagaaggaggacaagggcaaacgacccacaggaagcgcgaggtcgcgacaccacagcacacacgccgccggcacacaa

SEQ ID NO: 387577 - DNA, 805 bp, Homo sapiens
aaatgttgatgaattgctaatacctggatttcccaggagtgtaactaacattatctgggaagaatgaatctgaatcagcttctccttggaatccagcatcctagtcccagcgcttgggaatactacttttccagccatggtctttcttgagttgctgttaccagtgaaaccttgggctgcccccaggtgtgtttagcccagaggagaggactttcttgccctttctttccatcttttagctccttatcatatactggttcagttgtacccttttaccttacccatttctactatcatggaggttcagaattcacatctgaattcaaaagataattgggagccaggcatggtggtgtgtgcttaataatcccagttacccaggaggctgaggcaggcagcagaggatcacttgagcccaggagtttggaggctacagtaaacttcagttgtgttattgcattccaacctgggcaacagagcaaggccctgtttctaaaaaaaataataggccgggcacagtgtctcacacctgtaatcccagcacttcggaaggccaaggcgggcggatcgtgaggtcaagagattgagaccatcctggcgaacatggtaaaaccccgtctctactaaaaatacaaaacaaaaaattagctgggcgtggtggtgtgtgcctgtagtcccacctacttgggaggctgaggcaggagaatagcttgaacctgggaggtggaggtttcagtaagctgagattgcgcccctgcactccagcttggtgatagagctagactctgtctccaaaaaaaaaaaa

SEQ ID NO: 387578 - DNA, 3063 bp, Homo sapiens
atgatggagacgccgctccccaaagcaccagagaaaaggcaagtgaccgccattattttcttattactactgtgggaggcgggcagcgctacgattaagtattcagttctagaagagagggacagcggctcttttgtggccaacttagcaaaagatctggggctgggtgtaggggaactggccgcgagaggcgcccggattctttccaaagggaacaaacagtatttgcagctcgaacggaagagtgggaatttgctcctaaaagaaaaattggaccgggaagagttgtgcggtgacatagatccatgtatactacatttccagatgttactgaaaaatccggtgcagtttattcaaggtgaactacagctccaagatgtaaatgaccatgccccagaattcttggaaaatgaaatcctcctgaaaatctccgaaggcagccatccagggacttcatttcctttgaaaatagctcaagatttggacgtaggtagcaacacagttcagaactactcaattagcaccaactcctatttccaccttttcactcgcaatcacagcgacggcaagaaatacccagagctcgtgctggatcaagcgctggaccgcgaggagcagccccagctcaggttaaccctcacagcgctggatggtgggtcaccgcccagaactgggacttcccaggttctcatagtgattgtagatatcaatgacaacgtccctgaatttgctcagcggcgctacgaggtgcaggtcccagagaacacccctataggttcccttgtcatcaccgtctctgccagggatttagatgctgggacccacggggagctctcctattcattttttcaatactccaatcaaatcattcaggcctttgaaataaactcaatcacgggagaaattagatttaaaaaggcgttggattttgaggaaattcaatcttatcacatggaagttgaggcctcagacggtgggggtctttcaggaaaatgcaccgtagccatagaggtaatggatataaacgacaacgcaccggaacttactatgtccttacttatcagtgatatcctagaaaactccccagaaacagtggtcgctgttttcggaatttcggatccggactccgggaacaatggaaaaatgatgtgttccatccaagaccatctccctttccttctaaaacctaccttagaaaatttctacactttgttaacagaaggagcgctagacagagagagcagggccgagtacaacatcaccattactgtcacagacttggggacacccaggctgaaaaccgagtacaacataaccctgcgggtctccgacgtcaatgacaacgcccccgccttcacccaaacctcctacaccctgttcgtccgcgagaacaacagccccgccctgcacatcggcagtgtcagcgccacagacagagactcaggcaccaacgctcaggtcacctactcgctgctgccgccccagaacccgcacctgcccctcgcctccctggtctccatcaacacagacaacggccacctgtttgccctcaggtcgctggactacgaggccctgcaggagttcgagttccgcgtgggcgcctcagaccgcggttctccggctttgagcagcgaggcgctggtgcgcgtgctggtgtgctggacgccaacgacaactcgcccttcgtgctgtacccgctgcagaacggctccgcgccctgcaccgagctggtgccccgggcggccgagccgggctacctggtgaccaaggtggtggcggtggacggcgactcgggccagaacgcctggctgtcgtaccagctgctcaaggccacggagcccgggctattcggcgtgtgggcgcacaatggcgaggtgcgcaccgccaggctgctgagcgagcgcgacgcggccaagcacaggctggtggtgctggtcaaggacaatggcgagcctccgcgctcggccaccgccacgctgcacgtgctcctggtggacggcttctcccagccctacctgcctctccctgaggcggccccggcccaggcccaggccgactcgctcaccgtctacctggtggtggcgttggcttcggtgtcttcgctcttcctcttctcggtgctcctgttcgtggcggtgcggctgtgcagaaggagcagggcggcctcggtgggtcgctactcggtgcccgagggcccctttccagggcatctggtggacgtgagtggcaccaggaccctgtcccagaattatcagtatgaagtttacctggcagaaagctctgagagccagttaaagtttcttaaaccggtacttcccaacttcttgggtgaagggactggtggggacagcgaggcaaactccaactctaggaatcattttgggttcaattaggaatctgacaacaggtcgtgataaatcatagaattcactattcatctgtaagttcccaattctctcattcgcgtagagtcacatattcacacattagtaatggctgtcatatttatagctatttcaacctgctggactattttccattccctttaatttttgttgtggtggttgtcagctatgttagttacagcatgtgcacacaatagcagagaaatggtgtttcctatggttgttgtttttgtttggtcagattttggaactcacaggtgttttcaggttcccagtatttgaacttgttcattgatatgttatgattaagagaatagtgtttcaaactttctggttatcatcagcatgactctaagtctatcgtaaatcacagcttttagcctaaaaaataattttcatttatgcaaaaattttagtaatcttgtaaattgttgcacttctgttgtgttgtttcaaaaacactactcttccctcaaatgaaccaatattttacctaggtgatgttttctctcctgaatttcttttttcaaaattgatatttatagaccatcggctgttattctaaaggattcaactcctgttacatgaaagaataatagaaaaaaggttggttgacttgtgattgctttttttttaataataaatggctttggtatgt

SEQ ID NO: 387579 - DNA, 332 bp, Homo sapiens
attgatcaaagcactgtgcatggcttaggagaaccgtggaccaagcaggcccgtatagatgatccaccctgtctgatggtgattaccagcatctgacagatcaagaggatgtgggaatgagggtttgaatgaatgcagatattcatcgcttgagcccaggagttccagaccagcctgggcaacattagtaagactgtgtctctacaaaaataaagtaaattagctgggcaaggtggcacatgcctatagtcccagctacttgggaggctgaggcaaaaggatcacttgagcccatgagttcaaggctgtagtgagctatgattatactgcac

SEQ ID NO: 387580 - DNA, 960 bp, Homo sapiens
aaaactccaagcaaagaaagaatgaagcaacaaaagaacaaaagcagggatttattgaaaacaaaagtacactccacagtgtgggagctgccctagcagcactcccccccgacccccgctgctttaccgaatcttcttgggtccaaataccccctagaactttcccattggccattccatgctcacctcatgtaaatgaagaggtggcttgcaattggtctgattggttgccagacccacccccacatcagtccgcttggttgtggacagcgaccattcagtggctagagtgaagttacaaagttgcaaacgaagattccacccgcagtcagtctgatttgttgaggacagccaatttcccgtctactgtgcagaaaaggtaggtggtttgcaacgggagtagcctctggtccttttgttacttaggcgtggaaagttagggttttcccttcaagttagttctgggaagtcggggtgaaacagccttagattccctgcctccagaccctattcacctgcctcactagcacctccagtgttttcatccagaagctcaacaaatcttattcaacggtttttatagaacttcatctccatcccctcccatagaggtgtgtgtgtgtgtgaggctgagagttcaaccctcttgtcacatggtctttctggtgactggccccaccctaaatcacttcattagcataatcaggtttgatcaaaaatagtggctcataaataaccaaagacactcctattagaaaattccaagagttttaggaggactgtgacaggaactggagagaaagaccatgtatttcatattatatcacagggacagaggtaatggttaaagctagtggataatgatgcaagtattgtctgctgaaagccaattcgttccgtatttcttaatattgcatgtttggtatcttttggttgcaagcaacaaaaacgaatttaaga

SEQ ID NO: 387581 - DNA, 569 bp, Homo sapiens
ccctgctatgcaaaacctttcccagaccttggtttcttaaaagaaagatgttgctacagttcccgattctttcttattacaggctcaggtgtacaggttattctgggttaattttatctaatgaagcccattcctttttgtacataaagatgtcacttaaacttatgcttacaaactaaagactaatcgctcaatatgaaaacatgaaaaaatttttgcttaaagtattaagatggaagtagttaaatatgggttattttgtccttttacttttttaaaaaatgttacatattgtatgcactgtgctgatgcaagaattctacattttaatgaattataaaattattctgcatctcatcacatcacagtatttctgtactatttattcatatatataaatatatatgggcttaatcatttaaaatttgttgcagcaagaactttcctacctgtaggcaatagattgctatgtttttaacaaattgtggcaaattctaaacagcaattcttttgtacgtaataggacatttcatcctagaaaaataaagtaatgtttttgacattggatt

SEQ ID NO: 387582 - DNA, 430 bp, Homo sapiens
atgttggcgtttccgctgtattttcttgcagtgtgccattctgttagacattagcgttttcgttgatgagcaagacatgcttaatgcatatttcgggcttgtgtatccatgcacctacctcagaaaacaagtattgtcaggtattctctccatagaacagcactaccctcctctctccccagatgtgactactgaggggaggtctgagtgtttaatttccgattttttcctctgcatttacacacacaccacacacgcacacacacacaccaagtaccagtataagcatctcccatctgcttttctccattgccatgcgtcctggtcaagcccccctcactctgtttcctgttcagcatgtactcccctcatccgattccgttgtatcagtcactgacagttaataaacctttgcaaacgttccccagtt

SEQ ID NO: 387583 - DNA, 284 bp, Homo sapiens
  misc_feature (92)..(93): n is a, c, g, or t
  misc_feature (99)..(99): n is a, c, g, or t
gagctcggtacgggatctctagagtgacctgaggatgaatgatgacatggcgtcgtatacaacgtcgttgatgtgagcaaacaaaagacaannagaganatgggttatacttattcttgcttactgccctgggtaaggtcagggtataacaaagtaagaagtaactagagaaagctatggattattttacaccaggaagggcttgcagtgcaagtcctgactcttgtcaccactcatttctacatcctactccagcctcagaatcttatggagaaaccactctc

SEQ ID NO: 387584 - DNA, 395 bp, Homo sapiens
aatatttcattccttcctttctttcttctactcttttttcttatctacctctacttctgttcctccctctctctccttctttcttttttccttccattctttagtaaatattcatcaagtacccactcattcctagagactgtgttaacagtaataatacgacactaaatgggctttgttcatagaactagagtctactgcctagcattttgtcagacttcattagctggtagaaatagactactattcaaatgtctatgtcatagagtctcctcccgatcaaatgcagaaagaaaaatcctttcaattcttttaatgattgttgggtaggcagaaatattgtaggagatgggtgtacagacaaacaactctgaatctgaaagtattacacatat

SEQ ID NO: 387585 - DNA, 847 bp, Homo sapiens
aacagagcaagactctgtccccacccccaaaaaagtgaagaacccaatttaaaaatcagcagaagatctgaacagccatattaccaaagaagataaacagatgggaaaaaaaagcacaagaaaagatgctctgcttcacatgtcatcagaaaactacaaattgaaacaatgagatacctctacacacctattagaatggccaaaatccagaatcctgacaacaccaatgctgtggagcaataggaactcttcaatcatggctggtaggaatgcaaaatggtatagccattttgcaacacagtttgacagcttcttacaaaactaaatatactcttgtcatacagtccagcaattgcaatccttagtatttacccaaatgagttgaaaacttatgtccacacaaaaatctgcacatggatgtttatagcaactttattcataattgccaaaacttggaagcaaccaaccaagatgtccttcaataagtgaatggataaataaactgtgggacatccagacaatggaatatttacagtgctaaaaagaaaagagctatcaagccatgagaaggcatggaggaaacttagatacatatttattatagccttttcagatgtatagttatatctgtataattccagctatataacatggaaaaggtaaaactgtgcagacaataaaaaggttggtgattgctagaggttgctaagaggagtgggaattaataggaagggcacagaggatttttagggcagtgaaactattctacatgatactctaatcgtgaatacaagtcattatacacgtgtcaaaacccatagaatgtacaataccaagagtgaaccct

SEQ ID NO: 387586 - DNA, 1477 bp, Homo sapiens
ccgcagttcctgagagaagaaccctgaggaacagacgttccctcgcggccctggcacctccaaccccagatatgctgctgctgctgctgctgcccctgctctgggggagggagagggtggaaggacagaagagtaaccggaaggattactcgctgacgatgcagagttccgtgaccgtgcaagagggcatgtgtgtccatgtgcgctgctccttctcctacccagtggacagccagactgactctgacccagttcatggctactggttccgggcagggaatgatataagctggaaggctccagtggccacaaacaacccagcttgggcagtgcaggaggaaactcgggaccgattccacctccttggggacccacagaccaaaaattgcaccctgagcatcagagatgccagaatgagtgatgcggggagatacttctttcgtatggagaaaggaaatataaaatggaattataaatatgaccagctctctgtgaacgtgacagaccctcctcagaacttgactgtgactgtcttccaaggagaaggcacagcatccacagctctggggaacagctcatctctttcagtcctagagggccagtctctgcgcttggtctgtgctgttgacagcaatccccctgccaggctgagctggacctggaggagtctgaccctgtacccctcacagccctcaaaccctctggtactggagctgcaagtgcacctgggggatgaaggggaattcacctgtcgagctcagaactctctgggttcccagcacgtttccctgaacctctccctgcaacaggagtacacaggcaaaatgaggcctgtatcaggagtgttgctgggggcggtcgggggagctggagccacagccctggtcttcctctccttctgtgtcatcttcattgtagtgaggtcctgcaggaagaaatcggcaaggccagcagcggacgtgggagacataggcatgaaggatgcaaacaccatcaggggctcagcctctcagggtaacctgactgagtcctgggcagatgataacccccgacaccatggcctggctgcccactcctcaggggaggaaagagagatccagtatgcacccctcagctttcataagggggagcctcaggacctatcaggacaagaagccaccaacaatgagtactcagagatcaagatccccaagtaagaaaatgcagaggctcgggcttgtttgagggttcacgacccctccagcaaaggagtctgaggctgattccagtagaattagcagccctcaatgctgtgcaacaagacatcagaacttattcctcttgtctaactgaaaatgcatgcctgatgaccaaactctccctttccccatccaatcggtccacactccccgccctggcctctggtacccaccattctcctctgtacttctctaaggatgactactttagattccgaatatagtgagattgtaacgtg

SEQ ID NO: 387587 - DNA, 1065 bp, Homo sapiens
ccgcagttcctgagagaagaaccctgaggaacagacgttccctcgcggccctggcacctccaaccccagatatgctgctgctgctgctgctgcccctgctctgggggagggagagggtggaaggacagaagagtaaccggaaggattactcgctgacgatgcagagttccgtgaccgtgcaagagggcatgtgtgtccatgtgcgctgctccttctcctacccagtggacagccagactgactctgacccagttcatggctactggttccgggcagggaatgatataagctggaaggctccagtggccacaaacaacccagcttgggcagtgcaggaggaaactcgggaccgattccacctccttggggacccacagaccaaaaattgcaccctgagcatcagagatgccagaatgagtgatgcggggagatacttctttcgtatggagaaaggaaatataaaatggaattataaatatgaccagctctctgtgaacgtgacagagtgaggtcctgcaggaagaaatcggcaaggccagcagcggacgtgggagacataggcatgaaggatgcaaacaccatcaggggctcagcctctcagggtaacctgactgagtcctgggcagatgataacccccgacaccatggcctggctgcccactcctcaggggaggaaagagagatccagtatgcacccctcagctttcataagggggagcctcaggacctatcaggacaagaagccaccaacaatgagtactcagagatcaagatccccaagtaagaaaatgcagaggctcgggcttgtttgagggttcacgacccctccagcaaaggagtctgaggctgattccagtagaattagcagccctcaatgctgtgcaacaagacatcagaacttattcctcttgtctaactgaaaatgcatgcctgatgaccaaactctccctttccccatccaatcggtccacactccccgccctggcctctggtacccaccattctcctctgtacttctctaaggatgactactttagattccgaatatagtgagattgtaacgtg

SEQ ID NO: 387588 - DNA, 968 bp, Homo sapiens
ccgcagttcctgagagaagaaccctgaggaacagacgttccctcgcggccctggcacctccaaccccagatatgctgctgctgctgctgctgcccctgctctgggggagggagagggtggaaggacagaagagtaaccggaaggattactcgctgacgatgcagagttccgtgaccgtgcaagagggcatgtgtgtccatgtgcgctgctccttctcctacccagtggacagccagactgactctgacccagttcatggctactggttccgggcagggaatgatataagctggaaggctccagtggccacaaacaacccagcttgggcagtgcaggaggaaactcgggaccgattccacctccttggggacccacagaccaaaaattgcaccctgagcatcagagatgccagaatgagtgatgcggggagatacttctttcgtatggagaaaggaaatataaaatggaattataaatatgaccagctctctgtgaacgtgacagggtaacctgactgagtcctgggcagatgataacccccgacaccatggcctggctgcccactcctcaggggaggaaagagagatccagtatgcacccctcagctttcataagggggagcctcaggacctatcaggacaagaagccaccaacaatgagtactcagagatcaagatccccaagtaagaaaatgcagaggctcgggcttgtttgagggttcacgacccctccagcaaaggagtctgaggctgattccagtagaattagcagccctcaatgctgtgcaacaagacatcagaacttattcctcttgtctaactgaaaatgcatgcctgatgaccaaactctccctttccccatccaatcggtccacactccccgccctggcctctggtacccaccattctcctctgtacttctctaaggatgactactttagattccgaatatagtgagattgtaacgtg

SEQ ID NO: 387589 - DNA, 1313 bp, Homo sapiens
tgaaataatattggatgtgattatctttattaaaaactaaaaattattgcaaaataatttgacagtgaatacaaatcaaaatttcaaatacaggcaggctgtgcttaccactctcatgcctcagtgacctcaggagttgtcccttcctcctccctcccattcttgccctttgtttctgggaagggggattagggtacccaagttggggccttataggaagtgggaggagaagagacccagttcttggagttggatcaccaaaacaattccaatccatcctcaggcaaaatgaggcctgtatcaggagtgttgctgggggcggtcgggggagctggagccacagccctggtcttcctctccttctgtgtcatcttcattgtgtgagcactgaccctagggagggagggagagtcctgggggagggcggactgggagcaggatccctgaagccagagctggaagggactgcatgggtcaagagcttggggcaagaatgagctcacgggtgcgtggcaagaatttcaagagcgcccttgtctgtggggctccacatctgtggtgaaccttgggccccaccacccaggaggcaggagcctctgttttcaacactggggtctctgggactggaccaccctcctcccacctcagttacccctccagcgccccaacaggaaatacagggcaggggttggtctgcccactgcaccccgatctgaccacactgaaaggctctctggtctcttcactcagagagtgaggtcctgcaggaagaaatcggcaaggccagcagcggacgtgggagacataggcatgaaggatgcaaacaccatcaggggctcagcctctcagggtaacctgactgagtcctgggcagatgataacccccgacaccatggcctggctgcccactcctcaggggaggaaagagagatccagtatgcacccctcagctttcataagggggagcctcaggacctatcaggacaagaagccaccaacaatgagtactcagagatcaagatccccaagtaagaaaatgcagaggctcgggcttgtttgagggttcacgacccctccagcaaaggagtctgaggctgattccagtagaattagcagccctcaatgctgtgcaacaagacatcagaacttattcctcttgtctaactgaaaatgcatgcctgatgaccaaactctccctttccccatccaatcggtccacactccccgccctggcctctggtacccaccattctcctctgtacttctctaaggatgactactttagattccgaatatagtgagattgtaacgtg

SEQ ID NO: 387590 - DNA, 1963 bp, Homo sapiens
ccgcagttcctgagagaagaaccctgaggaacagacgttccctcgcggccctggcacctccaaccccagatatgctgctgctgctgctgctgcccctgctctgggggagggagagggtggaaggacagaagagtaaccggaaggattactcgctgacgatgcagagttccgtgaccgtgcaagagggcatgtgtgtccatgtgcgctgctccttctcctacccagtggacagccagactgactctgacccagttcatggctactggttccgggcagggaatgatataagctggaaggctccagtggccacaaacaacccagcttgggcagtgcaggaggaaactcgggaccgattccacctccttggggacccacagaccaaaaattgcaccctgagcatcagagatgccagaatgagtgatgcggggagatacttctttcgtatggagaaaggaaatataaaatggaattataaatatgaccagctctctgtgaacgtgacagccccagcaccacggcaccagcctcacctgtcaggtgaccttgcctggggccggcgtgaccacgaacaggaccatccaactcaatgtgtcctgtctccatgtctttctgtcccagaccctcctcagaacttgactgtgactgtcttccaaggagaaggcacagcatccacagctctggggaacagctcatctctttcagtcctagagggccagtctctgcgcttggtctgtgctgttgacagcaatccccctgccaggctgagctggacctggaggagtctgaccctgtacccctcacagccctcaaaccctctggtactggagctgcaagtgcacctgggggatgaaggggaattcacctgtcgagctcagaactctctgggttcccagcacgtttccctgaacctctccctgcaacaggagtacacaggcaaaatgaggcctgtatcaggagtgttgctgggggcggtcgggggagctggagccacagccctggtcttcctctccttctgtgtcatcttcattgtgtgagcactgaccctagggagggagggagagtcctgggggagggcggactgggagcaggatccctgaagccagagctggaagggactgcatgggtcaagagcttggggcaagaatgagctcacgggtgcgtggcaagaatttcaagagcgcccttgtctgtggggctccacatctgtggtgaaccttgggccccaccacccaggaggcaggagcctctgttttcaacactggggtctctgggactggaccaccctcctcccacctcagttacccctccagcgccccaacaggaaatacagggcaggggttggtctgcccactgcaccccgatctgaccacactgaaaggctctctggtctcttcactcagagagtgaggtcctgcaggaagaaatcggcaaggccagcagcggacgtgggagacataggcatgaaggatgcaaacaccatcaggggctcagcctctcagggtaacctgactgagtcctgggcagatgataacccccgacaccatggcctggctgcccactcctcaggggaggaaagagagatccagtatgcacccctcagctttcataagggggagcctcaggacctatcaggacaagaagccaccaacaatgagtactcagagatcaagatccccaagtaagaaaatgcagaggctcgggcttgtttgagggttcacgacccctccagcaaaggagtctgaggctgattccagtagaattagcagccctcaatgctgtgcaacaagacatcagaacttattcctcttgtctaactgaaaatgcatgcctgatgaccaaactctccctttccccatccaatcggtccacactccccgccctggcctctggtacccaccattctcctctgtacttctctaaggatgactactttagattccgaatatagtgagattgtaacgtg

SEQ ID NO: 387591 - DNA, 1756 bp, Homo sapiens
ccgcagttcctgagagaagaaccctgaggaacagacgttccctcgcggccctggcacctccaaccccagatatgctgctgctgctgctgctgcccctgctctgggggagggagagggtggaaggacagaagagtaaccggaaggattactcgctgacgatgcagagttccgtgaccgtgcaagagggcatgtgtgtccatgtgcgctgctccttctcctacccagtggacagccagactgactctgacccagttcatggctactggttccgggcagggaatgatataagctggaaggctccagtggccacaaacaacccagcttgggcagtgcaggaggaaactcgggaccgattccacctccttggggacccacagaccaaaaattgcaccctgagcatcagagatgccagaatgagtgatgcggggagatacttctttcgtatggagaaaggaaatataaaatggaattataaatatgaccagctctctgtgaacgtgacagccttgacccacaggcccaacatccttatccccggtaccctggagtctggctgcttccagaatctgacctgctctgtgccctgggcctgtgagcaggggacgccccctatgatctcctggatggggacctctgtgtcccccctgcacccctccaccacccgctcctcagtgctcaccctcatcccacagccccagcaccacggcaccagcctcacctgtcaggtgaccttgcctggggccggcgtgaccacgaacaggaccatccaactcaatgtgtcctaccctcctcagaacttgactgtgactgtcttccaaggagaaggcacagcatccacagctctggggaacagctcatctctttcagtcctagagggccagtctctgcgcttggtctgtgctgttgacagcaatccccctgccaggctgagctggacctggaggagtctgaccctgtacccctcacagccctcaaaccctctggtactggagctgcaagtgcacctgggggatgaaggggaattcacctgtcgagctcagaactctctgggttcccagcacgtttccctgaacctctccctgcaacaggagtacacaggcaaaatgaggcctgtatcaggagtgttgctgggggcggtcgggggagctggagccacagccctggtcttcctctccttctgtgtcatcttcattgtagtgaggtcctgcaggaagaaatcggcaaggccagcagcggacgtgggagacataggcatgaaggatgcaaacaccatcaggggctcagcctctcagggtaacctgactgagtcctgggcagatgataacccccgacaccatggcctggctgcccactcctcaggggaggaaagagagatccagtatgcacccctcagctttcataagggggagcctcaggacctatcaggacaagaagccaccaacaatgagtactcagagatcaagatccccaagtaagaaaatgcagaggctcgggcttgtttgagggttcacgacccctccagcaaaggagtctgaggctgattccagtagaattagcagccctcaatgctgtgcaacaagacatcagaacttattcctcttgtctaactgaaaatgcatgcctgatgaccaaactctccctttccccatccaatcggtccacactccccgccctggcctctggtacccaccattctcctctgtacttctctaaggatgactactttagattccgaatatagtgagattgtaacgtg

SEQ ID NO: 387592 - DNA, 1864 bp, Homo sapiens
ccgcagttcctgagagaagaaccctgaggaacagacgttccctcgcggccctggcacctccaaccccagatatgctgctgctgctgctgctgcccctgctctgggggagggagagggtggaaggacagaagagtaaccggaaggattactcgctgacgatgcagagttccgtgaccgtgcaagagggcatgtgtgtccatgtgcgctgctccttctcctacccagtggacagccagactgactctgacccagttcatggctactggttccgggcagggaatgatataagctggaaggctccagtggccacaaacaacccagcttgggcagtgcaggaggaaactcgggaccgattccacctccttggggacccacagaccaaaaattgcaccctgagcatcagagatgccagaatgagtgatgcggggagatacttctttcgtatggagaaaggaaatataaaatggaattataaatatgaccagctctctgtgaacgtgacagccttgacccacaggcccaacatccttatccccggtaccctggagtctggctgcttccagaatctgacctgctctgtgccctgggcctgtgagcaggggacgccccctatgatctcctggatggggacctctgtgtcccccctgcacccctccaccacccgctcctcagtgctcaccctcatcccacagccccagcaccacggcaccagcctcacctgtcaggtgaccttgcctggggccggcgtgaccacgaacaggaccatccaactcaatgtgtcctaccctcctcagaacttgactgtgactgtcttccaaggagaaggcacagcatccacagctctggggaacagctcatctctttcagtcctagagggccagtctctgcgcttggtctgtgctgttgacagcaatccccctgccaggctgagctggacctggaggagtctgaccctgtacccctcacagccctcaaaccctctggtactggagctgcaagtgcacctgggggatgaaggggaattcacctgtcgagctcagaactctctgggttcccagcacgtttccctgaacctctccctgcaacaggagtacacaggcaaaatgaggcctgtatcaggagtgttgctgggggcggtcgggggagctggagccacagccctggtcttcctctccttctgtgtcatcttcattgtagtgaggtcctgcaggaagaaatcggcaaggccagcagcggacgtgggagacataggcatgaaggatgcaaacaccatcaggggctcagcctctcagggtaacctgactgagtcctgggcagatgataacccccgacaccatggcctggctgcccactcctcaggggaggaaagagagatccagtatgcacccctcagctttcataagggggagcctcaggacctatcaggacaagaagccaccaacaatgagtactcagagatcaagatccccaagtaagaaaatgcagaggctcgggcttgtttgagggttcacgacccctccagcaaaggagtctgaggctgattccagtagaattagcagccctcaatgctgtgcaacaagacatcagaacttattcctcttgtctaactgaaaatgcatgcctgatgaccaaactctccctttccccatccaatcggtccacactccccgccctggcctctggtacccaccattctcctctgtacttctctaaggatgactactttagattccgaatatagtgagattgtaacgtgtttgtctctctgtgcctggcttatttcactcaacataacatcctctaagttcatctgtgttgtttccaatgacagagtaatgtactgaataattcaaaatagctaaaa

SEQ ID NO: 387593 - DNA, 2128 bp, Homo sapiens
ccgcagttcctgagagaagaaccctgaggaacagacgttccctcgcggccctggcacctccaaccccagatatgctgctgctgctgctgctgcccctgctctgggggagggagagggtggaaggacagaagagtaaccggaaggattactcgctgacgatgcagagttccgtgaccgtgcaagagggcatgtgtgtccatgtgcgctgctccttctcctacccagtggacagccagactgactctgacccagttcatggctactggttccgggcagggaatgatataagctggaaggctccagtggccacaaacaacccagcttgggcagtgcaggaggaaactcgggaccgattccacctccttggggacccacagaccaaaaattgcaccctgagcatcagagatgccagaatgagtgatgcggggagatacttctttcgtatggagaaaggaaatataaaatggaattataaatatgaccagctctctgtgaacgtgacagccttgacccacaggcccaacatccttatccccggtaccctggagtctggctgcttccagaatctgacctgctctgtgccctgggcctgtgagcaggggacgccccctatgatctcctggatggggacctctgtgtcccccctgcacccctccaccacccgctcctcagtgctcaccctcatcccacagccccagcaccacggcaccagcctcacctgtcaggtgaccttgcctggggccggcgtgaccacgaacaggaccatccaactcaatgtgtcctaccctcctcagaacttgactgtgactgtcttccaaggagaaggcacagcatccacagctctggggaacagctcatctctttcagtcctagagggccagtctctgcgcttggtctgtgctgttgacagcaatccccctgccaggctgagctggacctggaggagtctgaccctgtacccctcacagccctcaaaccctctggtactggagctgcaagtgcacctgggggatgaaggggaattcacctgtcgagctcagaactctctgggttcccagcacgtttccctgaacctctccctgcaacaggagtacacaggcaaaatgaggcctgtatcaggagtgttgctgggggcggtcgggggagctggagccacagccctggtcttcctctccttctgtgtcatcttcattgtgtgagcactgaccctagggagggagggagagtcctgggggagggcggactgggagcaggatccctgaagccagagctggaagggactgcatgggtcaagagcttggggcaagaatgagctcacgggtgcgtggcaagaatttcaagagcgcccttgtctgtggggctccacatctgtggtgaaccttgggccccaccacccaggaggcaggagcctctgttttcaacactggggtctctgggactggaccaccctcctcccacctcagttacccctccagcgccccaacaggaaatacagggcaggggttggtctgcccactgcaccccgatctgaccacactgaaaggctctctggtctcttcactcagagagtgaggtcctgcaggaagaaatcggcaaggccagcagcggacgtgggagacataggcatgaaggatgcaaacaccatcaggggctcagcctctcagggtaacctgactgagtcctgggcagatgataacccccgacaccatggcctggctgcccactcctcaggggaggaaagagagatccagtatgcacccctcagctttcataagggggagcctcaggacctatcaggacaagaagccaccaacaatgagtactcagagatcaagatccccaagtaagaaaatgcagaggctcgggcttgtttgagggttcacgacccctccagcaaaggagtctgaggctgattccagtagaattagcagccctcaatgctgtgcaacaagacatcagaacttattcctcttgtctaactgaaaatgcatgcctgatgaccaaactctccctttccccatccaatcggtccacactccccgccctggcctctggtacccaccattctcctctgtacttctctaaggatgactactttagattccgaatatagtgagattgtaacgtg

SEQ ID NO: 387594 - DNA, 1021 bp, Homo sapiens
ccgcagttcctgagagaagaaccctgaggaacagacgttccctcgcggccctggcacctccaaccccagatatgctgctgctgctgctgctgcccctgctctgggggagggagagggtggaaggacagaagagtaaccggaaggattactcgctgacgatgcagagttccgtgaccgtgcaagagggcatgtgtgtccatgtgcgctgctccttctcctacccagtggacagccagactgactctgacccagttcatggctactggttccgggcagggaatgatataagctggaaggctccagtggccacaaacaacccagcttgggcagtgcaggaggaaactcgggaccgattccacctccttggggacccacagaccaaaaattgcaccctgagcatcagagatgccagaatgagtgatgcggggagatacttctttcgtatggagaaaggaaatatagtgaggtcctgcaggaagaaatcggcaaggccagcagcggacgtgggagacataggcatgaaggatgcaaacaccatcaggggctcagcctctcagggtaacctgactgagtcctgggcagatgataacccccgacaccatggcctggctgcccactcctcaggggaggaaagagagatccagtatgcacccctcagctttcataagggggagcctcaggacctatcaggacaagaagccaccaacaatgagtactcagagatcaagatccccaagtaagaaaatgcagaggctcgggcttgtttgagggttcacgacccctccagcaaaggagtctgaggctgattccagtagaattagcagccctcaatgctgtgcaacaagacatcagaacttattcctcttgtctaactgaaaatgcatgcctgatgaccaaactctccctttccccatccaatcggtccacactccccgccctggcctctggtacccaccattctcctctgtacttctctaaggatgactactttagattccgaatatagtgagattgtaacgtg

SEQ ID NO: 387595 - DNA, 420 bp, Homo sapiens
acacacacacgcacacacacacactggattcctcttgaatatcattttgtaatctgctcttattgaagtcgaatttagacacagtaaaatgaactctctttggtaaacagtgccatgagtttgacaaatgcatacagttgaatcattgctcctatggtctgtagtcttatcctatatactttgctgtacattataaacatatttctgtgtcactaaaggtagatctcttttttttgttttgttttgtttgttgttttttgatttctcatgtctgactttgggtccatcctggaatgagaggagggggctccctcagcactgagccctgtgtagtgaaaggggcttcacagagaaaaaaggaggaagggtcctcagggtcaagttcctgctctctgtcaccaacaattccctttctgtcac

SEQ ID NO: 387596 - DNA, 3277 bp, Homo sapiens
  misc_feature (69)..(69): n is a, c, g, or t
  misc_feature (723)..(723): n is a, c, g, or t
  misc_feature (881)..(881): n is a, c, g, or t
  misc_feature (961)..(961): n is a, c, g, or t
  misc_feature (1120)..(1120): n is a, c, g, or t
  misc_feature (1700)..(1700): n is a, c, g, or t
  misc_feature (1950)..(1950): n is a, c, g, or t
  misc_feature (2283)..(2283): n is a, c, g, or t
  misc_feature (2320)..(2320): n is a, c, g, or t
atcgtattttaaacttgagttcagacttagaccttatgagttgaaggtgatttcctgccttactgagtntttctgttatcagacctataatttgtttacactatactcttctgatattattagtagtagccaagattttcttcactcttttcttggaaaattggatagaactgttaaggtacagccttctgggttcttactgtccttgaatcttttcatttcttccttcctccctttcctgttgcacactaatgaagatggacatgaaatggacgtgaaacattaggcaaggcaaggcctgacagatttggctggtaaacaactagtcaactttttgaatttagacagttattaattacttaggcagagaaaaaagtagtccaaggtgccatttctctgtgccccttgtctcacacttgaaaagagtgacaccgaaataaaaggggctagctaacgattgtcccttgaatggtgggacaccctgttgctgaggaatcattgttatactgcagctaagcctgtttagtctgcaaatgtaccctacaaggttgaggaagaaaggtctcatgtttcattagaacctgagaggagatgggaaactctcctgacagaagcatcctggggcaagagagaggtgagtggaaaacgtccatccatatagcaacttctcacaagcctctcttgtccatgttccaggatgattccatggccttctgccaaganagcttgcactgtgattcagaccttaacctctctgcgctctttggacatgtgcaaggtctccagagtgccatggctgatctctttcccttcagtggaggctcaagtagaagtactgtttcttctactaatgtcaccccctcatgctgagaaaaacagantgagaaagggaaagagtggtgaagtggcataggcgataacatccttatctctcatcagtcacacattagtaccttaactntggaaatctagcctttgatgtttttaatttgggactcatatataaaaccagttttttttttttctcttttcgtagcatcttaataattatagcctacttctcttcacagtttcagctattttggaggatgactgtatgtattcctttttaaagtacctnttgggactccccactgagaatttcgtatatgccacattaagtgcattttaattttgattaaaatttattcatcacttttcatgtgatacagtaacagcatttaaatgtttaatttcacttatataaatgttcatgttagaataacatacttaaaatctttttctttagatcattgtatgttattaaatgagcaatagtactaccagtcatgtcattttacatattgcttttggcactcatactctttattgctggttttatattaagatcaataataatcaagaggtctctcttttcagtaaatttcatgcagactcggtggcagaggctaaactttagtttgagagaccagtgaaaaaacctggaacctaaagttgagatgatgaagtcttacataatggccttggaaatagagagggagggctgaatctagatgggatatcacagataataaattgacaatatttgggaaaattatttgttgttagtagacctgtgcggtgatctggaagatgcaagcaaggctttagggtctgctggctttttcctagagtgtcaggagcatggtcagatctccatnattcttggagaaagctatgttggaggagatccttgcaattcctcctgttattaacccttccccttacccccaagagtagcagtgttttgctactgcaagctactagttggcagaaaggttattgagtaagtaggtggcagtcttccttaaccctgtacatgggagagcattagtctttgcagctgaagagactaagcagtagagaagattcctctcattgtcttgatgagggactgacagcttgctagcnaaaatgttgcttgaccacaggaatgagacttccatgcaccctcatcttgccattattaaagctatccagcatttgggtccagccttaagagaaggtgagagtcatgactaggccagtgaatataacagtgcatataaaagggacctagttaccagggagaaaacagaagtagaccactgaaagaggcaaaacctagtgaaaatagaattattgaacaaaatattgaacaaatacacttgaacaaaataataagggcacataagcagattgaattataacaaattctttagagctagaaaaaaatgacattaagttttaatgtttagattattnaaaaaagaggacacgtgctattaagttccaaattacnggcctagaaaatcagggggaagaattatgtcattaaatggaatgaaagtactaacagataaaatcaagagaagacgattagagacttacaagaagttctgaaggggaaaataaaaaaccaggtggacaagcaataactaaataatagatgggatgaagaaagacttgagactgcagatcagaacagctggctgttgtctagccaggagagaagtgagggaaacacacaaacacctatgcagagtctggcaaaatccctgaattccaaggaaaaagtaaaaatcctctaagcttccatatgaaagaccaagttgcatacaaagaaaaagaaccaaaccgacaccaggcaatcttccttaccacacaagcagaagtagaaaaaagtggaatgacgctacacagttgacaaagaactgcaactcaggaaccttgtactcagccaaaggaccctccacatgtcagaatgaaaaggagatactagtttatcctatctgaggaaaactaaagaaacaacctgtgaatcaaaatagagacctttatacaggggaagataaagaagacagagaacagtttaataaagaaaacagtagatcagtctcactaatataaattcaaaagtaaaaataaaatattagcaaattgaatctgccattgtatcaaaagaattctagactatcaacactagagtttatttcagacatgtaatgatgattttttaccaggaaatctgtcaacataatttattctatcaaagggacaaataatcatagaagctattctcatgagaatttgaagtaaaatgggtataagaaggcagttatgcgtgtaatcccagcactttgggagggcgaggcagttggattgcttgagcctggtaggtggagtttgcaatgagccaagactgtgtcactgtacttgagcctgggcaacagaatgagactcagtctcaaaagaaaag

SEQ ID NO: 387597 - DNA, 284 bp, Homo sapiens
tggcctcggggttggagacccctgctgtaatccatagtgtctgtgacctccgttgtcagggtagcagttgtgcatgagtaaacagcaaaagtgcccacatcaaaagaatggatgtcactggtttcaaagaaaattataaaagtaatggcactcccttaggagctaggaataaaatgattatggtgaaaaaattggtaaagaaatgaatcacatatgttcagtcacattcccaaaacagaagtcaaaactaggtcagctcttactctttaaagttgataagaaaa

SEQ ID NO: 387598 - DNA, 112 bp, Homo sapiens
catacaattctctacacacgttagaagtttcaagcggctttacaacatcagttttgctaaatccggcaatcctatagtgtcattggctgagtattcctgagcacgtcttaca

SEQ ID NO: 387599 - DNA, 292 bp, Homo sapiens
ccgtatactggctaatgaactacaatattaaaataattatttctgcaagcaagttgaaaaccaagaaaacaatatttgtttcataaatgtatggcatagatttccctgtttattattctttttatctgcaatagagaaatttcagtttctggaatatgttggtactgctaagctaaatggcaaataacatagagttcaatgtcattctttattgcatttacatttggtgatacgttatattgaacttttcttgcattaaaaagatagtatttttcccctctctcacaaggca

SEQ ID NO: 387600 - DNA, 231 bp, Homo sapiens
aagtgttctttgcagatacatgcacattttccttttttatccgaatggaattgtgtatagaattgtgattctttcttaattcagatttattagtatattgacacatatggattgacctgggtttttgttgttattgttttgggggattttgttgttgttgttgttgttgtttgttttttgttttttgttttttgttttacgacagagtctcactcagtcacccaggcttga

SEQ ID NO: 387601 - DNA, 231 bp, Homo sapiens
ggaacttcatgaaggaaaggaaagcaacaaaaataataaatatctggataaatataataaattgttttttctcctcttaagttcattaagatatgtataatggtagaaataaaaagttaacaatattgtctgttggggtttccaatgtgtataggtcggaaacaactaataatatgaaggagaagactttaaagagaaccaaatgtctgtaaggtttataagttacccatg

SEQ ID NO: 387602 - DNA, 294 bp, Homo sapiens
ttattttgccctgaaagcagatgatggtgttaaataaagcaacaaattaaatgtggatgttagtgctgcaatggaggaaaacttgcagaaaaattgacctgacttatttaatcaagtgcagagacattactgtgctacctggggagctattcaaatacaatacaatctatatgccttccacctgagcaaccaagttcttacagcgctaactagagaaggtgcaggggagggggggaggactggataaagttatttttgtggcagttaagcttcgattacttgtagatccataaa

SEQ ID NO: 387603 - DNA, 379 bp, Homo sapiens
taaactcattcatcgtttcttgaaataaacccaataaactttaatggaagctcataagaatttttttctgaattctgccctctgtcaaaggaagaaaatgacaacatggacgcatatctgtatttgggtggcattaatgactcagtgaccttcacttttgcagccagcgaaatacttggcaattttaatttagaaatattactgtatcatcatttaacagaaatacttactaaagcagaaatatactgactttagaagcatttcaaagaagcagggttggcactgaccagtgttctcttaaggtagaagacagaatatttgactaaagacagtgctgtagcaggtagaaatagacattatttagaccccttttctgagt

SEQ ID NO: 387604 - DNA, 401 bp, Homo sapiens
ctccagttgccaaatacatgttcctcattttattctaagccctcaccaaccagaggcacttcttttgtttgtttgtttgttttttggagacaaggtctggctctgtcactcaggctggagtgcagtggcaccatcttggctcactgcaaccttcacctcccgtgcttaagccagtctcccacctcaggctccagagtagctggaactacaggcacacaccaccacacccagcgtgtgtgtgtcagcgtgtgtgtgtgtgcatgcgtgcgtgtgtgcgtgtagagatgggttttcgccatactgcccaggctggcttgaactcctgagcccaagtgatctacctaccttggcctcccaaagtgctaggattacaaatgtgagccactaagcctggccttttt

SEQ ID NO: 387605 - DNA, 123 bp, Homo sapiens
caagaggtaagggttaacatggggctggaacctgaagaatgtgatttagcatttcccaaagtctgttgtgtggacattaagtccaataacatgctcagagcaaaacacagttaagtttcagga

SEQ ID NO: 387606 - DNA, 222 bp, Homo sapiens
ttctagatgtcaaagtaagtataaatgggcatagacatgattaggttaggctgaaaggttggttggtcattgtttacagttggtggtagaacatgccaagttagatgagtcccaaagagattttatagctatgagatatcatcttgtgtgttcctggctttcagattggtacttgtcaccatggaattctagagcagcaaggaagtgcagatcttattattt

SEQ ID NO: 387607 - DNA, 112 bp, Homo sapiens
tcgcctggcatttgagggctcaaaacctgttgtttggatgaatgctggcctttgtggcaatattccctcccaacaatagagacttctgttgcgtttgttgtgttcaagtgtc

SEQ ID NO: 387608 - DNA, 421 bp, Homo sapiens
ttctttcttttgttccttccttctcagcctcctttcctaactttctttccccaaacatcaagtgttgagagagttctttggttataaacatcctgggtcctcttcacgtctcactctattctttctcaaagggatctaatctactcccatgattttaataagcacctagaagatagaattcccaaatgtttgtttctaattcagatccgaatacacacctgctaactcaacatcacatggatgtctcagaggagcctaaatttcactcatcatgactaaaaactcaacttaccatcattgtcatccaacataaatgtggcctatatcagtaggtggttcaacaaccacccagttatgcaacctgaaatccagagggacattcccgaaaccttctcctactaactttccagtatgtaaccca

SEQ ID NO: 387609 - DNA, 390 bp, Homo sapiens
gcatttatgactaaaagctttagtgtgacctagatcaagagtaggaaaactttttctgtcaagagcaagatagtaactatttttgtctttgttagccatatggtccctgtcgcaattactcaactttgccactgtagtgagaaagccaccagagacaatacataagcaaggggagctagctatgttccaatagaactttatttataaaaacaaatggtcaactatagtttgccagcctctgatacagactcttcatacttcatagtccagtctcccaacacttcctcatcttaccttgatttctactaaatgaaactttgacttcaggattcagatctgatgtcacttccataacacatctttcttggaatgtactgcatcattcctgga

SEQ ID NO: 387610 - DNA, 513 bp, Homo sapiens
ttgcagtgagccaagatcatgccactgtactccagcctgggcaacggagcgagactccatctgaaaaaacaaaacagaaaaaatcttgaaaggatactaagtctgacacaaggaaattaagtcatgggactctgaccagatattctgtctacttccttctctgctatgggcaacttggaggcagcaactactatcagtttatctgtaatgtgagaatttatattacataacagatactggggatataggataccatggattttagttaatacatttcctcatagaaaataaggaaataacagtcttgttcctgtcctaacaattctgttagactaatgatctccagtgattggcgatttgacctggtttcttcctggactatttgaatgggtggatttgttggtgcatctcttgtcttctttccttttccattctcctttatttttgtatttacatacttgtatgcaactttgtaatctgattttcccatgtaacattttaatttgatgggtg

SEQ ID NO: 387611 - DNA, 618 bp, Homo sapiens
  misc_feature (598)..(599): n is a, c, g, or t
  misc_feature (606)..(606): n is a, c, g, or t
ttgcagtgagccaagatcatgccactgtactccagcctgggcaacggagcgagactccatctgaaaaaacaaaacagaaaaaatcttgaaaggatactaagtctgacacaaggaaattaagtcatgggactctgaccagatattctgtctacttccttctctgctatgggcaacttggaggcagcaactactatcagtttatctgtaatgtgagaatttatattacataacagatactggggatataggataccatggattttagttaatacatttcctcatagaaaataaggaaataacagtcttgttcctgtcctaacaattctgttagactaatgatctccagtgattggcgatttgacctggtttcttcctggactatttgaatgggtggatttgttggtgcatctcttgtcttctttccttttccaaaaggataagctcttctcttaggttggctttaagtgacaagggctcgctgtcacccagcctggactaaactcttgggctcaagtgatccgcccatctcagcctcccaagttctgggattatagacatgagccaccacacccagcctatcttgttttcttttttactnnttacagncagtcaaggtct

SEQ ID NO: 387612 - DNA, 551 bp, Homo sapiens
aggtccatcaggctgtaccatgtggcagatggagcccatggaggatggaggcccctggcacactgactgtccccactcatcccctgggtagggcagaagtgttcccacaccgtacagcctgccagtgggcatcagggaaacacctgagtcaccacgaggagtacgaggcacttgggggttgcccagctgaccaggagcacagagggctgccctgaaagtgagcccctccctactcctagcagagacggggaagggagacaactggacttggtgggaaggactgggccccaggtggcttagttgctctggccccagaccaggtctctctagagctctgggccatttgggttaagcttctaactaccactgcccatgaaattcacctgccaatgggcaatggatggagtcatgcccctccctgcacctaagttctctgaagggctgagtttcttcttggggccagacagtgggtattggaatgggagcatgggggctgcatgtgcactgcaggctttgtgtgtgtgtgtgtgtgtgtgtgtgtgtgtgtgtgt

SEQ ID NO: 387613 - DNA, 692 bp, Homo sapiens
tcttttttctatctcatttagtgcctgtccattccaaggcagcataaagttagcatagcttctcattttactggtttggtaaaagttttaaaggtttagttcagtttgcttttgggttttcatatgaggtagactatgagaactctttaatttatgatgtgatatataattaaagacaatcccattgtagctggcatgtgggctattactggggatcatgggaaagagaaggcttggaggatcttctttataaaatacacgtaagtatggactgaattccaaacaaaccgcaaaatggaaggaacctcgttttatcgcatccaggtaaaggatagaaaaggtatcttcagttttcccagaagcaacatccacaaggacaactcgtaattttaaatgattaaaagtaattgcagtagatcagtgtcattcatagcaaattagttctgattgatggagaatgctgcatctgtggatttttatgttataaaattaatttaagacttcttttgttaaactcgtttaatcttctgcactactccgttctttcattatccttgtcagttttaagggctggaatatctttgtacaactaaattcagttgacttcttctggatacccaagttgaacagacacatatattagtggagctctggttggaaagaggacaccagtacacactattagtagccta

SEQ ID NO: 387614 - DNA, 622 bp, Homo sapiens
caaaattgtcatttataacaatttcccactgtataaaaatacagtttcttgaggaaagggccaccttctcctattctgcaggatttaggtgaaatatgacaacagtggccctggtcttactgagaccaacaaccattttctgcaggatgagtctacttctagcccagtaaatccatctctccaatctcattctgttcatcaaaagaaattcttttcgagagacctggctagatgttcggttgaagactgacaccccagggcagatggaactgtcagagttcaagttaaactctcctatacttctgagttgagagttgtgagtctggatgtgcctctggtgatgtgaaaacactcaacaccattggcaagcatacacctggtggttaccaggcaccttgagatgccagggtgtccagccttctggagctggctttggaagaaaaatgtatccaactgggaaaccgacatgtacactccaagggcataaaccaaggaggaggaagagttggaatccgggaaacagaagatccaacactagacagagacagggaagtccaaggaccagcgctatgcagcagagcaagagagtgagccattccgagaggagctggaggggtggcct

SEQ ID NO: 387615 - DNA, 171 bp, Homo sapiens
acagcgtcagcttcccaaagtgctgggattacaggcatgagccaccacgtccacccctacattttttttctccccccagatgtatacttttaagttctgtttttgtttttgtttgtttgtttgtttgagtctcactctgtcgcccaggctggagtgtggtggcacaatctt

SEQ ID NO: 387616 - DNA, 308 bp, Homo sapiens
ttttttggtcatgaaagcaatccagctgcccctgggtgctgtaatgatttcaactaactctgctaatcaattttatattagtcaaaacggagcatatatctttcaggtcaagagtttatttatttatttatttgtttattttttgagaagaagttttgctcttgtcccccaggctggagtgcaaaggtgtgatctcggctcactgcaacctccacctcccgggttcaagcgattctcctgtctcagcctccagagtagctgggattacaggtgcctgccaccacacccagctaatttttgtattttta

SEQ ID NO: 387617 - DNA, 411 bp, Homo sapiens
tgcttcctcattgcaaaaccagcattcctctcacggtcagctatgcacaaaatatccttctgttctcctggtcacatcaaagcaccttcacgctatgcagacaggtcattgagggaacggagaaaattaacaaacgcacctaggttatttctattaaaattagcccctcagccggtaggctctgtcagtttccattgaacacaaactctgacaagtctgttgaaaacttttaacctttccaggttgtgtcaacagcttgcaaacacaacaggaggatggtgcctctgagttctgcctttccttttggaatagaggaggtatcagaatttgttaccaccagctttcatgtttatcttcactgctctgctcactccccgctgccacttaaggagcatacaaacaccttactgg

SEQ ID NO: 387618 - DNA, 3637 bp, Homo sapiens
  misc_feature (2099)..(2099): n is a, c, g, or t
cccctgtctccctctctgaacccgcccattgggggtaggacactcagccgtcaccgctcgctctgctggccgctacctgcagcaagatagggccgccatcgccgggcgacgacgaggaggaggcggccgccgcagccggggcccccgccgccgccggagcgacaggtgatttggcttctgcacagttaggaggagcaccaaaccgatgggaggttttgtcagccacacctacaactataaaagatgaagctggtaatctagtccagattccaagtgctgctacttcaagtgggcagtatgttcttccccttcagaatttgcagaatcaacaaatattttccgttgcaccaggatcagattcatcaaatggtacagtgtccagtgttcaatatcaagtgataccacagatccagtcagcagatggtcagcaggttcaaattggtttcacaggctcttcagataatgggggtataaatcaagaaagcagtcaaattcagatcattcctggctctaatcaaaccttacttgcctctggaacaccttctgctaacatccagaatctcataccacagactggtcaagtccaggttcagggagttgcaattggtggttcatcttttcctggtcaaacccaagtagttgctaatgtgcctcttggtctgccaggaaatattacgtttgtaccaatcaatagtgtcgatctagattctttgggactctcgggcagttctcagacaatgactgcaggcattaatgccgacggacatttgataaacacaggacaagctatggatagttcagacaattcagaaaggactggtgagcgggtttctcctgatattaatgaaactaatactgatacagatttatttgtgccaacatcctcttcatcacagttgcctgttacgatagatagtacaggtatattacaacaaaacacaaatagcttgactacatctagtgggcaggttcattcttcagatcttcagggaaattatatccagtcgcctgtttctgaagagacacaggcacagaatattcaggtttctacagcacagcctgttgtacagcatctacaacttcaagagtctcagcagccaaccagtcaagcccaaattgtgcaaggtattacaccacagacaatccatggtgtgcaagccagtggtcaaaatatatcacaacaggctttgcaaaatcttcagttgcagctgaatcctggaacctttttaattcaggcacagacagtgaccccttctggacaggtaacttggcaaacgtttcaagtacaaggggtccagaacttgcagaatttgcaaatacagaatactgctgcccaacaaataactttgacgcctgttcaaaccctcacacttggtcaagttgcggcaggtggagccttcacttcaactccagttagtctaagcactggtcagttgccaaatctacaaacagttacagtgaactctatagattctgctggtatacagctacatccaggagagaatgctgacagtcctgcagatattaggatcaaggaagaagaacctgatcctgaagagtggcagctcagtggtgattctaccttgaataccaatgacctaacacacttaagagtacaggtggtagatgaagaaggggaccaacaacatcaagaaggaaaaagacttcggagggtagcttgcacctgtcccaactgtaaagaaggtggtggaagaggtaccaatcttgggaaaaagaagcaacacatttgtcatataccaggatgtggtaaagtctatgggaagacctcacatctgagagctcatctgcgttggcattctggagaacgcccttttgtttgtaactggatgtactgtggtaaaagatttactcgaagtgatgaattacagaggcacagaagaacacatacaggtgagaagaaatttgtttgtccagaatgttcaaaacgctttatgagaagtgaccaccttgccaaacatattaaaacacaccagaataaaaaaggtattcactctagcagtacagtgctggcatctgtggaagctgcgcgagatgatactttgattactgcaggaggaacaacgcttatccttgcaaanattcaacaaggttctgtttcagggataggaactgttaatacttccgccaccagcaatcaagatatccttaccaacactgaaatacctttacagcttgtcacagtttctggaaatgagacaatggagtaaatattacacaaatacttattcattgtggttatttttatacagtagtgagaagaatattgttcctaagttcttagatatctttttattgatgtgcaaaaatttttggattgacagtaacttggttatacatgacactgaaatgccttactttgtatgatattccatagtatattaaaaatggtaaaattgcatgggttttgtaggtacttttggaatctagaagaaatgaaattttaccaagttatataaagagaaaattgaatttaacaatgcgaatggtagtctaaccaaatgcatcaatcctgtgtggtttagtgtaaaaatgagaacatgttggtatttatctattgtaagataaaaaagctggtgggtgaaagaaatcatgttatgataaaaaattttgtaattttcttgatgactggaatttttattatgcataactgacaaatcaagtttccaagcaaatgttacatagtgtaggctttacttagcttatcaatttgtcattttgaagctaattattttaattaggttaactatgtacaatattttaagcattactcttgtaagattttgaaaactacattttaacatggaactctagggatagtcaccttttaaatcctgttgaaaagccatgtttaagatttaatttgccaaaataatgtcttgttaatattctttcaataacgaagttgggcaatataaccaatgtttaaaaaagtttaaaatgtataagttgaggcatttgggtggtaagagaatgttatagtgaattatcccttttcttgactattggaggaccaaaaaataaggtgtattgcgtcttagcagtgattttatccaatcttgtttccaaaaaccatggtctcccagggccttaaaagccatcatgtaaattaccagtaaagtgtaacatatgcaaacataacaaaatcacttccatagtgacgatactccaaccatatggatattagtcatagaagaactagaggttttatgatatttttttaagtcttttttttttgtctaggtagtcagtctgcacttaaatatcaatcattttccttttttgcttcttcccttaaaatttatatgtatccagtacatttaattgagaagcgtatgttttttattatgctgtattttctttttattttttaattattgtttatattttcaattcaaaaatgtacaaaataaagttacattgctggtctgtgtaagagctatacagttttcctaaatgtatacctgtaactgcagcagttcacctatttgcaaaaatttggaattctgttcatttgttattcttaagaccacctcaaatttaaaggctaccttattgtacgtttaaagtgtattataacagtgtggtagttaataaaacactatttttttttcttttg

SEQ ID NO: 387619 - DNA, 4175 bp, Homo sapiens
  misc_feature (2637)..(2637): n is a, c, g, or t
aggccgggaataatacgtttgtgcagcaaaatggttatgtgaccgattttttaaaacacagaattctgccccactgaatacatacacataccacaagtaaaatgaaatatacttttaagtgcccgttttggtgccactggccaaaattaaaactctccttccgtatgtgaggtgacttgagatttcttttttgctttaaatgcctgccttcagggtacgtgaaagtgggagaccggttggaaaactggggctaagggggctgggagcgagatggctgtgactgaatcaggaagctggatgtgagagagaaaaatcctcctccagcctcggagggggtgtctcccctaataccagctccctccccccgggctcgtggggcgggtctggtttgctcagtagcggcagcggccgcagcagcagccccggggctgagcagcggtggcctcctggcagcgcagggaagcggcggctccaagagcgcgaggccctggggagatccggccaagactgctgccgggatggaggaagcgtccagtggagcaggagtcaccggggacgaatttcctccccagctcagctcccctacagcttggctaggcctgctccgagcgcctgcaaggtggaggaggcctgcgcctcgggcctggcagcggcagccggcgagggaggcgggcacagcggggtaaccggcgagccgtagccgctctcgaaaacctacgctgccacggccgctcattgtctctccccttccacccgggggcaaacaggaagcgcgccgcctggcagaccgacggacaggcgcctggaccaatgagcacagccgacaaagagcacggcggcgaatgagagccaagaagaggggcgggagttccgggcgggctgtcaccctcttccccccttttgggctggaggctccaccttttgtgtttcccgcacagtcaatcaaaataggaaaaaaaaatccccggaccgctccggccgtgtccgccgccgcttcccgcatcctctcccgccgccgccgccttcgctcctcaccatgtgtaaggcggcggggagccccgcctgaggtgccctaaacacactatgaccgctcccgaaaagcccgtgaaacaagaggaaatggctgccttggacgtggatagcggcggcggcggtggcggcggcggcggccacggcgagtatctgcagcagcagcaacagcacggaaacggtgcggtggcggcggcagcggcggcccaggacactcagccgtcaccgctcgctctgctggccgctacctgcagcaagatagggccgccatcgccgggcgacgacgaggaggaggcggccgccgcagccggggcccccgccgccgccggagcgacaggtgatttggcttctgcacagttaggaggagcaccaaaccgatgggaggttttgtcagccacacctacaactataaaagatgaagctggtaatctagtccagattccaagtgctgctacttcaagtgggcagtatgttcttccccttcagaatttgcagaatcaacaaatattttccgttgcaccaggatcagattcatcaaatggtacagtgtccagtgttcaatatcaagtgataccacagcatctacaacttcaagagtctcagcagccaaccagtcaagcccaaattgtgcaaggtattacaccacagacaatccatggtgtgcaagccagtggtcaaaatatatcacaacaggctttgcaaaatcttcagttgcagctgaatcctggaacctttttaattcaggcacagacagtgaccccttctggacaggtaacttggcaaacgtttcaagtacaaggggtccagaacttgcagaatttgcaaatacagaatactgctgcccaacaaataactttgacgcctgttcaaaccctcacacttggtcaagttgcggcaggtggagccttcacttcaactccagttagtctaagcactggtcagttgccaaatctacaaacagttacagtgaactctatagattctgctggtatacagctacatccaggagagaatgctgacagtcctgcagatattaggatcaaggaagaagaacctgatcctgaagagtggcagctcagtggtgattctaccttgaataccaatgacctaacacacttaagagtacaggtggtagatgaagaaggggaccaacaacatcaagaaggaaaaagacttcggagggtagcttgcacctgtcccaactgtaaagaaggtggtggaagaggtaccaatcttgggaaaaagaagcaacacatttgtcatataccaggatgtggtaaagtctatgggaagacctcacatctgagagctcatctgcgttggcattctggagaacgcccttttgtttgtaactggatgtactgtggtaaaagatttactcgaagtgatgaattacagaggcacagaagaacacatacaggtgagaagaaatttgtttgtccagaatgttcaaaacgctttatgagaagtgaccaccttgccaaacatattaaaacacaccagaataaaaaaggtattcactctagcagtacagtgctggcatctgtggaagctgcgcgagatgatactttgattactgcaggaggaacaacgcttatccttgcaaanattcaacaaggttctgtttcagggataggaactgttaatacttccgccaccagcaatcaagatatccttaccaacactgaaatacctttacagcttgtcacagtttctggaaatgagacaatggagtaaatattacacaaatacttattcattgtggttatttttatacagtagtgagaagaatattgttcctaagttcttagatatctttttattgatgtgcaaaaatttttggattgacagtaacttggttatacatgacactgaaatgccttactttgtatgatattccatagtatattaaaaatggtaaaattgcatgggttttgtaggtacttttggaatctagaagaaatgaaattttaccaagttatataaagagaaaattgaatttaacaatgcgaatggtagtctaaccaaatgcatcaatcctgtgtggtttagtgtaaaaatgagaacatgttggtatttatctattgtaagataaaaaagctggtgggtgaaagaaatcatgttatgataaaaaattttgtaattttcttgatgactggaatttttattatgcataactgacaaatcaagtttccaagcaaatgttacatagtgtaggctttacttagcttatcaatttgtcattttgaagctaattattttaattaggttaactatgtacaatattttaagcattactcttgtaagattttgaaaactacattttaacatggaactctagggatagtcaccttttaaatcctgttgaaaagccatgtttaagatttaatttgccaaaataatgtcttgttaatattctttcaataacgaagttgggcaatataaccaatgtttaaaaaagtttaaaatgtataagttgaggcatttgggtggtaagagaatgttatagtgaattatcccttttcttgactattggaggaccaaaaaataaggtgtattgcgtcttagcagtgattttatccaatcttgtttccaaaaaccatggtctcccagggccttaaaagccatcatgtaaattaccagtaaagtgtaacatatgcaaacataacaaaatcacttccatagtgacgatactccaaccatatggatattagtcatagaagaactagaggttttatgatatttttttaagtcttttttttttgtctaggtagtcagtctgcacttaaatatcaatcattttccttttttgcttcttcccttaaaatttatatgtatccagtacatttaattgagaagcgtatgttttttattatgctgtattttctttttattttttaattattgtttatattttcaattcaaaaatgtacaaaataaagttacattgctggtctgtgtaagagctatacagttttcctaaatgtatacctgtaactgcagcagttcacctatttgcaaaaatttggaattctgttcatttgttattcttaagaccacctcaaatttaaaggctaccttattgtacgtttaaagtgtattataacagtgtggtagttaataaaacactatttttttttcttttg

SEQ ID NO: 387620 - DNA, 3312 bp, Homo sapiens
  misc_feature (17)..(17): n is a, c, g, or t
  misc_feature (1774)..(1774): n is a, c, g, or t
tctagaggatcccggcnacatcctgagatcagattcatcaaatggtacagtgtccagtgttcaatatcaagtgataccacagatccagtcagcagatggtcagcaggttcaaattggtttcacaggctcttcagataatgggggtataaatcaagaaagcagtcaaattcagatcattcctggctctaatcaaaccttacttgcctctggaacaccttctgctaacatccagaatctcataccacagactggtcaagtccaggttcagggagttgcaattggtggttcatcttttcctggtcaaacccaagtagttgctaatgtgcctcttggtctgccaggaaatattacgtttgtaccaatcaatagtgtcgatctagattctttgggactctcgggcagttctcagacaatgactgcaggcattaatgccgacggacatttgataaacacaggacaagctatggatagttcagacaattcagaaaggactggtgagcgggtttctcctgatattaatgaaactaatactgatacagatttatttgtgccaacatcctcttcatcacagttgcctgttacgatagatagtacaggtatattacaacaaaacacaaatagcttgactacatctagtgggcaggttcattcttcagatcttcagggaaattatatccagtcgcctgtttctgaagagacacaggcacagaatattcaggtttctacagcacagcctgttgtacagcatctacaacttcaagagtctcagcagccaaccagtcaagcccaaattgtgcaaggtattacaccacagacaatccatggtgtgcaagccagtggtcaaaatatatcacaacaggctttgcaaaatcttcagttgcagctgaatcctggaacctttttaattcaggcacagacagtgaccccttctggacaggtaacttggcaaacgtttcaagtacaaggggtccagaacttgcagaatttgcaaatacagaatactgctgcccaacaaataactttgacgcctgttcaaaccctcacacttggtcaagttgcggcaggtggagccttcacttcaactccagttagtctaagcactggtcagttgccaaatctacaaacagttacagtgaactctatagattctgctggtatacagctacatccaggagagaatgctgacagtcctgcagatattaggatcaaggaagaagaacctgatcctgaagagtggcagctcagtggtgattctaccttgaataccaatgacctaacacacttaagagtacaggtggtagatgaagaaggggaccaacaacatcaagaaggaaaaagacttcggagggtagcttgcacctgtcccaactgtaaagaaggtggtggaagaggtaccaatcttgggaaaaagaagcaacacatttgtcatataccaggatgtggtaaagtctatgggaagacctcacatctgagagctcatctgcgttggcattctggagaacgcccttttgtttgtaactggatgtactgtggtaaaagatttactcgaagtgatgaattacagaggcacagaagaacacatacaggtgagaagaaatttgtttgtccagaatgttcaaaacgctttatgagaagtgaccaccttgccaaacatattaaaacacaccagaataaaaaaggtattcactctagcagtacagtgctggcatctgtggaagctgcgcgagatgatactttgattactgcaggaggaacaacgcttatccttgcaaanattcaacaaggttctgtttcagggataggaactgttaatacttccgccaccagcaatcaagatatccttaccaacactgaaatacctttacagcttgtcacagtttctggaaatgagacaatggagtaaatattacacaaatacttattcattgtggttatttttatacagtagtgagaagaatattgttcctaagttcttagatatctttttattgatgtgcaaaaatttttggattgacagtaacttggttatacatgacactgaaatgccttactttgtatgatattccatagtatattaaaaatggtaaaattgcatgggttttgtaggtacttttggaatctagaagaaatgaaattttaccaagttatataaagagaaaattgaatttaacaatgcgaatggtagtctaaccaaatgcatcaatcctgtgtggtttagtgtaaaaatgagaacatgttggtatttatctattgtaagataaaaaagctggtgggtgaaagaaatcatgttatgataaaaaattttgtaattttcttgatgactggaatttttattatgcataactgacaaatcaagtttccaagcaaatgttacatagtgtaggctttacttagcttatcaatttgtcattttgaagctaattattttaattaggttaactatgtacaatattttaagcattactcttgtaagattttgaaaactacattttaacatggaactctagggatagtcaccttttaaatcctgttgaaaagccatgtttaagatttaatttgccaaaataatgtcttgttaatattctttcaataacgaagttgggcaatataaccaatgtttaaaaaagtttaaaatgtataagttgaggcatttgggtggtaagagaatgttatagtgaattatcccttttcttgactattggaggaccaaaaaataaggtgtattgcgtcttagcagtgattttatccaatcttgtttccaaaaaccatggtctcccagggccttaaaagccatcatgtaaattaccagtaaagtgtaacatatgcaaacataacaaaatcacttccatagtgacgatactccaaccatatggatattagtcatagaagaactagaggttttatgatatttttttaagtcttttttttttgtctaggtagtcagtctgcacttaaatatcaatcattttccttttttgcttcttcccttaaaatttatatgtatccagtacatttaattgagaagcgtatgttttttattatgctgtattttctttttattttttaattattgtttatattttcaattcaaaaatgtacaaaataaagttacattgctggtctgtgtaagagctatacagttttcctaaatgtatacctgtaactgcagcagttcacctatttgcaaaaatttggaattctgttcatttgttattcttaagaccacctcaaatttaaaggctaccttattgtacgtttaaagtgtattataacagtgtggtagttaataaaacactatttttttttcttttg

SEQ ID NO: 387621 - DNA, 4838 bp, Homo sapiens
  misc_feature (3300)..(3300): n is a, c, g, or t
aggccgggaataatacgtttgtgcagcaaaatggttatgtgaccgattttttaaaacacagaattctgccccactgaatacatacacataccacaagtaaaatgaaatatacttttaagtgcccgttttggtgccactggccaaaattaaaactctccttccgtatgtgaggtgacttgagatttcttttttgctttaaatgcctgccttcagggtacgtgaaagtgggagaccggttggaaaactggggctaagggggctgggagcgagatggctgtgactgaatcaggaagctggatgtgagagagaaaaatcctcctccagcctcggagggggtgtctcccctaataccagctccctccccccgggctcgtggggcgggtctggtttgctcagtagcggcagcggccgcagcagcagccccggggctgagcagcggtggcctcctggcagcgcagggaagcggcggctccaagagcgcgaggccctggggagatccggccaagactgctgccgggatggaggaagcgtccagtggagcaggagtcaccggggacgaatttcctccccagctcagctcccctacagcttggctaggcctgctccgagcgcctgcaaggtggaggaggcctgcgcctcgggcctggcagcggcagccggcgagggaggcgggcacagcggggtaaccggcgagccgtagccgctctcgaaaacctacgctgccacggccgctcattgtctctccccttccacccgggggcaaacaggaagcgcgccgcctggcagaccgacggacaggcgcctggaccaatgagcacagccgacaaagagcacggcggcgaatgagagccaagaagaggggcgggagttccgggcgggctgtcaccctcttccccccttttgggctggaggctccaccttttgtgtttcccgcacagtcaatcaaaataggaaaaaaaaatccccggaccgctccggccgtgtccgccgccgcttcccgcatcctctcccgccgccgccgccttcgctcctcaccatgtgtaaggcggcggggagccccgcctgaggtgccctaaacacactatgaccgctcccgaaaagcccgtgaaacaagaggaaatggctgccttggacgtggatagcggcggcggcggtggcggcggcggcggccacggcgagtatctgcagcagcagcaacagcacggaaacggtgcggtggcggcggcagcggcggcccaggacactcagccgtcaccgctcgctctgctggccgctacctgcagcaagatagggccgccatcgccgggcgacgacgaggaggaggcggccgccgcagccggggcccccgccgccgccggagcgacaggtgatttggcttctgcacagttaggaggagcaccaaaccgatgggaggttttgtcagccacacctacaactataaaagatgaagctggtaatctagtccagattccaagtgctgctacttcaagtgggcagtatgttcttccccttcagaatttgcagaatcaacaaatattttccgttgcaccaggatcagattcatcaaatggtacagtgtccagtgttcaatatcaagtgataccacagatccagtcagcagatggtcagcaggttcaaattggtttcacaggctcttcagataatgggggtataaatcaagaaagcagtcaaattcagatcattcctggctctaatcaaaccttacttgcctctggaacaccttctgctaacatccagaatctcataccacagactggtcaagtccaggttcagggagttgcaattggtggttcatcttttcctggtcaaacccaagtagttgctaatgtgcctcttggtctgccaggaaatattacgtttgtaccaatcaatagtgtcgatctagattctttgggactctcgggcagttctcagacaatgactgcaggcattaatgccgacggacatttgataaacacaggacaagctatggatagttcagacaattcagaaaggactggtgagcgggtttctcctgatattaatgaaactaatactgatacagatttatttgtgccaacatcctcttcatcacagttgcctgttacgatagatagtacaggtatattacaacaaaacacaaatagcttgactacatctagtgggcaggttcattcttcagatcttcagggaaattatatccagtcgcctgtttctgaagagacacaggcacagaatattcaggtttctacagcacagcctgttgtacagcatctacaacttcaagagtctcagcagccaaccagtcaagcccaaattgtgcaaggtattacaccacagacaatccatggtgtgcaagccagtggtcaaaatatatcacaacaggctttgcaaaatcttcagttgcagctgaatcctggaacctttttaattcaggcacagacagtgaccccttctggacaggtaacttggcaaacgtttcaagtacaaggggtccagaacttgcagaatttgcaaatacagaatactgctgcccaacaaataactttgacgcctgttcaaaccctcacacttggtcaagttgcggcaggtggagccttcacttcaactccagttagtctaagcactggtcagttgccaaatctacaaacagttacagtgaactctatagattctgctggtatacagctacatccaggagagaatgctgacagtcctgcagatattaggatcaaggaagaagaacctgatcctgaagagtggcagctcagtggtgattctaccttgaataccaatgacctaacacacttaagagtacaggtggtagatgaagaaggggaccaacaacatcaagaaggaaaaagacttcggagggtagcttgcacctgtcccaactgtaaagaaggtggtggaagaggtaccaatcttgggaaaaagaagcaacacatttgtcatataccaggatgtggtaaagtctatgggaagacctcacatctgagagctcatctgcgttggcattctggagaacgcccttttgtttgtaactggatgtactgtggtaaaagatttactcgaagtgatgaattacagaggcacagaagaacacatacaggtgagaagaaatttgtttgtccagaatgttcaaaacgctttatgagaagtgaccaccttgccaaacatattaaaacacaccagaataaaaaaggtattcactctagcagtacagtgctggcatctgtggaagctgcgcgagatgatactttgattactgcaggaggaacaacgcttatccttgcaaanattcaacaaggttctgtttcagggataggaactgttaatacttccgccaccagcaatcaagatatccttaccaacactgaaatacctttacagcttgtcacagtttctggaaatgagacaatggagtaaatattacacaaatacttattcattgtggttatttttatacagtagtgagaagaatattgttcctaagttcttagatatctttttattgatgtgcaaaaatttttggattgacagtaacttggttatacatgacactgaaatgccttactttgtatgatattccatagtatattaaaaatggtaaaattgcatgggttttgtaggtacttttggaatctagaagaaatgaaattttaccaagttatataaagagaaaattgaatttaacaatgcgaatggtagtctaaccaaatgcatcaatcctgtgtggtttagtgtaaaaatgagaacatgttggtatttatctattgtaagataaaaaagctggtgggtgaaagaaatcatgttatgataaaaaattttgtaattttcttgatgactggaatttttattatgcataactgacaaatcaagtttccaagcaaatgttacatagtgtaggctttacttagcttatcaatttgtcattttgaagctaattattttaattaggttaactatgtacaatattttaagcattactcttgtaagattttgaaaactacattttaacatggaactctagggatagtcaccttttaaatcctgttgaaaagccatgtttaagatttaatttgccaaaataatgtcttgttaatattctttcaataacgaagttgggcaatataaccaatgtttaaaaaagtttaaaatgtataagttgaggcatttgggtggtaagagaatgttatagtgaattatcccttttcttgactattggaggaccaaaaaataaggtgtattgcgtcttagcagtgattttatccaatcttgtttccaaaaaccatggtctcccagggccttaaaagccatcatgtaaattaccagtaaagtgtaacatatgcaaacataacaaaatcacttccatagtgacgatactccaaccatatggatattagtcatagaagaactagaggttttatgatatttttttaagtcttttttttttgtctaggtagtcagtctgcacttaaatatcaatcattttccttttttgcttcttcccttaaaatttatatgtatccagtacatttaattgagaagcgtatgttttttattatgctgtattttctttttattttttaattattgtttatattttcaattcaaaaatgtacaaaataaagttacattgctggtctgtgtaagagctatacagttttcctaaatgtatacctgtaactgcagcagttcacctatttgcaaaaatttggaattctgttcatttgttattcttaagaccacctcaaatttaaaggctaccttattgtacgtttaaagtgtattataacagtgtggtagttaataaaacactatttttttttcttttg

SEQ ID NO: 387622 - DNA, 3430 bp, Homo sapiens
  misc_feature (17)..(17): n is a, c, g, or t
  misc_feature (1892)..(1892): n is a, c, g, or t
tctagaggatcccggcnacatcctgaactataaaagatgaagctggtaatctagtccagattccaagtgctgctacttcaagtgggcagtatgttcttccccttcagaatttgcagaatcaacaaatattttccgttgcaccaggatcagattcatcaaatggtacagtgtccagtgttcaatatcaagtgataccacagatccagtcagcagatggtcagcaggttcaaattggtttcacaggctcttcagataatgggggtataaatcaagaaagcagtcaaattcagatcattcctggctctaatcaaaccttacttgcctctggaacaccttctgctaacatccagaatctcataccacagactggtcaagtccaggttcagggagttgcaattggtggttcatcttttcctggtcaaacccaagtagttgctaatgtgcctcttggtctgccaggaaatattacgtttgtaccaatcaatagtgtcgatctagattctttgggactctcgggcagttctcagacaatgactgcaggcattaatgccgacggacatttgataaacacaggacaagctatggatagttcagacaattcagaaaggactggtgagcgggtttctcctgatattaatgaaactaatactgatacagatttatttgtgccaacatcctcttcatcacagttgcctgttacgatagatagtacaggtatattacaacaaaacacaaatagcttgactacatctagtgggcaggttcattcttcagatcttcagggaaattatatccagtcgcctgtttctgaagagacacaggcacagaatattcaggtttctacagcacagcctgttgtacagcatctacaacttcaagagtctcagcagccaaccagtcaagcccaaattgtgcaaggtattacaccacagacaatccatggtgtgcaagccagtggtcaaaatatatcacaacaggctttgcaaaatcttcagttgcagctgaatcctggaacctttttaattcaggcacagacagtgaccccttctggacaggtaacttggcaaacgtttcaagtacaaggggtccagaacttgcagaatttgcaaatacagaatactgctgcccaacaaataactttgacgcctgttcaaaccctcacacttggtcaagttgcggcaggtggagccttcacttcaactccagttagtctaagcactggtcagttgccaaatctacaaacagttacagtgaactctatagattctgctggtatacagctacatccaggagagaatgctgacagtcctgcagatattaggatcaaggaagaagaacctgatcctgaagagtggcagctcagtggtgattctaccttgaataccaatgacctaacacacttaagagtacaggtggtagatgaagaaggggaccaacaacatcaagaaggaaaaagacttcggagggtagcttgcacctgtcccaactgtaaagaaggtggtggaagaggtaccaatcttgggaaaaagaagcaacacatttgtcatataccaggatgtggtaaagtctatgggaagacctcacatctgagagctcatctgcgttggcattctggagaacgcccttttgtttgtaactggatgtactgtggtaaaagatttactcgaagtgatgaattacagaggcacagaagaacacatacaggtgagaagaaatttgtttgtccagaatgttcaaaacgctttatgagaagtgaccaccttgccaaacatattaaaacacaccagaataaaaaaggtattcactctagcagtacagtgctggcatctgtggaagctgcgcgagatgatactttgattactgcaggaggaacaacgcttatccttgcaaanattcaacaaggttctgtttcagggataggaactgttaatacttccgccaccagcaatcaagatatccttaccaacactgaaatacctttacagcttgtcacagtttctggaaatgagacaatggagtaaatattacacaaatacttattcattgtggttatttttatacagtagtgagaagaatattgttcctaagttcttagatatctttttattgatgtgcaaaaatttttggattgacagtaacttggttatacatgacactgaaatgccttactttgtatgatattccatagtatattaaaaatggtaaaattgcatgggttttgtaggtacttttggaatctagaagaaatgaaattttaccaagttatataaagagaaaattgaatttaacaatgcgaatggtagtctaaccaaatgcatcaatcctgtgtggtttagtgtaaaaatgagaacatgttggtatttatctattgtaagataaaaaagctggtgggtgaaagaaatcatgttatgataaaaaattttgtaattttcttgatgactggaatttttattatgcataactgacaaatcaagtttccaagcaaatgttacatagtgtaggctttacttagcttatcaatttgtcattttgaagctaattattttaattaggttaactatgtacaatattttaagcattactcttgtaagattttgaaaactacattttaacatggaactctagggatagtcaccttttaaatcctgttgaaaagccatgtttaagatttaatttgccaaaataatgtcttgttaatattctttcaataacgaagttgggcaatataaccaatgtttaaaaaagtttaaaatgtataagttgaggcatttgggtggtaagagaatgttatagtgaattatcccttttcttgactattggaggaccaaaaaataaggtgtattgcgtcttagcagtgattttatccaatcttgtttccaaaaaccatggtctcccagggccttaaaagccatcatgtaaattaccagtaaagtgtaacatatgcaaacataacaaaatcacttccatagtgacgatactccaaccatatggatattagtcatagaagaactagaggttttatgatatttttttaagtcttttttttttgtctaggtagtcagtctgcacttaaatatcaatcattttccttttttgcttcttcccttaaaatttatatgtatccagtacatttaattgagaagcgtatgttttttattatgctgtattttctttttattttttaattattgtttatattttcaattcaaaaatgtacaaaataaagttacattgctggtctgtgtaagagctatacagttttcctaaatgtatacctgtaactgcagcagttcacctatttgcaaaaatttggaattctgttcatttgttattcttaagaccacctcaaatttaaaggctaccttattgtacgtttaaagtgtattataacagtgtggtagttaataaaacactatttttttttcttttg

SEQ ID NO: 387623 - DNA, 3448 bp, Homo sapiens
  misc_feature (34)..(34): n is a, c, g, or t
  misc_feature (1910)..(1910): n is a, c, g, or t
cgcggtgactgggcatagctgttctagagtaccnggtattcgtgactataaaagatgaagctggtaatctagtccagattccaagtgctgctacttcaagtgggcagtatgttcttccccttcagaatttgcagaatcaacaaatattttccgttgcaccaggatcagattcatcaaatggtacagtgtccagtgttcaatatcaagtgataccacagatccagtcagcagatggtcagcaggttcaaattggtttcacaggctcttcagataatgggggtataaatcaagaaagcagtcaaattcagatcattcctggctctaatcaaaccttacttgcctctggaacaccttctgctaacatccagaatctcataccacagactggtcaagtccaggttcagggagttgcaattggtggttcatcttttcctggtcaaacccaagtagttgctaatgtgcctcttggtctgccaggaaatattacgtttgtaccaatcaatagtgtcgatctagattctttgggactctcgggcagttctcagacaatgactgcaggcattaatgccgacggacatttgataaacacaggacaagctatggatagttcagacaattcagaaaggactggtgagcgggtttctcctgatattaatgaaactaatactgatacagatttatttgtgccaacatcctcttcatcacagttgcctgttacgatagatagtacaggtatattacaacaaaacacaaatagcttgactacatctagtgggcaggttcattcttcagatcttcagggaaattatatccagtcgcctgtttctgaagagacacaggcacagaatattcaggtttctacagcacagcctgttgtacagcatctacaacttcaagagtctcagcagccaaccagtcaagcccaaattgtgcaaggtattacaccacagacaatccatggtgtgcaagccagtggtcaaaatatatcacaacaggctttgcaaaatcttcagttgcagctgaatcctggaacctttttaattcaggcacagacagtgaccccttctggacaggtaacttggcaaacgtttcaagtacaaggggtccagaacttgcagaatttgcaaatacagaatactgctgcccaacaaataactttgacgcctgttcaaaccctcacacttggtcaagttgcggcaggtggagccttcacttcaactccagttagtctaagcactggtcagttgccaaatctacaaacagttacagtgaactctatagattctgctggtatacagctacatccaggagagaatgctgacagtcctgcagatattaggatcaaggaagaagaacctgatcctgaagagtggcagctcagtggtgattctaccttgaataccaatgacctaacacacttaagagtacaggtggtagatgaagaaggggaccaacaacatcaagaaggaaaaagacttcggagggtagcttgcacctgtcccaactgtaaagaaggtggtggaagaggtaccaatcttgggaaaaagaagcaacacatttgtcatataccaggatgtggtaaagtctatgggaagacctcacatctgagagctcatctgcgttggcattctggagaacgcccttttgtttgtaactggatgtactgtggtaaaagatttactcgaagtgatgaattacagaggcacagaagaacacatacaggtgagaagaaatttgtttgtccagaatgttcaaaacgctttatgagaagtgaccaccttgccaaacatattaaaacacaccagaataaaaaaggtattcactctagcagtacagtgctggcatctgtggaagctgcgcgagatgatactttgattactgcaggaggaacaacgcttatccttgcaaanattcaacaaggttctgtttcagggataggaactgttaatacttccgccaccagcaatcaagatatccttaccaacactgaaatacctttacagcttgtcacagtttctggaaatgagacaatggagtaaatattacacaaatacttattcattgtggttatttttatacagtagtgagaagaatattgttcctaagttcttagatatctttttattgatgtgcaaaaatttttggattgacagtaacttggttatacatgacactgaaatgccttactttgtatgatattccatagtatattaaaaatggtaaaattgcatgggttttgtaggtacttttggaatctagaagaaatgaaattttaccaagttatataaagagaaaattgaatttaacaatgcgaatggtagtctaaccaaatgcatcaatcctgtgtggtttagtgtaaaaatgagaacatgttggtatttatctattgtaagataaaaaagctggtgggtgaaagaaatcatgttatgataaaaaattttgtaattttcttgatgactggaatttttattatgcataactgacaaatcaagtttccaagcaaatgttacatagtgtaggctttacttagcttatcaatttgtcattttgaagctaattattttaattaggttaactatgtacaatattttaagcattactcttgtaagattttgaaaactacattttaacatggaactctagggatagtcaccttttaaatcctgttgaaaagccatgtttaagatttaatttgccaaaataatgtcttgttaatattctttcaataacgaagttgggcaatataaccaatgtttaaaaaagtttaaaatgtataagttgaggcatttgggtggtaagagaatgttatagtgaattatcccttttcttgactattggaggaccaaaaaataaggtgtattgcgtcttagcagtgattttatccaatcttgtttccaaaaaccatggtctcccagggccttaaaagccatcatgtaaattaccagtaaagtgtaacatatgcaaacataacaaaatcacttccatagtgacgatactccaaccatatggatattagtcatagaagaactagaggttttatgatatttttttaagtcttttttttttgtctaggtagtcagtctgcacttaaatatcaatcattttccttttttgcttcttcccttaaaatttatatgtatccagtacatttaattgagaagcgtatgttttttattatgctgtattttctttttattttttaattattgtttatattttcaattcaaaaatgtacaaaataaagttacattgctggtctgtgtaagagctatacagttttcctaaatgtatacctgtaactgcagcagttcacctatttgcaaaaatttggaattctgttcatttgttattcttaagaccacctcaaatttaaaggctaccttattgtacgtttaaagtgtattataacagtgtggtagttaataaaacactatttttttttcttttg

SEQ ID NO: 387624 - DNA, 301 bp, Homo sapiens
caggggccatctcacaatgtctggagacatttttggtggtgacagtgggtgcttctggcatctggtgagtagaggccagggacactgctcaacatcccacagtgcacaggacggcctcataacaaggaatcatctagccccatatgcgccacgatggaggagccctgctttctattccgaagaccagcagtcctaagatacgatgtggacagcacagacccagttttctaagtgaagagataaggcttgagcaggcagcagcctggtaatgccaaggccaggacagttagccaagtgtctg

SEQ ID NO: 387625 - DNA, 292 bp, Homo sapiens
agcggaaaatggaaccaagatttttatagccacaaaactgactttcgactatgaagtgcaagaacttcctggtgtggactgaatatgccgtcccaaaattcatatgatgaaatcgtaacgcccaaggtgacagtaccaggaggtgacgcctttggaaggtgattaggtcatgagggtgcagcccttatgaatggcattagggcccttataagggagattccagatagctccctttccttctgccacatgaagtcttagtgagaagatgctgccagcaggccttcaccagatc

SEQ ID NO: 387626 - DNA, 406 bp, Homo sapiens
ccaggactgggcactaatcacagaactgtaacaggcaccccatgggaatgaccaactgttagacgggggctgcagggcagcacttccctcttgcctcccaccaacagcttctaaagggaaatgtcgactgttttcacaccagtcccctcactgcggctgtttgtgggctcagatgataggtcacaacaacctgattcagtcctcactgtggctgtgtgggggggggtcagatgacaggccaccacaacctgattcagtccccactgtggctgtgtgtggggggggggcagatgacaggccaccacaacctgattcagtcctcactgcagctgagtgtgtgtgggtgcagaagacaggccaccacaacctgattcaggattcagttgggctaccagccagtgccata

SEQ ID NO: 387627 - DNA, 600 bp, Homo sapiens
ctcaagttcccagtgactttccggaggccgggaacagggaaaactttttccaatacagtcagatcccgcctccccggaggctccatgtcctccacagctttcccaggaccccagagtccaggcccctattcccctcctcccgccgaccatagcagacaaagaccccagccaagcccagtggcgctgcggcgttcaggacccccgtaggccaaaatcccagcccagcccttccccatgtggccagacaaagggacggtggagccgggtaagaaaggtccccctaatttcccgccccagaccctaaacctccaaagaggcaagacttaagatccagaaagccccgtaacctcccctcggccaccccagaggccctcccttctccgtaagaaggaccaaatgccccccagattacacaaggggtccttctcactccaaagtgacaccgccgcagacgcacgccccacaccccgccagcgcccttggcccgcacccgctcctgcgcgcacgcccaaactcagacccagccgcaggcaccctaactccggccagagttcccactcctcactgaggctcggtcacgggagcaaattcgggcccccg

SEQ ID NO: 387628 - DNA, 388 bp, Homo sapiens
aaaaaaatggtagctttatagtgaagaaagatggaaaacactaccttagccagataatcaagatcaacattagcagtgtaattgataagtaataaagttcatgttaatggtatgtacccttgatacaatgtgataaaaatggcactttatttctggggtcttcctccccaaaactcataatgccagtctaatcttgagaaaaacatcagacaaatccaaattgagggaacatcaatgttcaccttgtgtatttcttgggtcctgactgatactcctcaaaactgtcaaggtcataaaaaaccaggagtctgataaattgtcacagtgaagaggagcctaaggagaaaggataactaaatgtaatgtggcattctgggacaaaaaagaa

SEQ ID NO: 387629 - DNA, 261 bp, Homo sapiens
tatatatataaatgctatatatatataaaatgactacatttcaatgtatattggagttggtatggtggagagaagttgagcactttggagtcagacctgagtttcagttctggtcacgttatttaaatgcaccgagtcccatctgtaataacataaaagtaatactagtttgcagtagtatcatattaaatgataaaacagtgccttttacataataaatgcacaagaaatgtttttactgtcccttagtccataattaat

SEQ ID NO: 387630 - DNA, 533 bp, Homo sapiens
ggtgtgaaccaccgcgcccagcctaggacccacacattttaagccccggtgtagatgggtgttaccaaccctaaacccaaaaagatcactcctatgtaggatcattttggtttcattttcataacaggcaacatcgtactaactctcagaatcagcttttcctgggctctgtggtgaaagatgatgttgtcacctgtcactctgcacagagagagatgctttccagcccccgagaaagggccctccatgcctttggacacaagctcagcttccttcccctgtaactccaaaagcatttaaactcttttcctggccgggtacgagggccttttttttttttttttttttttttttgagatggagtcttgctctgtggcccaggctggagtgcagtggcgcgatctcggctcactgcaagctccgcctcccgggttcaagccactctcctgcctcagcctcctgagtagctgggactacaggcacctgcccccacgcccggctaatttttttgtgtttttagtagagatggggtt

SEQ ID NO: 387631 - DNA, 467 bp, Homo sapiens
aataatgatgtcttgggttcatcaagattcattgaagtatgttatctctttctctttcctccactttgggcgaagactatggtgttttgaagaagtagataccctaattcaggagtcctaatgatgacctatgcataaatacctgtgtggtgtttagaattgcctgggattcttgttttttgttttgttttgtttttgagatggactctcactcttgtcacccaggctggagtgtaatggcacgatcttggttcactgcaacctctgcctcccaggctcaagcgattctcctgcctcagcctccccagtagctgggattacaggtgcctgccactacacctggctaatttttgtatttttagtggagatgagatttcaccgtgttagccaggctggtctccactttctgacctcaggtaatccacctacttcggcctcccagagtgttgggattacaggtgtgagcc

SEQ ID NO: 387632 - DNA, 2053 bp, Homo sapiens
ccacctggcgttcagtacctcgtgcccgagagcggaaaagggaaatcgcgagcggaggaccgatgtgctggccacgtgggccccgccgggccgactccggaccctgctgccgcccattcctccggtgcaagggacctggaagtgatcccggtgccgctctgctcccaccagctagggagcagaggcgcgggagggaaggggcgtcccgggggtcgccagcacgctgcgggcagggctggcagccgcctccacgcccccgcgctggaagcctcgtctttgtaacatcgaggtatcctgtaactagatgggtcctggcctgcggaggtagtttcccctgtgaagccagggactcagccaggagcgtgaggggacccggatcctgagtctccaagccgcccactaccctctgctttaccggatggaactcatcagtaactaggtatctttaagggcggctccctggcgcgctctgagagttacggaagtcccaaaatgctttgaccgaaaacgtctaaacagtgaatacataaagcaaaaagccgcgtgggaaattcgagtccctaggagcgcccaggggacgcctctggaggtggactgccactcactccaggccacgctggaatgcccgcaccagggaggcactgcacttgaattggggacacttttttttttttttttcatttttacctttcattcccttttggacaatccagacaggatatgtctctccctagggtggggatttcgactccttagggtgggagtacagccgatgaagagttaaggagaggagtgggtagatctagatctagccttgggtgggtgggggcggggttggaggagctcagagcactggcccagcgctgcccccaacttgctgtgtgctcttggacaagttatctcccttctctgggcttcagataacccaaggatccttacatatctttatagctacaaagccctgtgaggttttgaaaaacttccttggtacccaaaaccaggtctgaggcacagtcagtgaatacctgtttaatgaatgcatgcataaatgaatgaatggatgatccagctcttcctggagcaggcacgacttccacagaaacagagcaaacgctagccgtaagcagaagtgagtcttcttcctatgtgaagggatgtgggggtggtacgcccctatcaactttatctttacatagtccttgagcgcccaccgggcaccgtgttccccggactagagggagggagaggggggttagctccacccttaacaagcttaattcttgatgagattaaccatcaaaacccatcagagaacgttatagctccagcgctgaatgagacatctttgattctgtggtgatgcggactttgtgcctctctgtgaggaatcactttgttccaatgacgcaattttcctcacactccggaagtgtcctgcactgccagaatcgcccagcttcccggcacacctatcaaccagtcgttcccagcactgcccagtatgcagcctccaggcagagggcctggatgtcttggcaggtagggttcccctagcagcctgggggtggtcagatagaaacattaactggaacgtagaggccagttcttggctcagggagccaggagggctctgactgttgcacatacaagccactcacactgctatcgcccacataccttcctctcccgccagcccaccccaaagcccaaactcctgcccgcatgctgggaaggtgagcccttgcctggagagcccagcaggggaaatagaaggagggaaggaggcctgctccttccccggagctctgctctgcggctgcaggaagacccgcagaggccctgggcagcagaactgtggacagcaaggctggagttgtgaaacccaaccactcagctggattccagaagctcaggtggtggtgactaaacctggccttacttaaaatgcatgactttattgtctttcaatgtattttcagtaaacttcatcctctccattactattttcttttcttcggaaacaagcaacagatctttgtaaaaaaaatacgta

SEQ ID NO: 387633 - DNA, 1511 bp, Homo sapiens
ccacctggcgttcagtacctcgtgcccgagagcggaaaagggaaatcgcgagcggaggaccgatgtgctggccacgtgggccccgccgggccgactccggaccctgctgccgcccattcctccggtgcaagggacctggaagtgatcccggtgccgctctgctcccaccagctagggagcagaggcgcgggagggaaggggcgtcccgggggtcgccagcacgctgcgggcagggctggcagccgcctccacgcccccgcgctggaagcctcgtctttgtaacatcgaggtatcctgtaactagatgggtcctggcctgcggaggtagtttcccctgtgaagccagggactcagccaggagcgtgaggggacccggatcctgagtctccaagccgcccactaccctctgctttaccggatggaactcatcagtaactaggtatctttaagggcggctccctggcgcgctctgagagttacggaagtcccaaaatgctttgaccgaaaacgtctaaacagtgaatacataaagcaaaaagccgcgtgggaaattcgagtccctaggagcgcccaggggacgcctctggaggtggactgccactcactccaggccacgctggaatgcccgcaccagggaggcactgcacttgaattggggacacttttttttttttttttcatttttacctttcattcccttttggacaatccagacaggatatgtctctccctagggtggggatttcgactccttagggtgggagtacagccgatgaagagttaaggagaggagtgggtagatctagatctagccttgggtgggtgggggcggggttggaggagctcagagcactggcccagcgctgcccccaacttgctgtgtgctcttggacaagttatctcccttctctgggcttcagataacccaaggatccttacatatctttatagctacaaagccctgtgaggttttgaaaaacttccttggtacccaaaaccaggtctgaggcacagtcagtgaatacctgtttaatgaatgcatgcataaatgaatgaatggatgatccagctcttcctggagcaggcacgacttccacagaaacagagcaaacgctagccgtaagcagaaagaacgttatagctccagcgctgaatgagacatctttgattctgtggtgatgcggactttgtgcctctctgtgaggaatcactttgttccaatgacgcaattttcctcacactccggaagtgtcctgcactgccagaatcgcccagcttcccggcacacctatcaaccagtcgttcccagcactgcccagtatgcagcctccaggcagagggcctggatgtcttggcagcccaccccaaagcccaaactcctgcccacatataatcccagtgcctcgagaggccaaggcaggaggattgcttgagggcaggagttcaagaccagcttgggtaacatagggagaccggtatctataaaaaaaattaaaaacaaaaaaattaaa

SEQ ID NO: 387634 - DNA, 536 bp, Homo sapiens
tgccccaggaaggcttgtggacagagggagaagcatctcttcctctatgtctctttttatctaagaaaccagtttgaccagcatccttcccctcggctccccaggaggaatgcacggatcccttcgccttcccccatccctccatggttgactaaacccactaggatccactcttttgcgtggaaatgggttcaggcctcccacgaagagcatgaagatgccctctgttatgggttacattatgtcccctgcccccgagaccgtatgttgagtcctaaccctagtattgcagaacgtgaatttattaggagatagggtctttatggaggtcattaagttaaatgagggtgttagggtgggctggtgtcctgatataaaggggaaatttggggctgggtgtagtggctcacacatataatcccagtgcctcgagaggccaaggcaggaggattgcttgagggcaggagttcaagaccagcttgggtaacatagggagaccggtatctataaaaaaaattaaaaacaaaaaaattaaa

SEQ ID NO: 387635 - DNA, 1899 bp, Homo sapiens
ccacctggcgttcagtacctcgtgcccgagagcggaaaagggaaatcgcgagcggaggaccgatgtgctggccacgtgggccccgccgggccgactccggaccctgctgccgcccattcctccggtgcaagggacctggaagtgatcccggtgccgctctgctcccaccagctagggagcagaggcgcgggagggaaggggcgtcccgggggtcgccagcacgctgcgggcagggctggcagccgcctccacgcccccgcgctggaagcctcgtctttgtaacatcgaggtatcctgtaactagatgggtcctggcctgcggaggtagtttcccctgtgaagccagggactcagccaggagcgtgaggggacccggatcctgagtctccaagccgcccactaccctctgctttaccggatggaactcatcagtaactaggtatctttaagggcggctccctggcgcgctctgagagttacggaagtcccaaaatgctttgaccgaaaacgtctaaacagtgaatacataaagcaaaaagccgcgtgggaaattcgagtccctaggagcgcccaggggacgcctctggaggtggactgccactcactccaggccacgctggaatgcccgcaccagggaggcactgcacttgaattggggacacttttttttttttttttcatttttacctttcattcccttttggacaatccagacaggatatgtctctccctagggtggggatttcgactccttagggtgggagtacagccgatgaagagttaaggagaggagtgggtagatctagatctagccttgggtgggtgggggcggggttggaggagctcagagcactggcccagcgctgcccccaacttgctgtgtgctcttggacaagttatctcccttctctgggcttcagataacccaaggatccttacatatctttatagctacaaagccctgtgaggttttgaaaaacttccttggtacccaaaaccaggtctgaggcacagtcagtgaatacctgtttaatgaatgcatgcataaatgaatgaatggatgatccagctcttcctggagcaggcacgacttccacagaaacagagcaaacgctagccgtaagcagaagtgagtcttcttcctatgtgaagggatgtgggggtggtacgcccctatcaactttatctttacatagtccttgagcgcccaccgggcaccgtgttccccggactagagggagggagaggggggttagctccacccttaacaagcttaattcttgatgagattaaccatcaaaacccatcagagaacgttatagctccagcgctgaatgagacatctttgattctgtggtgatgcggactttgtgcctctctgtgaggaatcactttgttccaatgacgcaattttcctcacactccggaagtgtcctgcactgccagaatcgcccagcttcccggcacacctatcaaccagtcgttcccagcactgcccagtatgcagcctccaggcagagggcctggatgtcttggcagcccaccccaaagcccaaactcctgcccgcatgctgggaaggtgagcccttgcctggagagcccagcaggggaaatagaaggagggaaggaggcctgctccttccccggagctctgctctgcggctgcaggaagacccgcagaggccctgggcagcagaactgtggacagcaaggctggagttgtgaaacccaaccactcagctggattccagaagctcaggtggtggtgactaaacctggccttacttaaaatgcatgactttattgtctttcaatgtattttcagtaaacttcatcctctccattactattttcttttcttcggaaacaagcaacagatctttgtaaaaaaaatacgta

SEQ ID NO: 387636 - DNA, 319 bp, Homo sapiens
ccttgtcaccctacttctccagcctaggaaagaaaattccacgagagaaagcaagcaagaggcttagagggcctgtgatcacagctgagactcactcttcctttccctactcccacacagacccccgaaagccaacactcgtggtaatttctgcattcgacttttgtggcctatgtggagcctgttaggtttaaaagctcccaataatagccttgtgagggatatactattcttccttgtttttatttccattttacagatgataaacatgaagcccagagtggtccactgatttcccgaggccacatctgtacacagc

SEQ ID NO: 387637 - DNA, 224 bp, Homo sapiens
atgatggattgagtgaagagtatgaggaatggtaatatattgtatgaggagtaaataatacctctgcagttttgatttaaacaaatacgggaatactgaagaaagattgggtttggagggaaaggtgaaaattctttggaggtctttttctcatattaaattcacgtacaagtggaggtgttaagtaggcagaagaaataaagcagagggaagaggtagaaagt

SEQ ID NO: 387638 - DNA, 484 bp, Homo sapiens
gagacagggtcttgctctgtcacccaggctggagtgcagtggcacaatcactgtaaccttgaattcctgggttcaagccatcctcccacctcagcctcccgagtagctgggacttcaggcatgcaacactatgcccagctaagtttataaaatttttctgaagagatgaggtctcattatattgccctggctggtctcaaattcctggcctcaagtgctccttctgcctagccaaagatggacttttaataagcggtttgtgatgccagatagccatgttgcaaaaattagatccattctccataccatacaacaaaataaattcatacatgtaaatgttcatgataaaatcacacaagtactaaaagaaaatacagatgactgtctctacaactgcactgtccaaaatggtagccattaaccatatgtggctactgagaccttgaaacatagatagtgtgaccgaggaactaaattttcagtt

SEQ ID NO: 387639 - DNA, 832 bp, Homo sapiens
  misc_feature (11)..(11): n is a, c, g, or t
taatccttctntgatattactggttcaggattttaattctaactacataaattaccagacttaaaaatcaagatgggggctggtcttgaactccagggctcaagcaatccacttgcctcagcatcccaaaatgctgggattacaggcgtgagccactgtgtccggcgtcactgtctttaaaaggcagtttagcatcgtgggtagagagccttgggataagattgtctgggatcatatccctgcaccaccacatacgtaactgtgccactgtaaggcaagcaatgtcctctaaggtaaaatgggaataataatacctaccttgtggggttgtggggagatatgagaaaatgccaaaaataaagtgcttagcacaaagtacttggataagtgcttcccagatactgggataagtgcttcctaggtacttgttcctgttataaatatgactattagaagcaaaggagcaggaaggtactaccagatggtcctgggcagccatggagttacagccacagagaagaggacaaaatgggctaagagtaagaaagaacaaagagactgcatagaaaagcttaaccttgacccccatatcaaacattaaaaaagaaaaaagctggcatgattaatccccaaacttgtgttagtacttgaatttggaaatacctgatcctgcgcggtcggtctgtcccacgaagttctcacggaaggggaaagtgagacctggttatcgctacctatattgtgaaactctgggtattttcttcttgaatccacctcacaaagaacctctagcaggtttaataccaatggaaaagtcatttgtggacataac

SEQ ID NO: 387640 - DNA, 388 bp, Homo sapiens
gagaggtcagagtgttggcagcacattacatatcatccatgaaaataaaactgctgtgaaaccacaaagggtgggaaagttttctccattagtatactaagtagtgttacctgacacaaagccagtaaacacagcttagaatacctgagtatttcattaatctaacatgggccaaatggagagtttcattgagatctgatatgatttatttagctgattcctactggtccctagcaatgacttcttaagttgtcacacagacgatgattcaaataagaaataaattttgaaaaattaattataaatgtcatgggccacataaatctaggtagcattgtgctctgaaagtttaccattgcttttactttcatgccttgtagtttcacag

SEQ ID NO: 387641 - DNA, 647 bp, Homo sapiens
gctcacgcttgtaaccccagcactttgggaggccgaggcaggcagatcagttgaggtctcaactgagttcaagaccagcctggccaaaatggtgaaacctcatctctacttaaaatataaaaattagccaagcattgtggcaggtgactgtaatctaacctactggggaggctgagggtggagaatttcttgaactcgggaggtggcggttgcagtgagccaagatcaagccactgcactccagcctggacgaaagagtgagactccgtctcaaaagataaaagtatagagaaaaatcaaacaggtcaaggggttgagttgactgttattttagacatagttattagggaaggcctatctaaagaactgctagtaatcccagtattttggaaggctaaggagggaaggattggttgagcccaggaatttgagaccagcctaggcaacacagtgagacctcatctctataaaaaatgtttcaaaaaaagttaaccaggtgcagtgtgcttgcttgtagttccagctactcaggaagctgatgtgggaggattgcttgggctttagaggttgaggctgcaatgatccatgatcacaccactgcactccagcctaggtgacagagcaaggccctgtctcaaaaaaaaaaa

SEQ ID NO: 387642 - DNA, 564 bp, Homo sapiens
cagtcaatatcatacttggccttggattctctcctgaaacatccagaggccttccctggtgctgactgatgaaggaattccatttcatgagacttaggccataaaaatatgcttactgcaaaatggccaactatctcctcttcttggatttgggctggctcaaaattattcagaacaacactatatacaaatatgcatatatacatatgcatacacaagcataatagtcaacacattttctttgtagaaaatttaaattaaagtgcacagtgtcagagtaacagaatgcaggtcagcaggatttagggcccacgtgaacgcacacaggggctggggctttgggctttggtaaacgctcaataaatgtcagctgaatgaagaataaactttttctggctttatctctcctttaattcttgaactctcatgacttccaagggggttttgcaggaaagagccagagaaacagagaagagagtgaggttcccttggatattgaagggaggggggctgtagcagctggccacccacttggcaggggtgaggcagaagcaccgatgaccc

SEQ ID NO: 387643 - DNA, 786 bp, Homo sapiens
acctatggatataggtggtacctacatgggaacacattgtctaataccacccagaatgggtagcaaagttcatagtgaagtttccactgtgagcggcaggtggcgggctcttctgagaaagaagcttctagatgcatattgtggggagcagatgaaactctgaggctttcagggacgtgaggtacggtgccaaggccacaccactgagacaggggtctcactatgttgcccaaactggccttgatcttctgggctcaagcaatcttcccacctcagcctccgagtcgctgggattgcagataaggaaattgaggctcagtgttggcaggtaacatgttcaagatcttgaaactagcaggtggcagagctggggttcatctgtctccatgtgctcagaattctgagaggaattgctgaaaaggatggggactctgagctacatatgcatagcattgatttcagtgagaaaactacatatttttgaccatatgaaaaaaaatctgttcttgaattttgatgatatttgcatagtttttaaattacctctggcagaaaaattatgtcaaagatgaacctaaacaaaagggaatgacatgttgtttggattactgagccagagaagccgctggaccattgagatttagtaggcaatatgtttgccagcctttttgaaaattggaatgttatttttgaactttatcgaagaacatgctgcatctctaaggcctgcaagattattctgtgcccatcccatttatggactgcaaacttacttgattcctgata

SEQ ID NO: 387644 - DNA, 145 bp, Homo sapiens
tgagccaccacgcccagccaaactagctttctgagatttgttttggtgtgaggttggtatcctgtttatgttgtttcaactagttagccattttttctggctgatgttaagtcatttaagaaatgctttttgggtgccttctctg

SEQ ID NO: 387645 - DNA, 821 bp, Homo sapiens
agcgtcacgtcaggcggccgcggagatggaggatttgctcgacttggacgaggagcttcgctacagcttggctacctccagggccaagatgggtcgccgagctcaacaggagtcagcgcaggccgagaatcacctcaatggcaagaattcctctttgactctgactggagagacttcctctgctaaattacctcgctgccgacagggaggctgggcaggtgattccgtgaaggcttcgaagtttaggaggaaggcttctgaagaaatagaagatttccgcctcagaccacagagcctgaatggatcagattatggaggagatattcctatcattccggatctggaggaagtacaggaagaagactttgttttgcaggtggcagcccctcccagcatccagataaagcgggtgatgacctaccgtgacctggacaatgacctcatgaagtactcagccattcagacactggatggggagatcgacctgaaactcctcaccaaagtgctcgcgccggagcacgaagtccgggaggatgatgtcggctgggactgggaccatctgttcactgaggtgtcctcagaggtcctcactgagtgggacccactgcagacggagaaggaggaccctgcggggcaggccaggcacacctgagcccgtcacccatgctctagacatgaagaaatgcaatgagcttaaagctaaagaagcttgtaagcagctccgaatttttacctggaatattttgtaataaaaatatttatattcagtcaaccacattggataattcaattgcaataaattgcttattctgtgccatctc

SEQ ID NO: 387646 - DNA, 836 bp, Homo sapiens
agcgtcacgtcaggcggccgcggagatggaggatttgctcgacttggacgaggagcttcgctacagcttggctacctccagggccaagatgggtcgccgagctcaacaggagtcagcgcaggccgagaatcacctcaatggcaagaattcctctttgactctgactggagagacttcctctgctaaattacctcgctgccgacagggaggctgggcaggtgattccgtgaaggcttcgaacggtacccaaacaggcaaacaacagctggatctgaacgcatgctatcacaaaacgcatcacagaaatttggggctggcttcattggaagaggcagatattcctatcattccggatctggaggaagtacaggaagaagactttgttttgcaggtggcagcccctcccagcatccagataaagcgggtgatgacctaccgtgacctggacaatgacctcatgaagtactcagccattcagacactggatggggagatcgacctgaaactcctcaccaaagtgctcgcgccggagcacgaagtccgggaggatgatgtcggctgggactgggaccatctgttcactgaggtgtcctcagaggtcctcactgagtgggacccactgcagacggagaaggaggaccctgcggggcaggccaggcacacctgagcccgtcacccatgctctagacatgaagaaatgcaatgagcttaaagctaaagaagcttgtaagcagctccgaatttttacctggaatattttgtaataaaaatatttatattcagtcaaccacattggataattcaattgcaataaattgcttattctgtgccatctc

SEQ ID NO: 387647 - DNA, 878 bp, Homo sapiens
agcgtcacgtcaggcggccgcggagatggaggatttgctcgacttggacgaggagcttcgctacagcttggctacctccagggccaagatgggtcgccgagctcaacaggagtcagcgcaggccgagaatcacctcaatggcaagaattcctctttgactctgactggagagacttcctctgctaaattacctcgctgccgacagggaggctgggcaggtgattccgtgaaggcttcgaagtttaggaggaaggcttctgaagaaatagaagatttccgcctcagaccacagagcctgaatggatcagattatggaggagatattcctatcattccggatctggaggaagtacaggaagaagactttgttttgcaggtggcagcccctcccagcatccagataaagcgggtgatgacctaccgtgacctggacaatgacctcatgaagtactcagccattcagacactggatggggagatcgacctgaaactcctcaccaaagtgctcgcgccggagcacgaagtccgggaggatgatgtcggctgggactgggaccatctgttcactgaggtgtcctcagaggtcctcactgagtgggacccactgcagacggagaaggaggaccctgcggggcaggccaggcacacctgagcccgtcacccatgctctagacatgaagaaatgcaatgagcttaaagctaaagaagcttgtaagcagctccgaatttttacctggaatattttgtaataaaaatatttatattcagtcaaccacattggataattcaattgcaataaattgcttattctgtgccatctcctcccaagagaaaaacagaaaaacgtcaggaagatagaagaaagaaggaaacacgga

SEQ ID NO: 387648 - DNA, 847 bp, Homo sapiens
ccatgggaatatccccggggatttcccgttatttcttgcccaagggccttatcccggttaaattgtagcgcggcgagggttttgaccaccaattttgaacttaagcgcaagggctttttttattacccccccccacagacttctttggttaattccttccctcccacaaggagcttggacaggtactcccctaaggctttgagtttaagagaagggttctgaaaaaatagaagatttccgcctccgccccagagccctgaatggatcagattatgaggaggtacacgataggcacacatagcctcaagatcacagataataggaaaacagtaaaattcaggaagtgatattcctatcattccggatctggaggaagtacaggaagaagactttgttttgcaggtggcagcccctcccagcatccagataaagcgggtgatgacctaccgtgacctggacaatgacctcatgaagtactcagccattcagacactggatggggagatcgacctgaaactcctcaccaaagtgctcgcgccggagcacgaagtccgggaggatgatgtcggctgggactgggaccatctgttcactgaggtgtcctcagaggtcctcactgagtgggacccactgcagacggagaaggaggaccctgcggggcaggccaggcacacctgagcccgtcacccatgctctagacatgaagaaatgcaatgagcttaaagctaaagaagcttgtaagcagctccgaatttttacctggaatattttgtaataaaaatatttatattcagtcaaccacattggataattcaattgcaataaattgcttattctgtgccatctc

SEQ ID NO: 387649 - DNA, 890 bp, Homo sapiens
agcgtcacgtcaggcggccgcggagatggaggatttgctcgacttggacgaggagcttcgctacagcttggctacctccagggccaagatgggtcgccgagctcaacaggagtcagcgcaggccgagaatcacctcaatggcaagaattcctctttgactctgactggagagacttcctctgctaaattacctcgctgccgacagggaggctgggcaggtgattccgtgaaggcttcgaagtttaggaggaaggcttctgaagaaatagaagagtacgtttccagtattcttattcttatggtatcctatgttgatcttggtcaacagtgcagtcttggtggtcatgatctgttccacctatgttgaacactgtgttagaagtctggggctagaattattgatgcctgctgaatccaaggtttggttaatcccgcttcctcaactgaaggtctggaccctggcattgatgcccatgtcctatctcccactgtgtggttttagaattatatgtccaggtatcagggtactggcccatgccttctgcattattgatatagatgggcagaagcaataccagcttctaagccttgccttctcataagacttatatcagaaaagaaagaagttttctagataaaggtgctgtgaaggtagggccacccagtttcctactcccaggggcggaagctgcattcatgtcatagcctctgtgatgctgtcctctggaatagtgcatcgcacagcctgtgcaaccacacacggcacacccagtggcctaattaggtttgactaagttgacagagaaaaacaggttcagggacattttcatctaggagaaagaatggatacaataaacatttgggatgttcctttccgtgtttgaaactca

SEQ ID NO: 387650 - DNA, 812 bp, Homo sapiens
ttcgtgtgaagggcacagaaaagcagttccaaagtctgaagcctgaactgcgaggcgaggacatccctttttgctcgttgcaagtcgcaagtgctgacagctaacaacaccaaataagacccagggtctcagtcctaagaaagcactctataaatcagtcagttaattgctgaaagaaaagagggcactgaatcatctgtatctatttgaattttaagccactcgctcaacctgcacttacactctcaacaatccaatttggagtgaggctgacataaagctgtaagaaggcactacagcatcttcagttctctcatgctggttgtggggcttgtctctaaagaggactgcagacaaataaagcacttgagatatactaatttgcctccacttttgaaaccttcctcaagatactacctggtgcatgagactagtgggctctcaaaaaccttgtcttttcttttttttttcaggtttaggaggaaggcttctgaagaaatagaagatttccgcctcagaccacagagcctgaatggatcagattatggaggaggtaagaggcccttggaggaagtcaaaaggtcttctagagaggccccagaacatttcctgggctacagctaaggcactgttggctgcagcatcactgaagacatttgcagtggtcttctgacgcatgctgatgcacatcttcatgccttgctgaatgctgccacctctacctggagtatctctcccttctttatctgataaccctgcttatccttcaaaaggtcagccaaagcatcacttcccctgaaacatcttccctt

SEQ ID NO: 387651 - DNA, 747 bp, Homo sapiens
agcgtcacgtcaggcggccgcggagatggaggatttgctcgacttggacgaggagcttcgctacagcttggctacctccgtgaggaccaattcgggggccttgggggccaggatttggcgggtggggaggagcgaccccgccggccccgacttctctgaggcgactcagggcggcaggcctcgcgccgcgccgggtgaggcccagaaggaggcagcctcaccgccccgcccccaggccactgtgggctccgccgctgctggcctggggtttgctttctttaaaatcctcagaaagtagaaaacaccctgtccccgccggcgtctaggaccgtgggaaatttccgagcctttctccgttttctagagccccgagtgcgaacttccccagaacagatcgatcacagggtgataggggagccccggccggggtcgcactcgctcccatcctagagtttttcctttgggacacctcgtcgcagaagttcctgcaaaagccgcactgttttatgcatggaagggaggcaggcagggacggcctttcttcccgagggccaagatgggtcgccgagctcaacaggagtcagcgcaggccgagaatcacctcaatggcaagaattcctctttgactctgactggagagacttcctctgctaaattacctcgctgccgacagggaggctgggcaggtgattccgtgaaggcttcgaacccagttctcctcctggacagccatttgcctgcttgatg

SEQ ID NO: 387652 - DNA, 481 bp, Homo sapiens
agggtcctccgcggaagggcagctgaatggactccagagcagccttaaccctgcagcctttgtgcccatcaccagctctacagagggccaagatgggtcgccgagctcaacaggagtcagcgcaggccgagaatcacctcaatggcaagaattcctctttgactctgactggagagacttcctctgctaaattacctcgctgccgacagggaggctgggcaggtgattccgtgaaggcttcgaagtgagtaccagcagctcataagagtatgggtgggggtgcacacggttggggggactttgctcctgtgttgttttattttttacaatagctttattgagaaaaaatttatataccatacaattcacccacttaaaatgcacaatttaatcattcttaatatattcacagagttgtgcaaccattaacacaatcaattttacaacattttcatcacctccccaccaaaagaaaccctgt

SEQ ID NO: 387653 - DNA, 279 bp, Homo sapiens
agcgtcacgtcaggcggccgcggagatggaggatttgctcgacttggacgaggagcttcgctacagcttggctacctccagggccaagatgggtcgccgagctcaacaggagtcagcgcaggccgagaatcacctcaatggcaagaattcctctttgactctgactggagagacttcctctgctaaattacctcgctgccgacagggaggctgggcaggtgattccgtgaaggcttcgaacccagttctcctcctggacagccatttgcctgcttgatg

SEQ ID NO: 387654 - DNA, 936 bp, Homo sapiens
agcgtcacgtcaggcggccgcggagatggaggatttgctcgacttggacgaggagcttcgctacagcttggctacctccgtgaggaccaattcgggggccttgggggccaggatttggcgggtggggaggagcgaccccgccggccccgacttctctgaggcgactcagggcggcaggcctcgcgccgcgccggagggccaagatgggtcgccgagctcaacaggagtcagcgcaggccgagaatcacctcaatggcaagaattcctctttgactctgactggagagacttcctctgctaaattacctcgctgccgacagggaggctgggcaggtgattccgtgaaggcttcgaagtttaggaggaaggcttctgaagaaatagaagatttccgcctcagaccacagagcctgaatggatcagattatggaggagatattcctatcattccggatctggaggaagtacaggaagaagactttgttttgcaggtggcagcccctcccagcatccagataaagcgggtgatgacctaccgtgacctggacaatgacctcatgaagtactcagccattcagacactggatggggagatcgacctgaaactcctcaccaaagtgctcgcgccggagcacgaagtccgggaggatgatgtcggctgggactgggaccatctgttcactgaggtgtcctcagaggtcctcactgagtgggacccactgcagacggagaaggaggaccctgcggggcaggccaggcacacctgagcccgtcacccatgctctagacatgaagaaatgcaatgagcttaaagctaaagaagcttgtaagcagctccgaatttttacctggaatattttgtaataaaaatatttatattcagtcaaccacattggataattcaattgcaataaattgcttattctgtgccatctc

SEQ ID NO: 387655 - DNA, 1289 bp, Homo sapiens
agcgtcacgtcaggcggccgcggagatggaggatttgctcgacttggacgaggagcttcgctacagcttggctacctccgtgaggaccaattcgggggccttgggggccaggatttggcgggtggggaggagcgaccccgccggccccgacttctctgaggcgactcagggcggcaggcctcgcgccgcgccgggtgaggcccagaaggaggcagcctcaccgccccgcccccaggccactgtgggctccgccgctgctggcctggggtttgctttctttaaaatcctcagaaagtagaaaacaccctgtccccgccggcgtctaggaccgtgggaaatttccgagcctttctccgttttctagagccccgagtgcgaacttccccagaacagatcgatcacagggtgataggggagccccggccggggtcgcactcgctcccatcctagagtttttcctttgggacacctcgtcgcagaagttcctgcaaaagccgcactgttttatgcatggaagggaggcaggcagggacggcctttcttcccgagggccaagatgggtcgccgagctcaacaggagtcagcgcaggccgagaatcacctcaatggcaagaattcctctttgactctgactggagagacttcctctgctaaattacctcgctgccgacagggaggctgggcaggtgattccgtgaaggcttcgaagtttaggaggaaggcttctgaagaaatagaagatttccgcctcagaccacagagcctgaatggatcagattatggaggagatattcctatcattccggatctggaggaagtacaggaagaagactttgttttgcaggtggcagcccctcccagcatccagataaagcgggtgatgacctaccgtgacctggacaatgacctcatgaagtactcagccattcagacactggatggggagatcgacctgaaactcctcaccaaagtgctcgcgccggagcacgaagtccgggaggatgatgtcggctgggactgggaccatctgttcactgaggtgtcctcagaggtcctcactgagtgggacccactgcagacggagaaggaggaccctgcggggcaggccaggcacacctgagcccgtcacccatgctctagacatgaagaaatgcaatgagcttaaagctaaagaagcttgtaagcagctccgaatttttacctggaatattttgtaataaaaatatttatattcagtcaaccacattggataattcaattgcaataaattgcttattctgtgccatctc

SEQ ID NO: 387656 - DNA, 1054 bp, Homo sapiens
ttcgtgtgaagggcacagaaaagcagttccaaagtctgaagcctgaactgcgaggcgaggacatccctttttgctcgttgcaagtcgcaagtgctgacagctaacaacaccaaataagacccagggtctcagtcctaagaaagcactctataaatcagtcagttaattgctgaaagaaaagagggcactgaatcatctgtatctatttgaattttaagccactcgctcaacctgcacttacactctcaacaatccaatttggagtgaggctgacataaagctgtaagaaggcactacagcatcttcagttctctcatgctggttgtggggcttgtctctaaagaggactgcagacaaataaagcacttgagatatactaatttgcctccacttttgaaaccttcctcaagatactacctggtgcatgagactagtgggctctcaaaaaccttgtcttttcttttttttttcaggtttaggaggaaggcttctgaagaaatagaagatttccgcctcagaccacagagcctgaatggatcagattatggaggagatattcctatcattccggatctggaggaagtacaggaagaagactttgttttgcaggtggcagcccctcccagcatccagataaagcgggtgatgacctaccgtgacctggacaatgacctcatgaagtactcagccattcagacactggatggggagatcgacctgaaactcctcaccaaagtgctcgcgccggagcacgaagtccgggaggatgatgtcggctgggactgggaccatctgttcactgaggtgtcctcagaggtcctcactgagtgggacccactgcagacggagaaggaggaccctgcggggcaggccaggcacacctgagcccgtcacccatgctctagacatgaagaaatgcaatgagcttaaagctaaagaagcttgtaagcagctccgaatttttacctggaatattttgtaataaaaatatttatattcagtcaaccacattggataattcaattgcaataaattgcttattctgtgccatctc

SEQ ID NO: 387657 - DNA, 1242 bp, Homo sapiens
agcgtcacgtcaggcggccgcggagatggaggatttgctcgacttggacgaggagcttcgctacagcttggctacctccagggccaagatgggtcgccgagctcaacaggagtcagcgcaggccgagaatcacctcaatggcaagaattcctctttgactctgactggagagacttcctctgctaaattacctcgctgccgacagggaggctgggcaggtgattccgtgaaggcttcgaagtttaggaggaaggcttctgaagaaatagaagatttccgcctcagaccacagagcctgaatggatcagattatggaggagatattcctatcattccggatctggaggaagtacaggaagaagactttgttttgcaggtggcagcccctcccagcatccagataaagcgggtgatgacctaccgtgacctggacaatgacctcatgaagtactcagccattcagacactggatggggagatcgacctgaaactcctcaccaaagtgctcgcgccggagcacgaagtccgggaggatgatgtcggctgggactgggaccatctgttcactgaggtgtcctcagaggtcctcactgagtgggacccactgcagacggagaaggaggaccctgcggggcaggccaggcacacctgagcccgtcacccatgctctagacatgaagaaatgcaatgagcttaaagctaaagaagcttgtaagcagctccgaatttttacctggaatattttgtaataaaaatatttatattcagtcaaccacattggataattcaattgcaataaattgcttattctgtgccatctcctttctcttcttggaaaatgtatcacaagtgaaggagaacagcttttaaaccagctgataggaactcagaactcgcggccttgttgcggagcatgtgggagagttcgattcaggcggagaaggagtgggcactcctactgaaagctgttcacttctcgggaggtttcaaacagttgcctgctggggttctggggcggggcctcccttcccgtgggtgctctgggccctttgtgaccttagtgacgcagcactgccacctgcatcataggcttccaggcagctgcagcggagggaggaggcggcgggagggataaggagactcattcttcactcgcatcagggtttggtggctgttgtgacaatattctcctttctcccctcttcctgcagtccatgccttgagctccaaaagcttctacag

SEQ ID NO: 387658 - DNA, 1238 bp, Homo sapiens
agcgtcacgtcaggcggccgcggagatggaggatttgctcgacttggacgaggagcttcgctacagcttggctacctccagggccaagatgggtcgccgagctcaacaggagtcagcgcaggccgagaatcacctcaatggcaagaattcctctttgactctgactggagagacttcctctgctaaattacctcgctgccgacagggaggctgggcaggtgattccgtgaaggcttcgaagtttaggaggaaggcttctgaagaaatagaagatttccgcctcagaccacagagcctgaatggatcagattatggaggagatattcctatcattccggatctggaggaagtacaggaagaagactttgttttgcaggtggcagcccctcccaggtaggttaaatcagatatgattggggaggcaaagaacacgtgaattaatacactccagatatcatctatagtggaccttgatgtcaatctggatctttctggtgttgggctccatccagggttcccattttgttattcccattctggtcatcccctgctgtatacaaggttctggggacggtggcccggcagcactcctggaacaggtcctgcctggggttcccgcctctcgctctctctttccttcagcatccagataaagcgggtgatgacctaccgtgacctggacaatgacctcatgaagtactcagccattcagacactggatggggagatcgacctgaaactcctcaccaaagtgctcgcgccggagcacgaagtccgggaggtacagtggtggcagcaattccccggtctctcagctctggcattcccataaccagccgactcccgggctggcctgtgcctccctgaggcctggatgggagggagaagtcagctacagttgagggaaaaggcctttctttgtcttacccagcgaaacccttcttggcaggatgatgtcggctgggactgggaccatctgttcactgaggtgtcctcagaggtcctcactgagtgggacccactgcagacggagaaggaggaccctgcggggcaggccaggcacacctgagcccgtcacccatgctctagacatgaagaaatgcaatgagcttaaagctaaagaagcttgtaagcagctccgaatttttacctggaatattttgtaataaaaatatttatattcagtcaaccacattggataattcaattgcaataaattgcttattctgtgccatctc

SEQ ID NO: 387659 - DNA, 1070 bp, Homo sapiens
agcgtcacgtcaggcggccgcggagatggaggatttgctcgacttggacgaggagcttcgctacagcttggctacctccagggccaagatgggtcgccgagctcaacaggagtcagcgcaggccgagaatcacctcaatggcaagaattcctctttgactctgactggagagacttcctctgctaaattacctcgctgccgacagggaggctgggcaggtgattccgtgaaggcttcgaagtttaggaggaaggcttctgaagaaatagaagatttccgcctcagaccacagagcctgaatggatcagattatggaggagatattcctatcattccggatctggaggaagtacaggaagaagactttgttttgcaggtggcagcccctcccaggtaggttaaatcagatatgattggggaggcaaagaacacgtgaattaatacactccagatatcatctatagtggaccttgatgtcaatctggatctttctggtgttgggctccatccagggttcccattttgttattcccattctggtcatcccctgctgtatacaaggttctggggacggtggcccggcagcactcctggaacaggtcctgcctggggttcccgcctctcgctctctctttccttcagcatccagataaagcgggtgatgacctaccgtgacctggacaatgacctcatgaagtactcagccattcagacactggatggggagatcgacctgaaactcctcaccaaagtgctcgcgccggagcacgaagtccgggaggatgatgtcggctgggactgggaccatctgttcactgaggtgtcctcagaggtcctcactgagtgggacccactgcagacggagaaggaggaccctgcggggcaggccaggcacacctgagcccgtcacccatgctctagacatgaagaaatgcaatgagcttaaagctaaagaagcttgtaagcagctccgaatttttacctggaatattttgtaataaaaatatttatattcagtcaaccacattggataattcaattgcaataaattgcttattctgtgccatctc

SEQ ID NO: 387660 - DNA, 1132 bp, Homo sapiens
agcgtcacgtcaggcggccgcggagatggaggatttgctcgacttggacgaggagcttcgctacagcttggctacctccagggccaagatgggtcgccgagctcaacaggagtcagcgcaggccgagaatcacctcaatggcaagaattcctctttgactctgactggagagacttcctctgctaaattacctcgctgccgacagggaggctgggcaggtgattccgtgaaggcttcgaagtttaggaggaaggcttctgaagaaatagaagatttccgcctcagaccacagagcctgaatggatcagattatggaggagatattcctatcattccggatctggaggaagtacaggaagaagactttgttttgcaggtggcagcccctcccagcatccagataaagcgggtgatgacctaccgtgacctggacaatgacctcatgaagtactcagccattcagacactggatggggagatcgacctgaaactcctcaccaaagtgctcgcgccggagcacgaagtccgggaggatgatgtcggctgggactgggaccatctgttcactgaggtgtcctcagaggtcctcactgagtgggacccactgcagacggagaaggaggaccctgcggggcaggccaggcacacctgagcccgtcacccatgctctagacatgaagaaatgcaatgagcttaaagctaaagaagcttctttctcttcttggaaaatgtatcacaagtgaaggagaacagcttttaaaccagctgataggaactcagaactcgcggccttgttgcggagcatgtgggagagttcgattcaggcggagaaggagtgggcactcctactgaaagctgttcacttctcgggaggtttcaaacagttgcctgctggggttctggggcggggcctcccttcccgtgggtgctctgggccctttgtgaccttagtgacgcagcactgccacctgcatcataggcttccaggcagctgcagcggagggaggaggcggcgggagggataaggagactcattcttcactcgcatcagggtttggtggctgttgtgacaatattctcctttctcccctcttcctgcagtccatgccttgagctccaaaagcttctacag

SEQ ID NO: 387661 - DNA, 419 bp, Homo sapiens
tatggtcctttgccccaaagcacgcccagcatgtgggaagcatagccttccctcatttctcagtgggcatgtggttcattcatgattttactctcttgtgaaggcattcctgcaggtctcagtttgggaagttctgacacacaaaaactgatcccggttttgtgagaaagagttgcctgaaagccctcaaggtgctcagcctgacctttttttgtttgcattcacaggatggggagatcgacctgaaactcctcaccaaagtgctcgcgccggagcacgaagtccgggaggtacagtggtggcagcaattccccggtctctcagctctggcattcccataaccagccgactcccgggctggcctgtgcctccctgaggcctggatgggagggagaagtcagctacagttgagggaaaag

SEQ ID NO: 387662 - DNA, 1052 bp, Homo sapiens
agcgtcacgtcaggcggccgcggagatggaggatttgctcgacttggacgaggagcttcgctacagcttggctacctccagggccaagatgggtcgccgagctcaacaggagtcagcgcaggccgagaatcacctcaatggcaagaattcctctttgactctgactggagagacttcctctgctaaattacctcgctgccgacagggaggctgggcaggtgattccgtgaaggcttcgaaatattcctatcattccggatctggaggaagtacaggaagaagactttgttttgcaggtggcagcccctcccagcatccagataaagcgggtgatgacctaccgtgacctggacaatgacctcatgaagtactcagccattcagacactggatggggagatcgacctgaaactcctcaccaaagtgctcgcgccggagcacgaagtccgggaggatgatgtcggctgggactgggaccatctgttcactgaggtgtcctcagaggtcctcactgagtgggacccactgcagacggagaaggaggaccctgcggggcaggccaggcacacctgagcccgtcacccatgctctagacatgaagaaatgcaatgagcttaaagctaaagaagcttctttctcttcttggaaaatgtatcacaagtgaaggagaacagcttttaaaccagctgataggaactcagaactcgcggccttgttgcggagcatgtgggagagttcgattcaggcggagaaggagtgggcactcctactgaaagctgttcacttctcgggaggtttcaaacagttgcctgctggggttctggggcggggcctcccttcccgtgggtgctctgggccctttgtgaccttagtgacgcagcactgccacctgcatcataggcttccaggcagctgcagcggagggaggaggcggcgggagggataaggagactcattcttcactcgcatcagggtttggtggctgttgtgacaatattctcctttctcccctcttcctgcagtccatgccttgagctccaaaagcttctacag

SEQ ID NO: 387663 - DNA, 1001 bp, Homo sapiens
agcgtcacgtcaggcggccgcggagatggaggatttgctcgacttggacgaggagcttcgctacagcttggctacctccagacggggtttcaccgtgttagccaggatggtctggatctcctgaccttgtgatctgcctgcctcgtcctcccaaagtgctgggattgcagctgtgagccactgcgcccggctggattgtcatctcagtagtggcccaaatgacatttgggtcagcagtgccttcagtttctccttacagagggccaagatgggtcgccgagctcaacaggagtcagcgcaggccgagaatcacctcaatggcaagaattcctctttgactctgactggagagacttcctctgctaaattacctcgctgccgacagggaggctgggcaggtgattccgtgaaggcttcgaagtttaggaggaaggcttctgaagaaatagaagatttccgcctcagaccacagagcctgaatggatcagattatggaggagatattcctatcattccggatctggaggaagtacaggaagaagactttgttttgcaggtggcagcccctcccagcatccagataaagcgggtgatgacctaccgtgacctggacaatgacctcatgaagtactcagccattcagacactggatggggagatcgacctgaaactcctcaccaaagtgctcgcgccggagcacgaagtccgggaggatgatgtcggctgggactgggaccatctgttcactgaggtgtcctcagaggtcctcactgagtgggacccactgcagacggagaaggaggaccctgcggggcaggccaggcacacctgagcccgtcacccatgctctagacatgaagaaatgcaatgagcttaaagctaaagaagcttgtaagcagctccgaatttttacctggaatattttgtaataaaaatatttatattcagtcaaccacattggataattcaattgcaataaattgcttattctgtgccatctc

SEQ ID NO: 387664 - DNA, 978 bp, Homo sapiens
agcgtcacgtcaggcggccgcggagatggaggatttgctcgacttggacgaggagcttcgctacagcttggctacctccagccccgagtgcgaacttccccagaacagatcgatcacagggtgataggggagccccggccggggtcgcactcgctcccatcctagagtttttcctttgggacacctcgtcgcagaagttcctgcaaaagccgcactgttttatgcatggaagggagagggccaagatgggtcgccgagctcaacaggagtcagcgcaggccgagaatcacctcaatggcaagaattcctctttgactctgactggagagacttcctctgctaaattacctcgctgccgacagggaggctgggcaggtgattccgtgaaggcttcgaagtttaggaggaaggcttctgaagaaatagaagatttccgcctcagaccacagagcctgaatggatcagattatggaggagatattcctatcattccggatctggaggaagtacaggaagaagactttgttttgcaggtggcagcccctcccagcatccagataaagcgggtgatgacctaccgtgacctggacaatgacctcatgaagtactcagccattcagacactggatggggagatcgacctgaaactcctcaccaaagtgctcgcgccggagcacgaagtccgggaggatgatgtcggctgggactgggaccatctgttcactgaggtgtcctcagaggtcctcactgagtgggacccactgcagacggagaaggaggaccctgcggggcaggccaggcacacctgagcccgtcacccatgctctagacatgaagaaatgcaatgagcttaaagctaaagaagcttgtaagcagctccgaatttttacctggaatattttgtaataaaaatatttatattcagtcaaccacattggataattcaattgcaataaattgcttattctgtgccatctc

SEQ ID NO: 387665 - DNA, 1073 bp, Homo sapiens
agcgtcacgtcaggcggccgcggagatggaggatttgctcgacttggacgaggagcttcgctacagcttggctacctccagccccgagtgcgaacttccccagaacagatcgatcacagggtgataggggagccccggccggggtcgcactcgctcccatcctagagtttttcctttgggacacctcgtcgcagaagttcctgcaaaagccgcactgttttatgcatggaagggagagggccaagatgggtcgccgagctcaacaggagtcagcgcaggccgagaatcacctcaatggcaagaattcctctttgactctgactggagagacttcctctgctaaattacctcgctgccgacagggaggctgggcaggtgattccgtgaaggcttcgaagtttaggaggaaggcttctgaagaaatagaagatttccgcctcagaccacagagcctgaatggatcagattatggaggagcggtacccaaacaggcaaacaacagctggatctgaacgcatgctatcacaaaacgcatcacagaaatttggggctggcttcattggaagaggcagatattcctatcattccggatctggaggaagtacaggaagaagactttgttttgcaggtggcagcccctcccagcatccagataaagcgggtgatgacctaccgtgacctggacaatgacctcatgaagtactcagccattcagacactggatggggagatcgacctgaaactcctcaccaaagtgctcgcgccggagcacgaagtccgggaggatgatgtcggctgggactgggaccatctgttcactgaggtgtcctcagaggtcctcactgagtgggacccactgcagacggagaaggaggaccctgcggggcaggccaggcacacctgagcccgtcacccatgctctagacatgaagaaatgcaatgagcttaaagctaaagaagcttgtaagcagctccgaatttttacctggaatattttgtaataaaaatatttatattcagtcaaccacattggataattcaattgcaataaattgcttattctgtgccatctc

SEQ ID NO: 387666 - DNA, 989 bp, Homo sapiens
agcgtcacgtcaggcggccgcggagatggaggatttgctcgacttggacgaggagcttcgctacagcttggctacctccagggccaagatgggtcgccgagctcaacaggagtcagcgcaggccgagaatcacctcaatggcaagaattcctctttgactctgactggagagacttcctctgctaaattacctcgctgccgacagggaggctgggcaggtgattccgtgaaggcttcgaagtttaggaggaaggcttctgaagaaatagaagatttccgcctcagaccacagagcctgaatggatcagattatggaggagatattcctatcattccggatctggaggaagtacaggaagaagactttgttttgcaggtggcagcccctcccagcatccagataaagcgggtgatgacctaccgtgacctggacaatgacctcatgaagtactcagccattcagacactggatggggagatcgacctgaaactcctcaccaaagtgctcgcgccggagcacgaagtccgggaggtacagtggtggcagcaattccccggtctctcagctctggcattcccataaccagccgactcccgggctggcctgtgcctccctgaggcctggatgggagggagaagtcagctacagttgagggaaaaggcctttctttgtcttacccagcgaaacccttcttggcaggatgatgtcggctgggactgggaccatctgttcactgaggtgtcctcagaggtcctcactgagtgggacccactgcagacggagaaggaggaccctgcggggcaggccaggcacacctgagcccgtcacccatgctctagacatgaagaaatgcaatgagcttaaagctaaagaagcttgtaagcagctccgaatttttacctggaatattttgtaataaaaatatttatattcagtcaaccacattggataattcaattgcaataaattgcttattctgtgccatctc

SEQ ID NO: 387667 - DNA, 1229 bp, Homo sapiens
agcgtcacgtcaggcggccgcggagatggaggatttgctcgacttggacgaggagcttcgctacagcttggctacctccagggccaagatgggtcgccgagctcaacaggagtcagcgcaggccgagaatcacctcaatggcaagaattcctctttgactctgactggagagacttcctctgctaaattacctcgctgccgacagggaggctgggcaggtgattccgtgaaggcttcgaaccgcaaagaacccggaatcagtatggcatgaccggagtcctgggcaacgtgggttcttaactgtcagtcagatattcctatcattccggatctggaggaagtacaggaagaagactttgttttgcaggtggcagcccctcccaggtaggttaaatcagatatgattggggaggcaaagaacacgtgaattaatacactccagatatcatctatagtggaccttgatgtcaatctggatctttctggtgttgggctccatccagggttcccattttgttattcccattctggtcatcccctgctgtatacaaggttctggggacggtggcccggcagcactcctggaacaggtcctgcctggggttcccgcctctcgctctctctttccttcagcatccagataaagcgggtgatgacctaccgtgacctggacaatgacctcatgaagtactcagccattcagacactggatggggagatcgacctgaaactcctcaccaaagtgctcgcgccggagcacgaagtccgggaggtacagtggtggcagcaattccccggtctctcagctctggcattcccataaccagccgactcccgggctggcctgtgcctccctgaggcctggatgggagggagaagtcagctacagttgagggaaaaggcctttctttgtcttacccagcgaaacccttcttggcaggatgatgtcggctgggactgggaccatctgttcactgaggtgtcctcagaggtcctcactgagtgggacccactgcagacggagaaggaggaccctgcggggcaggccaggcacacctgagcccgtcacccatgctctagacatgaagaaatgcaatgagcttaaagctaaagaagcttgtaagcagctccgaatttttacctggaatattttgtaataaaaatatttatattcagtcaaccacattggataattcaattgcaataaattgcttattctgtgccatctc

SEQ ID NO: 387668 - DNA, 839 bp, Homo sapiens
agcgtcacgtcaggcggccgcggagatggaggatttgctcgacttggacgaggagcttcgctacagcttggctacctccagggccaagatgggtcgccgagctcaacaggagtcagcgcaggccgagaatcacctcaatggcaagaattcctctttgactctgactggagagacttcctctgctaaattacctcgctgccgacagggaggctgggcaggtgattccgtgaaggcttcgaagtttaggaggaaggcttctgaagaaatagaagatttccgcctcagaccacagagcctgaatggatcagattatggaggagatattcctatcattccggatctggaggaagtacaggaagaagactttgttttgcaggtggcagcccctcccagcatccagataaagcgggtgatgacctaccgtgacctggacaatgacctcatgaagtactcagccattcagacactggatggggagatcgacctgaaactcctcaccaaagtgctcgcgccggagcacgaagtccgggagcgaaacccttcttggcaggatgatgtcggctgggactgggaccatctgttcactgaggtgtcctcagaggtcctcactgagtgggacccactgcagacggagaaggaggaccctgcggggcaggccaggcacacctgagcccgtcacccatgctctagacatgaagaaatgcaatgagcttaaagctaaagaagcttgtaagcagctccgaatttttacctggaatattttgtaataaaaatatttatattcagtcaaccacattggataattcaattgcaataaattgcttattctgtgccatctc

SEQ ID NO: 387669 - DNA, 478 bp, Homo sapiens
cagttctggaaatcgcctggatccaaacagctgcaacttttgggcagagcctcagatatttctctaggcctccctgccgtacggccagaagcctgtccaaacaagttatcatttgccttatgttaatgtgataagcagccctcgatatccaatggaaagatcaaaggttcttcattcaaaaagaagcaatatccttttgcctgatatggggtgggaagggtaggtggcgatgatatttcaaatgaattagaaaccacctcccatttgatgatagctggagaaatggactgacctagaagttacaggaccagaaactacagtcaccactaacctttctacgtggcacccagccccacttggagacattatttttccatcaaacacaaccgtactgcacagacatcttcactgtctgttgcaaagattggaatacgtagatttctgttcaaaattaaataatattttaaatacattacta

SEQ ID NO: 387670 - DNA, 343 bp, Homo sapiens
aaccagacaaggaaggcttcctggaggaggaaccatggagtggtgaaatgggaaccaaagaaggaagaaagtaagaaatttcaggcagagagagcttcgtctgccaaagcagttgcttcagtggaactgaacggctggaactagcctccacaagagcagagaacaagagagaaggagggtcatgggctcaccatcaccagcactgaggtcctgcggcagatgtaacatgaagctacccttcaggagctggtaggagaggccaagactcaagctgcctaaagaggtagccaggtttgggttgagtcttccttaaggcctaggactccttaagtcttcctacttc

SEQ ID NO: 387671 - DNA, 385 bp, Homo sapiens
gcacgaggaacctcctcacccaacaggtaacaaacctgaatttggcaactggcatcataaacagaagcagtgcttcagctcccccaaccctccgacccatcatcagtcctagtggcccgacatggtctacacagtcagacccccaagctcccgagaatcactccagctctcctggaagcagtttcatataactgaactcaaacaacctcgctgaacaatgctcatttgggaagtgggaaggaaatttcctttatgtagttgagagatgtggctaaagataaaatccacgtagcttccggcaataatgtaagcagcttccaaattaaaaaagaaaccactgtattgaattctggtcttgctgtgtgttttaattacccctgtatta

SEQ ID NO: 387672 - DNA, 1005 bp, Homo sapiens
gacttacactgacactgaccactctcacttctgctctttgtgcacaggagccattccttcctgagtgcctttgtcacagccacagcttcagtcagaggggtcagcatctgttggccttgacttgattttgcctatatgttgttaatgatgctttttaaaaactctgtaaagtcaggttatttccctcgctttatttctaggtaacaaacctgaatttggcaactggcatcataaacagaagcagtgcttcagctcccccaaccctccgacccatcatcagtcctagtggcccgacatggtctacacagtcagacccccaagctcccgagaatcactccagctctcctggaagcaggtatgtgaagggccctgcaactagcatttgggttactcagggatggcctgtgtcccaagcaagccattcccaccttgagttctgtatggagatagcactaaggcatatgccctttctccacctgcctcgatcctactctggcacctgactaagggagcctcattttattggtaagacagtttccaaggcatatcaaatgaaaaggaccatttctgagatagttaagaaaatcaccttagggtaaaagagcaagaatttacactatgtttaaaccttgcttatagtcatcatttttatgtgccaactttttgcactttgtccttgtctcttagttttttttttaataccttgtgttgtttatagttttttttatactacattgtgtttcagtaactgtagactctgttcttttgaaggacatatttgtttcttatttttttatctagtttcatataactgaactcaaacaacctcgctgaacaatgctcatttgggaagtgggaaggaaatttcctttatgtagttgagagatgtggctaaagataaaatccacgtagcttccggcaataatgtaagcagcttccaaattaaaaaagaaaccactgtattgaattctggtcttgctgtgtgttttaattacccctgtatta

SEQ ID NO: 387673 - DNA, 4318 bp, Homo sapiens
  misc_feature (4)..(4): n is a, c, g, or t
  misc_feature (6)..(7): n is a, c, g, or t
  misc_feature (9)..(11): n is a, c, g, or t
  misc_feature (13)..(14): n is a, c, g, or t
  misc_feature (281)..(281): n is a, c, g, or t
attngnntnnntnnagaacgttatcatttgtcttataagattgtacgaacggacagtcgcctagtacgcagcattctgacagcccatggatttcatgaagttcacccaagcagcactgactataacctaatgtggacaggatcccacctgaagcccttcttactgcgcaccctctctgaagcacaaaaagttaatcactttcccaggtcttatgaacttacccggaaggaccgactgtacaaaaacattattcgaatgcagcatacacatggattcaaggnttttcacatcctcccccagaccttcctcctgccagctgagtacgcggaattttgtaattcatattcgaaggaccggggaccttggatagtaaaaccagtggcatcttcaagggggcggggcgtctacctgatcaacaatccaaaccagatctccctggaagagaacattttggtctcccgttacattaacaaccccctgctcatagatgatttcaagtttgacgtgcgcctctatgtgctcgtgacttcctatgatcctcttgtcatctatctctatgaagaaggattggctaggtttgcaactgtgcgatatgatcaaggagccaagaacattcggaaccagttcatgcatctgacaaactacagtgtcaacaagaaaagtggagattacgtcagttgtgacgatccagaagtggaggattatggaaacaaatggagcatgagtgctatgcttaggtacctgaaacaagaaggcagagatacaaccgcattgatggcccatgtagaagacctgatcattaagactataatctctgctgaactagctattgctactgcctgtaaaacctttgttcctcatcgcagcagttgttttgaactctatggctttgacgtgctcatagattctactctgaagccatggttgttggaagtgaatctctctccttctttggcctgtgatgcgcctctggacctaaagattaaagccagtatgatttcagatatgttcactgttgtaggatttgtgtgccaagatcctgcccagcgggcatcaactcggccaatttatcccacctttgagtcttccaggcgaaaccctttccagaaacctcagcgttgccgtccactctctgccagtgatgcggaaatgaaaaacctcgtgggctcagcccgggagaaagggccagggaagttgggtggttctgtgcttggtctgtcaatggaggagatcaaagttttacgaagggtgaaggaggagaatgatcggcgaggtggatttattcgcatatttcctacatctgagacatgggaaatatatgggtcctacctcgagcataagacctcaatgaactatatgctggcaacacgcctcttccaggacagaatgactgctgatggagcgccagaattgaagatagagagtctgaattcaaaggccaagctgcatgctgcactttacgagaggaagctcctgtctctggaggtgcgaaaacgtagacgacggagtagcagattgagggcaatgaggccaaaatacccagtgattacccaaccagctgaaatgaatgttaaaactgagacagagagtgaagaggaggaagaagtcgcattagataatgaagatgaagaacaggaggcttcccaggaggagtctgcaggatttcttagagaaaatcaagccaaatatacaccctcattgacagctttggtagaaaatacacccaaagaaaattccatgaaagttcgtgaatggaataataaaggtggacactgctgcaaacttgagactcaggagctagagcctaaatttaacctgatgcagattcttcaagataatggcaatcttagcaaaatgcaggcccgaatagcattctctgcctatctccagcatgttcaaattcgcctgatgaaagacagtggcggtcagacgttcagtgccagttgggctgccaaagaggatgaacagatggagctggttgttcgtttcctcaagcgagcatcaaataacctccagcattcactgaggatggtattacccagtcgacgattggcacttctggaacgcagaagaatcctggcccaccagctgggtgactttatcattgtatacaacaaggaaacagaacaaatggctgaaaagaaatcaaagaagaaagttgaggaagaagaggaagatggggtgaatatggaaaactttcaggagttcatcagacaagcaagtgaggctgaactggaggaggtgttgactttttatacccaaaagaacaagtctgctagtgtcttcctggggactcactctaaaatttctaagaacaacaacaattattctgatagtggggcaaaaggtgatcaccctgagactataatggaagaagtgaaaataaagccacctaaacagcaacagacgacagaaattcattctgataaattatctcgatttaccacttcagcagaaaaagaggcaaaattagtttatagcaattcctcctctggtcctactgctactctgcagaaaattcccaacacccatttgtcatctgttacaacctctgacctctctccagggccttgccaccattcttctttatctcaaattccttcagctatccccagcatgcctcaccagccaacaattttactgaacacagtctctgccagtgcttctccctgcctacatcccggggcacagaacatcccaagccctactggcctgccacgctgtcgatcaggaagtcacaccattggtcccttttcttccttccaaagtgctgcacacatctatagccagaaactgtctcgtccctcttcagcaaaggcagcaggatcgtgctatctaaacaagcatcattcaggaatagccaaaacacaaaaagagggagaagatgcttctttatatagcaaacggtacaaccaaagtatggttacagctgaacttcagcggctagctgagaagcaggcagcgagacagtattctccatccagccacatcaacctcctcacccaacaggtaacaaacctgaatttggcaactggcatcataaacagaagcagtgcttcagctcccccaaccctccgacccatcatcagtcctagtggcccgacatggtctacacagtcagacccccaagctcccgagaatcactccagctctcctggaagcaggagcctgcagacagggggatttgcctgggaaggagaagtagaaaacaacgtgtacagccaggctacaggggtggtcccccagcacaagtatcaccccacagcaggcagctatcagcttcaatttgccctgcagcaacttgaacaacaaaaacttcagtcccggcagctcctggaccagagtcgagcccggcaccaggcaatctttggcagccagacactacctaactccaatttatggacaatgaataatggtgcaggttgtagaatttccagtgccacagctagtggccagaagccaaccactctgccacaaaaagtggtaccacctccaagttcttgcgcctccctggttcccaaacccccacccaaccacgaacaagtgctcagaagggcaacatcccagaaagcttccaaagggtcctccgcggaagggcagctgaatggactccagagcagccttaaccctgcagcctttgtgcccatcaccagctctacagatcctgctcacactaaaatatgaaccacaaacacacagagaaacaacctgttcaccactcctgggtgcatgattgagggtgaagcatccaccagcacttcaaggggtccatagtatttttttttttgctgcctcaaagtccccaaagccttcgagcagaagtggcagtagatggttgccaatcagccaatgcagactttcactgggacaacaagaaagcagatcttctgggttttgatggaacttggcagtggggacattcagctgatgcattatataccccgtcagagcacacttgtatcttttaccttccctttgccccatgcccccaaactgcttaggtcttctctgtccctttactgctgctgcacagagatgatataaaagaggctctttggctatttgcattttgcttcctcttcttttccagattacagtatgaagctttattttctttgtacaagcttaaaatttcaacatcatcatccgccaaagttgttcctcccttttcggaggatctagggggaaagaggagcattcatcacaagtttcctagagagaggagacaaatcggtgtgccattgacaacatgagccagggtaaaggcaccctttggaattactgatttcaaagattaataaagtaattctatttttat

SEQ ID NO: 387674 - DNA, 4063 bp, Homo sapiens
  misc_feature (4053)..(4053): n is a, c, g, or t
gcaaaccccaaggcttgtgctttaagtgtgagaaaccatgggctgagtgacacccactgtaactcaaagcaagcaagtttctcgtggcacttattacattacacagctgagcatttctgcccccacccagtgttgcagtgtaaaaatgcctgcctctttgctaaaagcctctacttgcttgagaaacttccttttgtgatttgtagactgggcttatgttactgaggagattaaaaacagatttcattataaaagtttatgatgttccagtccgttcaatatgtgtgcagttggaggaacacatcctttcttatccataattccttatttgatcttctcttgcccactgtcctaccctttatatatccacagacccccacctcatattcacacacctgcaaacctgtccatgatcatccccacataaaggggcctggtttggtttcagactttgatttctgatacacaagaaggcattaaagtgaatgtctcctggggatatttgttattaaaacagcttttagcaaatgaaccaatctagccagtgagatgaattctgatgtaagcttcatagttatataaatactgtaaaatctaatcactgagtctagattgctttctgtagctagcaacttctgtaaccagcaaagcaggaacgaaagcagaaccactgttgatgggctttctgaactttagtccagttgtaactaatagtttaattctggattcaaagcagcacctgccctaattggtgtggaaatctcaaggttagccagctaaagcagtttcttctttttcacctgtttctttcctttgtattcatttgttcactggatcagcccactcctgccttgaacctagatacctttcttggtggctccccctttcgttcacagctcactccgttcctttagctgagccagtagctgttgagtagttttgggtgttttatcttcagtaagcttttctcttccctcactaatgagaaaagagataataggttcctcaggctcctcctttcctaacgatgtcatcctgttttactgtcactcagcaccctgctttgtgaataatgttaacatttcactaatgtattgaagtatttatttatatttgatcagtgctcaccatgtttctccatacgtctagaagtctcttgggaaagatcatgcccttttaactgtctgataacatgcacactgaggcacttcaagaaggatcactgaagatcaaatgtcgcactcagaaaacttaatagataagctctgagctttttggtgtgttctccaagaagattaggagatggtatacaattgagcaactgaactgtgggagccaaactgtgggaggagatgagtaagggatgtgacatatcagaggtgagattatgggatagaaagccgaaagaatacagttcacggacttacccttaacgagagatttggaaatctctctaagagagttgggaaaccaaagcagaggcccgaaaagaccaggttgtgagggagggcacaggcaacagaggagcatggacttctgagcttggcaaacatttcactttgctccctccttcagtgctctgttgagtcatcaggacccaggctataaataaccctatgtggcttttaggtgaggactctggaaggtctgtgtagcctcacttcagggttcctacacctctgtcattgaaatgactttaatgacaaaggaaagaataacactgatttaaatcactatgaatacttttctcaatttaggcaccctttcatttttctaagcccccttaaccagggtttggagcaaggttgttcattatgaaagtcttatgtttcttctatgtacaattttcctgtcactgtacctaaaaaggaaaagaaatacagtgtaattaaagatggtcccaagaagaataaccaaaagtgttaaggagatggaaggactgacaagactgttctcaaaagaaatgagacctttagaaaatcatactaaatatatttagcataaaatttaccattttaaccattttaaagtgtacaattcagtggtatttagtacatttatactgttttgcaactattagccaccatctgtctccagaactttgtcattatgccaaactgaagctctgtactcactgaaaaatgacttcctattccctaattccatagcccttgataatcaccattctactttctgtctctaaaatttgcctattccaggtacctcacataagtggcatcatataatatttgttctttcgtgactgacttatttcacttagcataatgtcttcaaggttctgtacatgtgctgcagcatatgtcagaatttcctttctctttaagcctgagtaatattgtatgtagattcatctgttgatggacatttgggttgttttcaccttttgcctattttgtacaatgctgctatgaacattggtgtacggttattagttttgatttcaattcttttctgtatatatctacaagaaaaattgctggatcatttggttattttgtgtttcactttttgaggaacccctaaagtgttttccagagtaactgtaccattttactttcccaccagcattgcacaagggttccagtttttccacatcctcagcgacccttgttatcgtcaggtattttgttttaataatagccaaatgggaatgaagtagtataaatggggtcttttctactgggaaaagtgatctgagaggggaaatgtaggaggctatagttgtaaagacttctgctaggaagtacacagacatggtcaccagaatctagaatttggagctgggtgcagtggctcacgcctgcaatccaagcactttgggaggctgaggtgggcagatcgcttgagcccaggagtttgagaccagtcagggcaacatggttaaacccccgtctctacaaaaaaaatatataaaaattagccaggcatgatggcacacacctagaatcccagcttctcaggaggctgaggtgggaggatcacctgagcatggggaggttgaggctacggtgagctgtgattgcaccactgcactccattctgggctacagattgagaccctgtctctaaataaataaataatttgggcaaggaagatagtcaaagtatttaacaaatactataacatagcataggtactgactactcaaaaaggccaccggcccttcgccttcctcaggtgtacagattgtcagcctcagtggggaccctgtgaggtaaatttggaataatgaaaaaaagtgtcttcccacaccatttatgttacccagtcatagggacataagctcaaatataaacaacttctaaaaaatatttagatatttaactgatgggtggttgagagaaaacaaattctgtgtgatgaacccttttccttttgaagttgatgttagagaaaatgatcatgcatctgttcctgccttaagttagccccccatcctgcattggaagctctctggactcttcttgtaggtcttctggcaatcacaggggaatgaaattgctatttcagttgttttacatccagctaatatttattgtacattgactgtgtgccaggccttatgatacgtgctaggaaaagaagagagtgcaaaacagaccctgtccttgtcatcatggagctacggtttagtgggggagtcagataatatcacacaagtagatttgtaattccaaactgtgcttggttccatattggaaaaatacctgagatatttctctcctttcctctagattgttcatacagccactcactctaagaaacctgcttgcttttctcttcaggagcctgcagacagggggatttgcctgggaaggagaagtagaaaacaacgtgtacagccaggctacaggggtggtcccccagcacaagtatcaccccacagcaggcagctatcagcttcaatttgccctgcagcaacttgaacaacaaaaacttcagtcccggcagctcctggaccagagtcgagcccggcaccaggtaattcaagataagtcttttccatgtgttatatcttcctgctgttggtnaaaaaaaaaa

SEQ ID NO: 387675 - DNA, 469 bp, Homo sapiens
ggaccactcaggtagcttgaagaggatggatttggaggatgaggcagtgccactcctttttcctccatgctcgctggtgaagataatgaggaacagtgaactagctaaaggtaacaaacctgaatttggcaactggcatcataaacagaagcagtgcttcagctcccccaaccctccgacccatcatcagtcctagtggcccgacatggtctacacagtcagacccccaagctcccgagaatcactccagctctcctggaagcagtttcatataactgaactcaaacaacctcgctgaacaatgctcatttgggaagtgggaaggaaatttcctttatgtagttgagagatgtggctaaagataaaatccacgtagcttccggcaataatgtaagcagcttccaaattaaaaaagaaaccactgtattgaattctggtcttgctgtgtgttttaattacccctgtatta

SEQ ID NO: 387676 - DNA, 3486 bp, Homo sapiens
  misc_feature (137)..(137): n is a, c, g, or t
  misc_feature (181)..(181): n is a, c, g, or t
tcttgtgtattgtgttgtgttgtatttctagaactctatggctttgacgtgctcatagattctactctgaagccatggttgttggaagtgaatctctctccttctttggcctgtgatgcgccgtctgggacctaaangattaaaggccagttatgactttcaggattatggtgtcacatgnttgttgaggatttgtgtgccaagatcctgcccagcgggcatcaactcggccaatttatcccacctttgagtcttccaggcgaaaccctttccagaaacctcagcgttgccgtccactctctgccagtgatgcggaaatgaaaaacctcgtgggctcagcccgggagaaagggccagggaagttgggtggttctgtgcttggtctgtcaatggaggagatcaaagttttacgaagggtgaaggaggagaatgatcggcgaggtggatttattcgcatatttcctacatctgagacatgggaaatatatgggtcctacctcgagcataagacctcaatgaactatatgctggcaacacgcctcttccaggacagaatgactgctgatggagcgccagaattgaagatagagagtctgaattcaaaggccaagctgcatgctgcactttacgagaggaagctcctgtctctggaggtgcgaaaacgtagacgacggagtagcagattgagggcaatgaggccaaaatacccagtgattacccaaccagctgaaatgaatgttaaaactgagacagagagtgaagaggaggaagaagtcgcattagataatgaagatgaagaacaggaggcttcccaggaggagtctgcaggatttcttagagaaaatcaagccaaatatacaccctcattgacagctttggtagaaaatacacccaaagaaaattccatgaaagttcgtgaatggaataataaaggtggacactgctgcaaacttgagactcaggagctagagcctaaatttaacctgatgcagattcttcaagataatggcaatcttagcaaaatgcaggcccgaatagcattctctgcctatctccagcatgttcaaattcgcctgatgaaagacagtggcggtcagacgttcagtgccagttgggctgccaaagaggatgaacagatggagctggttgttcgtttcctcaagcgagcatcaaataacctccagcattcactgaggatggtattacccagtcgacgattggcacttctggaacgcagaagaatcctggcccaccagctgggtgactttatcattgtatacaacaaggaaacagaacaaatggctgaaaagaaatcaaagaagaaagttgaggaagaagaggaagatggggtgaatatggaaaactttcaggagttcatcagacaagcaagtgaggctgaactggaggaggtgttgactttttatacccaaaagaacaagtctgctagtgtcttcctggggactcactctaaaatttctaagaacaacaacaattattctgatagtggggcaaaaggtgatcaccctgagactataatggaagaagtgaaaataaagccacctaaacagcaacagacgacagaaattcattctgataaattatctcgatttaccacttcagcagaaaaagaggcaaaattagtttatagcaattcctcctctggtcctactgctactctgcagaaaattcccaacacccatttgtcatctgttacaacctctgacctctctccagggccttgccaccattcttctttatctcaaattccttcagctatccccagcatgcctcaccagccaacaattttactgaacacagtctctgccagtgcttctccctgcctacatcccggggcacagaacatcccaagccctactggcctgccacgctgtcgatcaggaagtcacaccattggtcccttttcttccttccaaagtgctgcacacatctatagccagaaactgtctcgtccctcttcagcaaaggcagcaggatcgtgctatctaaacaagcatcattcaggaatagccaaaacacaaaaagagggagaagatgcttctttatatagcaaacggtacaaccaaagtatggttacagctgaacttcagcggctagctgagaagcaggcagcgagacagtattctccatccagccacatcaacctcctcacccaacaggtaacaaacctgaatttggcaactggcatcataaacagaagcagtgcttcagctcccccaaccctccgacccatcatcagtcctagtggcccgacatggtctacacagtcagacccccaagctcccgagaatcactccagctctcctggaagcaggagcctgcagacagggggatttgcctgggaaggagaagtagaaaacaacgtgtacagccaggctacaggggtggtcccccagcacaagtatcaccccacagcaggcagctatcagcttcaatttgccctgcagcaacttgaacaacaaaaacttcagtcccggcagctcctggaccagagtcgagcccggcaccaggcaatctttggcagccagacactacctaactccaatttatggacaatgaataatggtgcaggttgtagaatttccagtgccacagctagtggccagaagccaaccactctgccacaaaaagtggtaccacctccaagttcttgcgcctccctggttcccaaacccccacccaaccacgaacaagtgctcagaagggcaacatcccagaaagcttccaaagggtcctccgcggaagggcagctgaatggactccagagcagccttaaccctgcagcctttgtgcccatcaccagctctacagatcctgctcacactaaaatatgaaccacaaacacacagagaaacaacctgttcaccactcctgggtgcatgattgagggtgaagcatccaccagcacttcaaggggtccatagtatttttttttttgctgcctcaaagtccccaaagccttcgagcagaagtggcagtagatggttgccaatcagccaatgcagactttcactgggacaacaagaaagcagatcttctgggttttgatggaacttggcagtggggacattcagctgatgcattatataccccgtcagagcacacttgtatcttttaccttccctttgccccatgcccccaaactgcttaggtcttctctgtccctttactgctgctgcacagagatgatataaaagaggctctttggctatttgcattttgcttcctcttcttttccagattacagtatgaagctttattttctttgtacaagcttaaaatttcaacatcatcatccgccaaagttgttcctcccttttcggaggatctagggggaaagaggagcattcatcacaagtttcctagagagaggagacaaatcggtgtgccattgacaacatgagccagggtaaaggcaccctttggaattactgatttcaaagattaataaagtaattctatttttat

SEQ ID NO: 387677 - DNA, 3106 bp, Homo sapiens
tgagtagatctgccggtctcccttatagatgaggtcgatatgaagtaacgtagatcgccaggagttagcctgcttcactgattcggaatctgaacatgggaaatatatgggtcctacctcgagcataagacctcaatgaactatatgctggcaacacgcctcttccaggacagaatgactgctgatggagcgccagaattgaagatagagagtctgaattcaaaggccaagctgcatgctgcactttacgagaggaagctcctgtctctggaggtgcgaaaacgtagacgacggagtagcagattgagggcaatgaggccaaaatacccagtgattacccaaccagctgaaatgaatgttaaaactgagacagagagtgaagaggaggaagaagtcgcattagataatgaagatgaagaacaggaggcttcccaggaggagtctgcaggatttcttagagaaaatcaagccaaatatacaccctcattgacagctttggtagaaaatacacccaaagaaaattccatgaaagttcgtgaatggaataataaaggtggacactgctgcaaacttgagactcaggagctagagcctaaatttaacctgatgcagattcttcaagataatggcaatcttagcaaaatgcaggcccgaatagcattctctgcctatctccagcatgttcaaattcgcctgatgaaagacagtggcggtcagacgttcagtgccagttgggctgccaaagaggatgaacagatggagctggttgttcgtttcctcaagcgagcatcaaataacctccagcattcactgaggatggtattacccagtcgacgattggcacttctggaacgcagaagaatcctggcccaccagctgggtgactttatcattgtatacaacaaggaaacagaacaaatggctgaaaagaaatcaaagaagaaagttgaggaagaagaggaagatggggtgaatatggaaaactttcaggagttcatcagacaagcaagtgaggctgaactggaggaggtgttgactttttatacccaaaagaacaagtctgctagtgtcttcctggggactcactctaaaatttctaagaacaacaacaattattctgatagtggggcaaaaggtgatcaccctgagactataatggaagaagtgaaaataaagccacctaaacagcaacagacgacagaaattcattctgataaattatctcgatttaccacttcagcagaaaaagaggcaaaattagtttatagcaattcctcctctggtcctactgctactctgcagaaaattcccaacacccatttgtcatctgttacaacctctgacctctctccagggccttgccaccattcttctttatctcaaattccttcagctatccccagcatgcctcaccagccaacaattttactgaacacagtctctgccagtgcttctccctgcctacatcccggggcacagaacatcccaagccctactggcctgccacgctgtcgatcaggaagtcacaccattggtcccttttcttccttccaaagtgctgcacacatctatagccagaaactgtctcgtccctcttcagcaaaggcagcaggatcgtgctatctaaacaagcatcattcaggaatagccaaaacacaaaaagagggagaagatgcttctttatatagcaaacggtacaaccaaagtatggttacagctgaacttcagcggctagctgagaagcaggcagcgagacagtattctccatccagccacatcaacctcctcacccaacaggtaacaaacctgaatttggcaactggcatcataaacagaagcagtgcttcagctcccccaaccctccgacccatcatcagtcctagtggcccgacatggtctacacagtcagacccccaagctcccgagaatcactccagctctcctggaagcaggagcctgcagacagggggatttgcctgggaaggagaagtagaaaacaacgtgtacagccaggctacaggggtggtcccccagcacaagtatcaccccacagcaggcagctatcagcttcaatttgccctgcagcaacttgaacaacaaaaacttcagtcccggcagctcctggaccagagtcgagcccggcaccaggcaatctttggcagccagacactacctaactccaatttatggacaatgaataatggtgcaggttgtagaatttccagtgccacagctagtggccagaagccaaccactctgccacaaaaagtggtaccacctccaagttcttgcgcctccctggttcccaaacccccacccaaccacgaacaagtgctcagaagggcaacatcccagaaagcttccaaagggtcctccgcggaagggcagctgaatggactccagagcagccttaaccctgcagcctttgtgcccatcaccagctctacagatcctgctcacactaaaatatgaaccacaaacacacagagaaacaacctgttcaccactcctgggtgcatgattgagggtgaagcatccaccagcacttcaaggggtccatagtatttttttttttgctgcctcaaagtccccaaagccttcgagcagaagtggcagtagatggttgccaatcagccaatgcagactttcactgggacaacaagaaagcagatcttctgggttttgatggaacttggcagtggggacattcagctgatgcattatataccccgtcagagcacacttgtatcttttaccttccctttgccccatgcccccaaactgcttaggtcttctctgtccctttactgctgctgcacagagatgatataaaagaggctctttggctatttgcattttgcttcctcttcttttccagattacagtatgaagctttattttctttgtacaagcttaaaatttcaacatcatcatccgccaaagttgttcctcccttttcggaggatctagggggaaagaggagcattcatcacaagtttcctagagagaggagacaaatcggtgtgccattgacaacatgagccagggtaaaggcaccctttggaattactgatttcaaagattaataaagtaattctatttttat

SEQ ID NO: 387678 - DNA, 4981 bp, Homo sapiens
  misc_feature (4)..(4): n is a, c, g, or t
  misc_feature (6)..(7): n is a, c, g, or t
  misc_feature (9)..(11): n is a, c, g, or t
  misc_feature (13)..(14): n is a, c, g, or t
  misc_feature (281)..(281): n is a, c, g, or t
  misc_feature (4378)..(4378): n is a, c, g, or t
  misc_feature (4381)..(4381): n is a, c, g, or t
attngnntnnntnnagaacgttatcatttgtcttataagattgtacgaacggacagtcgcctagtacgcagcattctgacagcccatggatttcatgaagttcacccaagcagcactgactataacctaatgtggacaggatcccacctgaagcccttcttactgcgcaccctctctgaagcacaaaaagttaatcactttcccaggtcttatgaacttacccggaaggaccgactgtacaaaaacattattcgaatgcagcatacacatggattcaaggnttttcacatcctcccccagaccttcctcctgccagctgagtacgcggaattttgtaattcatattcgaaggaccggggaccttggatagtaaaaccagtggcatcttcaagggggcggggcgtctacctgatcaacaatccaaaccagatctccctggaagagaacattttggtctcccgttacattaacaaccccctgctcatagatgatttcaagtttgacgtgcgcctctatgtgctcgtgacttcctatgatcctcttgtcatctatctctatgaagaaggattggctaggtttgcaactgtgcgatatgatcaaggagccaagaacattcggaaccagttcatgcatctgacaaactacagtgtcaacaagaaaagtggagattacgtcagttgtgacgatccagaagtggaggattatggaaacaaatggagcatgagtgctatgcttaggtacctgaaacaagaaggcagagatacaaccgcattgatggcccatgtagaagacctgatcattaagactataatctctgctgaactagctattgctactgcctgtaaaacctttgttcctcatcgcagcagttgttttgaactctatggctttgacgtgctcatagattctactctgaagccatggttgttggaagtgaatctctctccttctttggcctgtgatgcgcctctggacctaaagattaaagccagtatgatttcagatatgttcactgttgtaggatttgtgtgccaagatcctgcccagcgggcatcaactcggccaatttatcccacctttgagtcttccaggcgaaaccctttccagaaacctcagcgttgccgtccactctctgccagtgatgcggaaatgaaaaacctcgtgggctcagcccgggagaaagggccagggaagttgggtggttctgtgcttggtctgtcaatggaggagatcaaagttttacgaagggtgaaggaggagaatgatcggcgaggtggatttattcgcatatttcctacatctgagacatgggaaatatatgggtcctacctcgagcataagacctcaatgaactatatgctggcaacacgcctcttccaggacagaatgactgctgatggagcgccagaattgaagatagagagtctgaattcaaaggccaagctgcatgctgcactttacgagaggaagctcctgtctctggaggtgcgaaaacgtagacgacggagtagcagattgagggcaatgaggccaaaatacccagtgattacccaaccagctgaaatgaatgttaaaactgagacagagagtgaagaggaggaagaagtcgcattagataatgaagatgaagaacaggaggcttcccaggaggagtctgcaggatttcttagagaaaatcaagccaaatatacaccctcattgacagctttggtagaaaatacacccaaagaaaattccatgaaagttcgtgaatggaataataaaggtggacactgctgcaaacttgagactcaggagctagagcctaaatttaacctgatgcagattcttcaagataatggcaatcttagcaaaatgcaggcccgaatagcattctctgcctatctccagcatgttcaaattcgcctgatgaaagacagtggcggtcagacgttcagtgccagttgggctgccaaagaggatgaacagatggagctggttgttcgtttcctcaagcgagcatcaaataacctccagcattcactgaggatggtattacccagtcgacgattggcacttctggaacgcagaagaatcctggcccaccagctgggtgactttatcattgtatacaacaaggaaacagaacaaatggctgaaaagaaatcaaagaagaaagttgaggaagaagaggaagatggggtgaatatggaaaactttcaggagttcatcagacaagcaagtgaggctgaactggaggaggtgttgactttttatacccaaaagaacaagtctgctagtgtcttcctggggactcactctaaaatttctaagaacaacaacaattattctgatagtggggcaaaaggtgatcaccctgagactataatggaagaagtgaaaataaagccacctaaacagcaacagacgacagaaattcattctgataaattatctcgatttaccacttcagcagaaaaagaggcaaaattagtttatagcaattcctcctctggtcctactgctactctgcagaaaattcccaacacccatttgtcatctgttacaacctctgacctctctccagggccttgccaccattcttctttatctcaaattccttcagctatccccagcatgcctcaccagccaacaattttactgaacacagtctctgccagtgcttctccctgcctacatcccggggcacagaacatcccaagccctactggcctgccacgctgtcgatcaggaagtcacaccattggtcccttttcttccttccaaagtgctgcacacatctatagccagaaactgtctcgtccctcttcagcaaaggcagcaggatcgtgctatctaaacaagcatcattcaggaatagccaaaacacaaaaagagggagaagatgcttctttatatagcaaacggtacaaccaaagtatggttacagctgaacttcagcggctagctgagaagcaggcagcgagacagtattctccatccagccacatcaacctcctcacccaacaggtaacaaacctgaatttggcaactggcatcataaacagaagcagtgcttcagctcccccaaccctccgacccatcatcagtcctagtggcccgacatggtctacacagtcagacccccaagctcccgagaatcactccagctctcctggaagcaggagcctgcagacagggggatttgcctgggaaggagaagtagaaaacaacgtgtacagccaggctacaggggtggtcccccagcacaagtatcaccccacagcaggcagctatcagcttcaatttgccctgcagcaacttgaacaacaaaaacttcagtcccggcagctcctggaccagagtcgagcccggcaccaggcaatctttggcagccagacactacctaactccaatttatggacaatgaataatggtgcaggttgtagaatttccagtgccacagctagtggccagaagccaaccactctgccacaaaaagtggtaccacctccaagttcttgcgcctccctggttcccaaacccccacccaaccacgaacaagtgctcagaagggcaacatcccagaaagcttccaaagggtcctccgcggaagggcagctgaatggactccagagcagccttaaccctgcagcctttgtgcccatcaccagctctacagatcctgctcacactaaaatatgaaccacaaacacacagagaaacaacctgttcaccactcctgggtgcatgattgagggtgaagcatccaccagcacttcaaggggtccatagtatttttttttttgctgcctcaaagtccccaaagccttcgagcagaagtggcagtagatggttgccaatcagccaatgcagactttcactgggacaacaagaaagcagatcttctgggttttgatggaacttggcagtggggacattcagctgatgcattatataccccgtcagagcacacttgtatcttttaccttccctttgccccatgcccccaaactgcttaggtcttctctgtccctttactgctgctgcacagagatgatataaaagaggctctttggctatttgcattttgcttcctcttcttttccagattacagtatgaagctttattttctttgtacaagcttaaaatttcaacatcatcatccgccaaagttgttcctcccttttcggaggatctagggggaaagaggagcattcatcacaagtttcctagagagaggagacaaatcggtgtgccattgacaacatgagccagggtaaaggcaccctttggaattactgatttcaaagattaataaagtaattctatttttataaaaaaaaaaaaaaaaaaaaaaaaaaaaaaaaaaaaaaaaaaaaaaaaaaaaaaaaaaanaanaaaaaaaaaaaaaaaaaaaaaaaaaaaaaaaaaaaaagagagaggaggcgagcgcgccgccgacaacactcccccagcagggggcgcaccagcacacgccacccctctttgagaaaagggggcccctcctaggagtgcgtattatatatataaaaagcagcgaacagaggcgagcggcgcgtgcgtgatatataaataaacacacaactggatggctgcaggggaaaacaaatggggctgctttcgcgggaggaatatctgacgaggatactagcgaaaactcactctactatcttactggtggagggggagaagcagaacaaccgagagaggacggagcgagaaacacacccaccacgccgaaccgggaggaagagagaaaagaccaagccgccgccgcgggggagagacaaacacaaaaaagtagctcagtcgcgagcgaggtcagacagatgagagcgagcggaccgagccacaccaccacccagcgacagagacaagtcaaagcggcgcccggcagcgaaagaaagaaaaacaaacaggcgcgcacgcaaacgaaaagaagagagcaaatcgtctctagcccaaaaccaaccaatt

SEQ ID NO: 387679 - DNA, 4264 bp, Homo sapiens
  misc_feature (4)..(4): n is a, c, g, or t
  misc_feature (6)..(7): n is a, c, g, or t
  misc_feature (9)..(11): n is a, c, g, or t
  misc_feature (13)..(14): n is a, c, g, or t
  misc_feature (281)..(281): n is a, c, g, or t
attngnntnnntnnagaacgttatcatttgtcttataagattgtacgaacggacagtcgcctagtacgcagcattctgacagcccatggatttcatgaagttcacccaagcagcactgactataacctaatgtggacaggatcccacctgaagcccttcttactgcgcaccctctctgaagcacaaaaagttaatcactttcccaggtcttatgaacttacccggaaggaccgactgtacaaaaacattattcgaatgcagcatacacatggattcaaggnttttcacatcctcccccagaccttcctcctgccagctgagtacgcggaattttgtaattcatattcgaaggaccggggaccttggatagtaaaaccagtggcatcttcaagggggcggggcgtctacctgatcaacaatccaaaccagatctccctggaagagaacattttggtctcccgttacattaacaaccccctgctcatagatgatttcaagtttgacgtgcgcctctatgtgctcgtgacttcctatgatcctcttgtcatctatctctatgaagaaggattggctaggtttgcaactgtgcgatatgatcaaggagccaagaacattcggaaccagttcatgcatctgacaaactacagtgtcaacaagaaaagtggagattacgtcagttgtgacgatccagaagtggaggattatggaaacaaatggagcatgagtgctatgcttaggtacctgaaacaagaaggcagagatacaaccgcattgatggcccatgtagaagacctgatcattaagactataatctctgctgaactagctattgctactgcctgtaaaacctttgttcctcatcgcagcagttgttttgaactctatggctttgacgtgctcatagattctactctgaagccatggttgttggaagtgaatctctctccttctttggcctgtgatgcgcctctggacctaaagattaaagccagtatgatttcagatatgttcactgttgtaggatttgtgtgccaagatcctgcccagcgggcatcaactcggccaatttatcccacctttgagtcttccaggcgaaaccctttccagaaacctcagcgttgccgtccactctctgccagtgatgcggaaatgaaaaacctcgtgggctcagcccgggagaaagggccagggaagttgggtggttctgtgcttggtctgtcaatggaggagatcaaagttttacgaagggtgaaggaggagaatgatcggcgaggtggatttattcgcatatttcctacatctgagacatgggaaatatatgggtcctacctcgagcataagacctcaatgaactatatgctggcaacacgcctcttccaggacagaatgactgctgatggagcgccagaattgaagatagagagtctgaattcaaaggccaagctgcatgctgcactttacgagaggaagctcctgtctctggaggtgcgaaaacgtagacgacggagtagcagattgagggcaatgaggccaaaatacccagtgattacccaaccagctgaaatgaatgttaaaactgagacagagagtgaagaggaggaagaagtcgcattagataatgaagatgaagaacaggaggcttcccaggaggagtctgcaggatttcttagagaaaatcaagccaaatatacaccctcattgacagctttggtagaaaatacacccaaagaaaattccatgaaagttcgtgaatggaataataaaggtggacactgctgcaaacttgagactcaggagctagagcctaaatttaacctgatgcagattcttcaagataatggcaatcttagcaaaatgcaggcccgaatagcattctctgcctatctccagcatgttcaaattcgcctgatgaaagacagtggcggtcagacgttcagtgccagttgggctgccaaagaggatgaacagatggagctggttgttcgtttcctcaagcgagcatcaaataacctccagcattcactgaggatggtattacccagtcgacgattggcacttctggaacgcagaagaatcctggcccaccagctgggtgactttatcattgtatacaacaaggaaacagaacaaatggctgaaaagaaatcaaagaagaaagttgaggaagaagaggaagatggggtgaatatggaaaactttcaggagttcatcagacaagcaagtgaggctgaactggaggaggtgttgactttttatacccaaaagaacaagtctgctagtgtcttcctggggactcactctaaaatttctaagaacaacaacaattattctgatagtggggcaaaaggtgatcaccctgagactataatggaagaagtgaaaataaagccacctaaacagcaacagacgacagaaattcattctgataaattatctcgatttaccacttcagcagaaaaagaggcaaaattagtttatagcaattcctcctctggtcctactgctactctgcagaaaattcccaacacccatttgtcatctgttacaacctctgacctctctccagggccttgccaccattcttctttatctcaaattccttcagctatccccagcatgcctcaccagccaacaattttactgaacacagtctctgccagtgcttctccctgcctacatcccggggcacagaacatcccaagccctactggcctgccacgctgtcgatcaggaagtcacaccattggtcccttttcttccttccaaagtgctgcacacatctatagccagaaactgtctcgtccctcttcagcaaaggcagcaggatcgtgctatctaaacaagcatcattcaggaatagccaaaacacaaaaagagggagaagatgcttctttatatagcaaacggtacaaccaaagtatggttacagctgaacttcagcggctagctgagaagcaggcagcgagacagtattctccatccagccacatcaacctcctcacccaacaggtaacaaacctgaatttggcaactggcatcataaacagaagcagtgcttcagctcccccaaccctccgacccatcatcagtcctagtggcccgacatggtctacacagtcagacccccaagctcccgagaatcactccagctctcctggaagcaggagcctgcagacagggggatttgcctgggaaggagaagtagaaaacaacgtgtacagccaggctacaggggtggtcccccagcacaagtatcaccccacagcaggcagctatcagcttcaatttgccctgcagcaacttgaacaacaaaaacttcagtcccggcagctcctggaccagagtcgagcccggcaccaggcaatctttggcagccagacactacctaactccaatttatggacaatgaataatggtgcaggttgtagaatttccagtgccacagctagtggccagaagccaaccactctgccacaaaaagtggtaccacctccaagttcttgcgcctccctggttcccaaacccccacccaaccacgaacaagtgctcagaagggcaacatcccagaaagcttccaaagggtcctccgcggaagggcagctgaatggactccagagcagccttaaccctgcagcctttgtgcccatcaccagctctacagatcctgctcacactaaaatatgaaccacaaacacacagagaaacaacctgttcaccactcctgggtgcatgattgagggtgaagcatccaccagcacttcaaggggtccatagtatttttttttttgctgcctcaaagtccccaaagccttcgagcagaagtggcagtagatggttgccaatcagccaatgcagactttcactgggacaacaagaaagcagatcttctgggttttgatggaacttggcagtggggacattcagctgatgcattatataccccgtcagagcacacttgtatcttttaccttccctttgccccatgcccccaaactgcttaggtcttctctgtccctttactgctgctgcacagagatgatataaaagaggctctttggctatttgcattttgcttcctcttcttttccagattacagtatgaagctttattttctttgtacaagcttaaaatttcaacatcatcatccgccaaatttcctagagagaggagacaaatcggtgtgccattgacaacatgagccagggtaaaggcaccctttggaattactgatttcaaagattaataaagtaattctatttttat

SEQ ID NO: 387680 - DNA, 4409 bp, Homo sapiens
  misc_feature (4)..(4): n is a, c, g, or t
  misc_feature (6)..(7): n is a, c, g, or t
  misc_feature (9)..(11): n is a, c, g, or t
  misc_feature (13)..(14): n is a, c, g, or t
  misc_feature (281)..(281): n is a, c, g, or t
attngnntnnntnnagaacgttatcatttgtcttataagattgtacgaacggacagtcgcctagtacgcagcattctgacagcccatggatttcatgaagttcacccaagcagcactgactataacctaatgtggacaggatcccacctgaagcccttcttactgcgcaccctctctgaagcacaaaaagttaatcactttcccaggtcttatgaacttacccggaaggaccgactgtacaaaaacattattcgaatgcagcatacacatggattcaaggnttttcacatcctcccccagaccttcctcctgccagctgagtacgcggaattttgtaattcatattcgaaggaccggggaccttggatagtaaaaccagtggcatcttcaagggggcggggcgtctacctgatcaacaatccaaaccagatctccctggaagagaacattttggtctcccgttacattaacaaccccctgctcatagatgatttcaagtttgacgtgcgcctctatgtgctcgtgacttcctatgatcctcttgtcatctatctctatgaagaaggattggctaggtttgcaactgtgcgatatgatcaaggagccaagaacattcggaaccagttcatgcatctgacaaactacagtgtcaacaagaaaagtggagattacgtcagttgtgacgatccagaagtggaggattatggaaacaaatggagcatgagtgctatgcttaggtacctgaaacaagaaggcagagatacaaccgcattgatggcccatgtagaagacctgatcattaagactataatctctgctgaactagctattgctactgcctgtaaaacctttgttcctcatcgcagcagttgttttgaactctatggctttgacgtgctcatagattctactctgaagccatggttgttggaagtgaatctctctccttctttggcctgtgatgcgcctctggacctaaagattaaagccagtatgatttcagatatgttcactgttgtaggatttgtgtgccaagatcctgcccagcgggcatcaactcggccaatttatcccacctttgagtcttccaggcgaaaccctttccagaaacctcagcgttgccgtccactctctgccagtgatgcggaaatgaaaaacctcgtgggctcagcccgggagaaagggccagggaagttgggtggttctgtgcttggtctgtcaatggaggagatcaaagttttacgaagggtgaaggaggagaatgatcggcgaggtggatttattcgcatatttcctacatctgagacatgggaaatatatgggtcctacctcgagcataagacctcaatgaactatatgctggcaacacgcctcttccaggacagaatgactgctgatggagcgccagaattgaagatagagagtctgaattcaaaggccaagctgcatgctgcactttacgagaggaagctcctgtctctggaggtgcgaaaacgtagacgacggagtagcagattgagggcaatgaggccaaaatacccagtgattacccaaccagctgaaatgaatgttaaaactgagacagagagtgaagaggaggaagaagtcgcattagataatgaagatgaagaacaggaggcttcccaggaggagtctgcaggatttcttagagaaaatcaagccaaatatacaccctcattgacagctttggtagaaaatacacccaaagaaaattccatgaaagttcgtgaatggaataataaaggtggacactgctgcaaacttgagactcaggagctagagcctaaatttaacctgatgcagattcttcaagataatggcaatcttagcaaaatgcaggcccgaatagcattctctgcctatctccagcatgttcaaattcgcctgatgaaagacagtggcggtcagacgttcagtgccagttgggctgccaaagaggatgaacagatggagctggttgttcgtttcctcaagcgagcatcaaataacctccagcattcactgaggatggtattacccagtcgacgattggcacttctggaacgcagaagaatcctggcccaccagctgggtgactttatcattgtatacaacaaggaaacagaacaaatggctgaaaagaaatcaaagaagaaagttgaggaagaagaggaagatggggtgaatatggaaaactttcaggagttcatcagacaagcaagtgaggctgaactggaggaggtgttgactttttatacccaaaagaacaagtctgctagtgtcttcctggggactcactctaaaatttctaagaacaacaacaattattctgatagtggggcaaaaggtgatcaccctgagactataatggaagaagtgaaaataaagccacctaaacagcaacagacgacagaaattcattctgataaattatctcgatttaccacttcagcagaaaaagaggcaaaattagtttatagcaattcctcctctggtcctactgctactctgcagaaaattcccaacacccatttgtcatctgttacaacctctgacctctctccagggccttgccaccattcttctttatctcaaattccttcagctatccccagcatgcctcaccagccaacaattttactgaacacagtctctgccagtgcttctccctgcctacatcccggggcacagaacatcccaagccctactggcctgccacgctgtcgatcaggaagtcacaccattggtcccttttcttccttccaaagtgctgcacacatctatagccagaaactgtctcgtccctcttcagcaaaggcagcaggatcgtgctatctaaacaagcatcattcaggaatagccaaaacacaaaaagagggagaagatgcttctttatatagcaaacggtacaaccaaagtatggttacagctgaacttcagcggctagctgagaagcaggcagcgagacagtattctccatccagccacatcaacctcctcacccaacaggtaacaaacctgaatttggcaactggcatcataaacagaagcagtgcttcagctcccccaaccctccgacccatcatcagtcctagtggcccgacatggtctacacagtcagacccccaagctcccgagaatcactccagctctcctggaagcaggagcctgcagacagggggatttgcctgggaaggagaagtagaaaacaacgtgtacagccaggctacaggggtggtcccccagcacaagtatcaccccacagcaggcagctatcagcttcaatttgccctgcagcaacttgaacaacaaaaacttcagtcccggcagctcctggaccagagtcgagcccggcaccaggcaatctttggcagccagacactacctaactccaatttatggacaatgaataatggtgcaggttgtagaatttccagtgccacagctagtggccagaagccaaccactctgccacaaaaagtggtaccacctccaagttcttgcgcctccctggttcccaaacccccacccaaccacgaacaagtgctcagaagggcaacatcccagaaagcttccaaagggtcctccgcggaagggcagctgaatggactccagagcagccttaaccctgcagcctttgtgcccatcaccagctctacagaatgttgccagaagatactaccagggctgcccagatcagttggaaaggccttagggacaaatctttaagaggtaaacgtctttgcatttagatcctgctcacactaaaatatgaaccacaaacacacagagaaacaacctgttcaccactcctgggtgcatgattgagggtgaagcatccaccagcacttcaaggggtccatagtatttttttttttgctgcctcaaagtccccaaagccttcgagcagaagtggcagtagatggttgccaatcagccaatgcagactttcactgggacaacaagaaagcagatcttctgggttttgatggaacttggcagtggggacattcagctgatgcattatataccccgtcagagcacacttgtatcttttaccttccctttgccccatgcccccaaactgcttaggtcttctctgtccctttactgctgctgcacagagatgatataaaagaggctctttggctatttgcattttgcttcctcttcttttccagattacagtatgaagctttattttctttgtacaagcttaaaatttcaacatcatcatccgccaaagttgttcctcccttttcggaggatctagggggaaagaggagcattcatcacaagtttcctagagagaggagacaaatcggtgtgccattgacaacatgagccagggtaaaggcaccctttggaattactgatttcaaagattaataaagtaattctatttttat

SEQ ID NO: 387681 - DNA, 4389 bp, Homo sapiens
  misc_feature (4)..(4): n is a, c, g, or t
  misc_feature (6)..(7): n is a, c, g, or t
  misc_feature (9)..(11): n is a, c, g, or t
  misc_feature (13)..(14): n is a, c, g, or t
  misc_feature (281)..(281): n is a, c, g, or t
attngnntnnntnnagaacgttatcatttgtcttataagattgtacgaacggacagtcgcctagtacgcagcattctgacagcccatggatttcatgaagttcacccaagcagcactgactataacctaatgtggacaggatcccacctgaagcccttcttactgcgcaccctctctgaagcacaaaaagttaatcactttcccaggtcttatgaacttacccggaaggaccgactgtacaaaaacattattcgaatgcagcatacacatggattcaaggnttttcacatcctcccccagaccttcctcctgccagctgagtacgcggaattttgtaattcatattcgaaggaccggggaccttggatagtaaaaccagtggcatcttcaagggggcggggcgtctacctgatcaacaatccaaaccagatctccctggaagagaacattttggtctcccgttacattaacaaccccctgctcatagatgatttcaagtttgacgtgcgcctctatgtgctcgtgacttcctatgatcctcttgtcatctatctctatgaagaaggattggctaggtttgcaactgtgcgatatgatcaaggagccaagaacattcggaaccagttcatgcatctgacaaactacagtgtcaacaagaaaagtggagattacgtcagttgtgacgatccagaagtggaggattatggaaacaaatggagcatgagtgctatgcttaggtacctgaaacaagaaggcagagatacaaccgcattgatggcccatgtagaagacctgatcattaagactataatctctgctgaactagctattgctactgcctgtaaaacctttgttcctcatcgcagcagttgttttgaactctatggctttgacgtgctcatagattctactctgaagccatggttgttggaagtgaatctctctccttctttggcctgtgatgcgcctctggacctaaagattaaagccagtatgatttcagatatgttcactgttgtaggatttgtgtgccaagatcctgcccagcgggcatcaactcggccaatttatcccacctttgagtcttccaggcgaaaccctttccagaaacctcagcgttgccgtccactctctgccagtgatgcggaaatgaaaaacctcgtgggctcagcccgggagaaagggccagggaagttgggtggttctgtgcttggtctgtcaatggaggagatcaaagttttacgaagggtgaaggaggagaatgatcggcgaggtggatttattcgcatatttcctacatctgagacatgggaaatatatgggtcctacctcgagcataagacctcaatgaactatatgctggcaacacgcctcttccaggacagaatgactgctgatggagcgccagaattgaagatagagagtctgaattcaaaggccaagctgcatgctgcactttacgagaggaagctcctgtctctggaggtgcgaaaacgtagacgacggagtagcagattgagggcaatgaggccaaaatacccagtgattacccaaccagctgaaatgaatgttaaaactgagacagagagtgaagaggaggaagaagtcgcattagataatgaagatgaagaacaggaggcttcccaggaggagtctgcaggatttcttagagaaaatcaagccaaatatacaccctcattgacagctttggtagaaaatacacccaaagaaaattccatgaaagttcgtgaatggaataataaaggtggacactgctgcaaacttgagactcaggagctagagcctaaatttaacctgatgcagattcttcaagataatggcaatcttagcaaaatgcaggcccgaatagcattctctgcctatctccagcatgttcaaattcgcctgatgaaagacagtggcggtcagacgttcagtgccagttgggctgccaaagaggatgaacagatggagctggttgttcgtttcctcaagcgagcatcaaataacctccagcattcactgaggatggtattacccagtcgacgattggcacttctggaacgcagaagaatcctggcccaccagctgggtgactttatcattgtatacaacaaggaaacagaacaaatggctgaaaagaaatcaaagaagaaagttgaggaagaagaggaagatggggtgaatatggaaaactttcaggagttcatcagacaagcaagtgaggctgaactggaggaggtgttgactttttatacccaaaagaacaagtctgctagtgtcttcctggggactcactctaaaatttctaagaacaacaacaattattctgatagtggggcaaaaggtgatcaccctgagactataatggaagaagtgaaaataaagccacctaaacagcaacagacgacagaaattcattctgataaattatctcgatttaccacttcagcagaaaaagaggcaaaattagtttatagcaattcctcctctggtcctactgctactctgcagaaaattcccaacacccatttgtcatctgttacaacctctgacctctctccagggccttgccaccattcttctttatctcaaattccttcagctatccccagcatgcctcaccagccaacaattttactgaacacagtctctgccagtgcttctccctgcctacatcccggggcacagaacatcccaagccctactggcctgccacgctgtcgatcaggaagtcacaccattggtcccttttcttccttccaaagtgctgcacacatctatagccagaaactgtctcgtccctcttcagcaaaggcagcaggatcgtgctatctaaacaagcatcattcaggaatagccaaaacacaaaaagagggagaagatgcttctttatatagcaaacggtacaaccaaagtatggttacagctgaacttcagcggctagctgagaagcaggcagcgagacagtattctccatccagccacatcaacctcctcacccaacaggtaacaaacctgaatttggcaactggcatcataaacagaagcagtgcttcagctcccccaaccctccgacccatcatcagtcctagtggcccgacatggtctacacagtcagacccccaagctcccgagaatcactccagctctcctggaagcaggagcctgcagacagggggatttgcctgggaaggagaagtagaaaacaacgtgtacagccaggctacaggggtggtcccccagcacaagtatcaccccacagcaggcagctatcagcttcaatttgccctgcagcaacttgaacaacaaaaacttcagtcccggcagctcctggaccagagtcgagcccggcaccaggcaatctttggcagccagacactacctaactccaatttatggacaatgaataatggtgcaggttgtagaatttccagtgccacagctagtggccagaagccaaccactctgccacaaaaagtggtaccacctccaagttcttgcgcctccctggttcccaaacccccacccaaccacgaacaagtgctcagaagggcaacatcccagaaagcttccaaagggtcctccgcggaagggcagctgaatggactccagagcagccttaaccctgcagcctttgtgcccatcaccagctctacagaatgttgccagaagatactaccagggctgcccagatcagttggaaaggccttagggacaaatctttaagagatcctgctcacactaaaatatgaaccacaaacacacagagaaacaacctgttcaccactcctgggtgcatgattgagggtgaagcatccaccagcacttcaaggggtccatagtatttttttttttgctgcctcaaagtccccaaagccttcgagcagaagtggcagtagatggttgccaatcagccaatgcagactttcactgggacaacaagaaagcagatcttctgggttttgatggaacttggcagtggggacattcagctgatgcattatataccccgtcagagcacacttgtatcttttaccttccctttgccccatgcccccaaactgcttaggtcttctctgtccctttactgctgctgcacagagatgatataaaagaggctctttggctatttgcattttgcttcctcttcttttccagattacagtatgaagctttattttctttgtacaagcttaaaatttcaacatcatcatccgccaaagttgttcctcccttttcggaggatctagggggaaagaggagcattcatcacaagtttcctagagagaggagacaaatcggtgtgccattgacaacatgagccagggtaaaggcaccctttggaattactgatttcaaagattaataaagtaattctatttttat

SEQ ID NO: 387682 - DNA, 3814 bp, Homo sapiens
  misc_feature (4)..(4): n is a, c, g, or t
  misc_feature (6)..(7): n is a, c, g, or t
  misc_feature (9)..(11): n is a, c, g, or t
  misc_feature (13)..(14): n is a, c, g, or t
  misc_feature (281)..(281): n is a, c, g, or t
attngnntnnntnnagaacgttatcatttgtcttataagattgtacgaacggacagtcgcctagtacgcagcattctgacagcccatggatttcatgaagttcacccaagcagcactgactataacctaatgtggacaggatcccacctgaagcccttcttactgcgcaccctctctgaagcacaaaaagttaatcactttcccaggtcttatgaacttacccggaaggaccgactgtacaaaaacattattcgaatgcagcatacacatggattcaaggnttttcacatcctcccccagaccttcctcctgccagctgagtacgcggaattttgtaattcatattcgaaggaccggggaccttggatagtaaaaccagtggcatcttcaagggggcggggcgtctacctgatcaacaatccaaaccagatctccctggaagagaacattttggtctcccgttacattaacaaccccctgctcatagatgatttcaagtttgacgtgcgcctctatgtgctcgtgacttcctatgatcctcttgtcatctatctctatgaagaaggattggctaggtttgcaactgtgcgatatgatcaaggagccaagaacattcggaaccagttcatgcatctgacaaactacagtgtcaacaagaaaagtggagattacgtcagttgtgacgatccagaagtggaggattatggaaacaaatggagcatgagtgctatgcttaggtacctgaaacaagaaggcagagatacaaccgcattgatggcccatgtagaagacctgatcattaagactataatctctgctgaactagctattgctactgcctgtaaaacctttgttcctcatcgcagcagttgttttgaactctatggctttgacgtgctcatagattctactctgaagccatggttgttggaagtgaatctctctccttctttggcctgtgatgcgcctctggacctaaagattaaagccagtatgatttcagatatgttcactgttgtaggatttgtgtgccaagatcctgcccagcgggcatcaactcggccaatttatcccacctttgagtcttccaggcgaaaccctttccagaaacctcagcgttgccgtccactctctgccagtgatgcggaaatgaaaaacctcgtgggctcagcccgggagaaagggccagggaagttgggtggttctgtgcttggtctgtcaatggaggagatcaaagttttacgaagggtgaaggaggagaatgatcggcgaggtggatttattcgcatatttcctacatctgagacatgggaaatatatgggtcctacctcgagcataagacctcaatgaactatatgctggcaacacgcctcttccaggacagaatgactgctgatggagcgccagaattgaagatagagagtctgaattcaaaggccaagctgcatgctgcactttacgagaggaagctcctgtctctggaggtgcgaaaacgtagacgacggagtagcagattgagggcaatgaggccaaaatacccagtgattacccaaccagctgaaatgaatgttaaaactgagacagagagtgaagaggaggaagaagtcgcattagataatgaagatgaagaacaggaggcttcccaggaggagtctgcaggatttcttagagaaaatcaagccaaatatacaccctcattgacagctttggtagaaaatacacccaaagaaaattccatgaaagttcgtgaatggaataataaaggtggacactgctgcaaacttgagactcaggagctagagcctaaatttaacctgatgcagattcttcaagataatggcaatcttagcaaaatgcaggcccgaatagcattctctgcctatctccagcatgttcaaattcgcctgatgaaagacagtggcggtcagacgttcagtgccagttgggctgccaaagaggatgaacagatggagctggttgttcgtttcctcaagcgagcatcaaataacctccagcattcactgaggatggtattacccagtcgacgattggcacttctggaacgcagaagaatcctggcccaccagctgggtgactttatcattgtatacaacaaggaaacagaacaaatggctgaaaagaaatcaaagaagaaagttgaggaagaagaggaagatggggtgaatatggaaaactttcaggagttcatcagacaagcaagtgaggctgaactggaggaggtgttgactttttatacccaaaagaacaagtctgctagtgtcttcctggggactcactctaaaatttctaagaacaacaacaattattctgatagtggggcaaaaggtgatcaccctgagactataatggaagaagtgaaaataaagccacctaaacagcaacagacgacagaaattcattctgataaattatctcgatttaccacttcagcagaaaaagaggcaaaattagtttatagcaattcctcctctggtcctactgctactctgcagaaaattcccaacacccatttgtcatctgttacaacctctgacctctctccagggccttgccaccattcttctttatctcaaattccttcagctatccccagcatgcctcaccagccaacaattttactgaacacagtctctgccagtgcttctccctgcctacatcccggggcacagaacatcccaagccctactggcctgccacgctgtcgatcaggaagtcacaccattggtcccttttcttccttccaaagtgctgcacacatctatagccagaaactgtctcgtccctcttcagcaaaggcagcaggatcgtgctatctaaacaagcatcattcaggaatagccaaaacacaaaaagagggagaagatgcttctttatatagcaaacggtacaaccaaagtatggttacagctgaacttcagcggctagctgagaagcaggcagcgagacagtattctccatccagccacatcaacctcctcacccaacaggtaacaaacctgaatttggcaactggcatcataaacagaagcagtgcttcagctcccccaaccctccgacccatcatcagtcctagtggcccgacatggtctacacagtcagacccccaagctcccgagaatcactccagctctcctggaagcaggtatgtgaagggccctgcaactagcatttgggttactcagggatggcctgtgtcccaagcaagccattcccaccttgagttctgtatggagatagcactaaggcatatgccctttctccacctgcctcgatcctactctggcacctgactaagggagcctcattttattggtaagacagtttccaaggcatatcaaatgaaaaggaccatttctgagatagttaagaaaatcaccttagggtaaaagagcaagaatttacactatgtttaaaccttgcttatagtcatcatttttatgtgccaactttttgcactttgtccttgtctcttagttttttttttaataccttgtgttgtttatagttttttttatactacattgtgtttcagtaactgtagactctgttcttttgaaggacatatttgtttcttatttttttatctagtttcatataactgaactcaaacaacctcgctgaacaatgctcatttgggaagtgggaaggaaatttcctttatgtagttgagagatgtggctaaagataaaatccacgtagcttccggcaataatgtaagcagcttccaaattaaaaaagaaaccactgtattgaattctggtcttgctgtgtgttttaattacccctgtatta

SEQ ID NO: 387683 - DNA, 3992 bp, Homo sapiens
  misc_feature (4)..(4): n is a, c, g, or t
  misc_feature (6)..(7): n is a, c, g, or t
  misc_feature (9)..(11): n is a, c, g, or t
  misc_feature (13)..(14): n is a, c, g, or t
  misc_feature (281)..(281): n is a, c, g, or t
attngnntnnntnnagaacgttatcatttgtcttataagattgtacgaacggacagtcgcctagtacgcagcattctgacagcccatggatttcatgaagttcacccaagcagcactgactataacctaatgtggacaggatcccacctgaagcccttcttactgcgcaccctctctgaagcacaaaaagttaatcactttcccaggtcttatgaacttacccggaaggaccgactgtacaaaaacattattcgaatgcagcatacacatggattcaaggnttttcacatcctcccccagaccttcctcctgccagctgagtacgcggaattttgtaattcatattcgaaggaccggggaccttggatagtaaaaccagtggcatcttcaagggggcggggcgtctacctgatcaacaatccaaaccagatctccctggaagagaacattttggtctcccgttacattaacaaccccctgctcatagatgatttcaagtttgacgtgcgcctctatgtgctcgtgacttcctatgatcctcttgtcatctatctctatgaagaaggattggctaggtttgcaactgtgcgatatgatcaaggagccaagaacattcggaaccagttcatgcatctgacaaactacagtgtcaacaagaaaagtggagattacgtcagttgtgacgatccagaagtggaggattatggaaacaaatggagcatgagtgctatgcttaggtacctgaaacaagaaggcagagatacaaccgcattgatggcccatgtagaagacctgatcattaagactataatctctgctgaactagctattgctactgcctgtaaaacctttgttcctcatcgcagcagttgttttgaactctatggctttgacgtgctcatagattctactctgaagccatggttgttggaagtgaatctctctccttctttggcctgtgatgcgcctctggacctaaagattaaagccagtatgatttcagatatgttcactgttgtaggatttgtgtgccaagatcctgcccagcgggcatcaactcggccaatttatcccacctttgagtcttccaggcgaaaccctttccagaaacctcagcgttgccgtccactctctgccagtgatgcggaaatgaaaaacctcgtgggctcagcccgggagaaagggccagggaagttgggtggttctgtgcttggtctgtcaatggaggagatcaaagttttacgaagggtgaaggaggagaatgatcggcgaggtggatttattcgcatatttcctacatctgagacatgggaaatatatgggtcctacctcgagcataagacctcaatgaactatatgctggcaacacgcctcttccaggacagaatgactgctgatggagcgccagaattgaagatagagagtctgaattcaaaggccaagctgcatgctgcactttacgagaggaagctcctgtctctggaggtgcgaaaacgtagacgacggagtagcagattgagggcaatgaggccaaaatacccagtgattacccaaccagctgaaatgaatgttaaaactgagacagagagtgaagaggaggaagaagtcgcattagataatgaagatgaagaacaggaggcttcccaggaggagtctgcaggatttcttagagaaaatcaagccaaatatacaccctcattgacagctttggtagaaaatacacccaaagaaaattccatgaaagttcgtgaatggaataataaaggtggacactgctgcaaacttgagactcaggagctagagcctaaatttaacctgatgcagattcttcaagataatggcaatcttagcaaaatgcaggcccgaatagcattctctgcctatctccagcatgttcaaattcgcctgatgaaagacagtggcggtcagacgttcagtgccagttgggctgccaaagaggatgaacagatggagctggttgttcgtttcctcaagcgagcatcaaataacctccagcattcactgaggatggtattacccagtcgacgattggcacttctggaacgcagaagaatcctggcccaccagctgggtgactttatcattgtatacaacaaggaaacagaacaaatggctgaaaagaaatcaaagaagaaagttgaggaagaagaggaagatggggtgaatatggaaaactttcaggagttcatcagacaagcaagtgaggctgaactggaggaggtgttgactttttatacccaaaagaacaagtctgctagtgtcttcctggggactcactctaaaatttctaagaacaacaacaattattctgatagtggggcaaaaggtgatcaccctgagactataatggaagaagtgaaaataaagccacctaaacagcaacagacgacagaaattcattctgataaattatctcgatttaccacttcagcagaaaaagaggcaaaattagtttatagcaattcctcctctggtcctactgctactctgcagaaaattcccaacacccatttgtcatctgttacaacctctgacctctctccagggccttgccaccattcttctttatctcaaattccttcagctatccccagcatgcctcaccagccaacaattttactgaacacagtctctgccagtgcttctccctgcctacatcccggggcacagaacatcccaagccctactggcctgccacgctgtcgatcaggaagtcacaccattggtcccttttcttccttccaaagtgctgcacacatctatagccagaaactgtctcgtccctcttcagcaaaggcagcaggatcgtgctatctaaacaagcatcattcaggaatagccaaaacacaaaaagagggagaagatgcttctttatatagcaaacggtacaaccaaagtatggttacagctgaacttcagcggctagctgagaagcaggcagcgagacagtattctccatccagccacatcaacctcctcacccaacaggtaacaaacctgaatttggcaactggcatcataaacagaagcagtgcttcagctcccccaaccctccgacccatcatcagtcctagtggcccgacatggtctacacagtcagacccccaagctcccgagaatcactccagctctcctggaagcaggagcctgcagacagggggatttgcctgggaaggagaagtagaaaacaacgtgtacagccaggctacaggggtggtcccccagcacaagtatcaccccacagcaggcagctatcagcttcaatttgccctgcagcaacttgaacaacaaaaacttcagtcccggcagctcctggaccagagtcgagcccggcaccaggcaatctttggcagccagacactacctaactccaatttatggacaatgaataatggtgcaggttgtagaatttccagtgccacagctagtggccagaagccaaccactctgccacaaaaagtggtaccacctccaagttcttgcgcctccctggttcccaaacccccacccaaccacgaacaagtgctcagaagggcaacatcccagaaagcttccaaagggtcctccgcggaagggcagctgaatggactccagagcagccttaaccctgcagcctttgtgcccatcaccagctctacagatgattgagggtgaagcatccaccagcacttcaaggggtccatagtatttttttttttgctgcctcaaagtccccaaagccttcgagcagaagtggcagtagatggttgccaatcagccaatgcagactttcactgggacaacaagaaagcagatcttctgggttttgatggaacttggcagtggggacattcagctgatgcattatataccccgtcagagcacacttgtatcttttaccttccctttgccccatgcccccaaactgcttaggtcttctctgtccctttactgctgctgcacagagatgatataaaagaggctctttggct

SEQ ID NO: 387684 - DNA, 1164 bp, Homo sapiens
gcgagtagaaaggaaatcttcccccatagatggacacttgagctcttgttggttttagcatctgaactgaaccagatgcctgcattactcatgagaaattaaaaaggatttctgggaggccatgagggcttggtggtgctgctgtagtcagcggctcccatgtcccatgtggctgcattgcagagttccttgggctgtctttgctctgaacaaaccccttgcagctgtgcccggcgcctttgtgacaacccaggcaaggtttcatgaaatggatctgatgttcttgtgcctgtgttattcattccaacatactggagctatgcccaggaaggtgaggggcagcaggttggcccacacaccccagctgtccgtttctactaatgtcactcaggatataaataaattgattcattcacttcctttcttatcaaaccagaatgttgccagaagatactaccagggctgcccagatcagttggaaaggccttagggacaaatctttaagagatcctgctcacactaaaatatgaaccacaaacacacagagaaacaacctgttcaccactcctgggtgcatgattgagggtgaagcatccaccagcacttcaaggggtccatagtatttttttttttgctgcctcaaagtccccaaagccttcgagcagaagtggcagtagatggttgccaatcagccaatgcagactttcactgggacaacaagaaagcagatcttctgggttttgatggaacttggcagtggggacattcagctgatgcattatataccccgtcagagcacacttgtatcttttaccttccctttgccccatgcccccaaactgcttaggtcttctctgtccctttactgctgctgcacagagatgatataaaagaggctctttggctatttgcattttgcttcctcttcttttccagattacagtatgaagctttattttctttgtacaagcttaaaatttcaacatcatcatccgccaaagttgttcctcccttttcggaggatctagggggaaagaggagcattcatcacaagtttcctagagagaggagacaaatcggtgtgccattgacaacatgagccagggtaaaggcaccctttggaattactgatttcaaagattaataaagtaattctatttttat

SEQ ID NO: 387685 - DNA, 413 bp, Homo sapiens
caaccagcgtgatctcttagaaccctcagtctgaattcctggcataaatctgactgcccttattattattattatttttccagataagccctagcttgttggctgtccgtggatggctgccctgggtttaggtaccgttcgccagttcagttaactgtagctgggattgggaatagctgggaatcatttaattggttgcctactccttagggctgtgggtgtcttcatctttggaaaagtgtgatgagacgtgccatgtttcccagcattgattagcagttgtgttatatttttgggaataaaattatgtatagaacagcggacttgcaattgattataagagagtccaagctcattatttcttatttcagatcaccctgagactataatggaagaagtgaaaataaagccac

SEQ ID NO: 387686 - DNA, 345 bp, Homo sapiens
caagaaagcagatcttctgggttgatggaacttggcagtggggacattcagctgatgcattatataccccgtcagagcacacttgttgtcccagtgaaagtctgcattggctgattggcaaccatctactgccaatgcagactttcactgggacaacaagaaagcagatcttctgggttttgatggaacttggcagtggggacattcagctgatgcattatataccccgtcagagcacacttgtatcttttaccttccctttgccccatgcccccaaactgcttaggtcttctctgtccctttactgctgctgcacagagatgatataaaagaggctctttggct

SEQ ID NO: 387687 - DNA, 4374 bp, Homo sapiens
  misc_feature (4)..(4): n is a, c, g, or t
  misc_feature (6)..(7): n is a, c, g, or t
  misc_feature (9)..(11): n is a, c, g, or t
  misc_feature (13)..(14): n is a, c, g, or t
  misc_feature (281)..(281): n is a, c, g, or t
attngnntnnntnnagaacgttatcatttgtcttataagattgtacgaacggacagtcgcctagtacgcagcattctgacagcccatggatttcatgaagttcacccaagcagcactgactataacctaatgtggacaggatcccacctgaagcccttcttactgcgcaccctctctgaagcacaaaaagttaatcactttcccaggtcttatgaacttacccggaaggaccgactgtacaaaaacattattcgaatgcagcatacacatggattcaaggnttttcacatcctcccccagaccttcctcctgccagctgagtacgcggaattttgtaattcatattcgaaggaccggggaccttggatagtaaaaccagtggcatcttcaagggggcggggcgtctacctgatcaacaatccaaaccagatctccctggaagagaacattttggtctcccgttacattaacaaccccctgctcatagatgatttcaagtttgacgtgcgcctctatgtgctcgtgacttcctatgatcctcttgtcatctatctctatgaagaaggattggctaggtttgcaactgtgcgatatgatcaaggagccaagaacattcggaaccagttcatgcatctgacaaactacagtgtcaacaagaaaagtggagattacgtcagttgtgacgatccagaagtggaggattatggaaacaaatggagcatgagtgctatgcttaggtacctgaaacaagaaggcagagatacaaccgcattgatggcccatgtagaagacctgatcattaagactataatctctgctgaactagctattgctactgcctgtaaaacctttgttcctcatcgcagcagttgttttgaactctatggctttgacgtgctcatagattctactctgaagccatggttgttggaagtgaatctctctccttctttggcctgtgatgcgcctctggacctaaagattaaagccagtatgatttcagatatgttcactgttgtaggatttgtgtgccaagatcctgcccagcgggcatcaactcggccaatttatcccacctttgagtcttccaggcgaaaccctttccagaaacctcagcgttgccgtccactctctgccagtgatgcggaaatgaaaaacctcgtgggctcagcccgggagaaagggccagggaagttgggtggttctgtgcttggtctgtcaatggaggagatcaaagttttacgaagggtgaaggaggagaatgatcggcgaggtggatttattcgcatatttcctacatctgagacatgggaaatatatgggtcctacctcgagcataagacctcaatgaactatatgctggcaacacgcctcttccaggacaggggaaacccaagaagaagcttattgacaggaagaacacgaatgactgctgatggagcgccagaattgaagatagagagtctgaattcaaaggccaagctgcatgctgcactttacgagaggaagctcctgtctctggaggtgcgaaaacgtagacgacggagtagcagattgagggcaatgaggccaaaatacccagtgattacccaaccagctgaaatgaatgttaaaactgagacagagagtgaagaggaggaagaagtcgcattagataatgaagatgaagaacaggaggcttcccaggaggagtctgcaggatttcttagagaaaatcaagccaaatatacaccctcattgacagctttggtagaaaatacacccaaagaaaattccatgaaagttcgtgaatggaataataaaggtggacactgctgcaaacttgagactcaggagctagagcctaaatttaacctgatgcagattcttcaagataatggcaatcttagcaaaatgcaggcccgaatagcattctctgcctatctccagcatgttcaaattcgcctgatgaaagacagtggcggtcagacgttcagtgccagttgggctgccaaagaggatgaacagatggagctggttgttcgtttcctcaagcgagcatcaaataacctccagcattcactgaggatggtattacccagtcgacgattggcacttctggaacgcagaagaatcctggcccaccagctgggtgactttatcattgtatacaacaaggaaacagaacaaatggctgaaaagaaatcaaagaagaaagttgaggaagaagaggaagatggggtgaatatggaaaactttcaggagttcatcagacaagcaagtgaggctgaactggaggaggtgttgactttttatacccaaaagaacaagtctgctagtgtcttcctggggactcactctaaaatttctaagaacaacaacaattattctgatagtggggcaaaaggtgatcaccctgagactataatggaagaagtgaaaataaagccacctaaacagcaacagacgacagaaattcattctgataaattatctcgatttaccacttcagcagaaaaagaggcaaaattagtttatagcaattcctcctctggtcctactgctactctgcagaaaattcccaacacccatttgtcatctgttacaacctctgacctctctccagggccttgccaccattcttctttatctcaaattccttcagctatccccagcatgcctcaccagccaacaattttactgaacacagtctctgccagtgcttctccctgcctacatcccggggcacagaacatcccaagccctactggcctgccacgctgtcgatcaggaagtcacaccattggtcccttttcttccttccaaagtgctgcacacatctatagccagaaactgtctcgtccctcttcagcaaaggcagcaggatcgtgctatctaaacaagcatcattcaggaatagccaaaacacaaaaagagggagaagatgcttctttatatagcaaacggtacaaccaaagtatggttacagctgaacttcagcggctagctgagaagcaggcagcgagacagtattctccatccagccacatcaacctcctcacccaacaggtaacaaacctgaatttggcaactggcatcataaacagaagcagtgcttcagctcccccaaccctccgacccatcatcagtcctagtggcccgacatggtctacacagtcagacccccaagctcccgagaatcactccagctctcctggaagcaggagcctgcagacagggggatttgcctgggaaggagaagtagaaaacaacgtgtacagccaggctacaggggtggtcccccagcacaagtatcaccccacagcaggcagctatcagcttcaatttgccctgcagcaacttgaacaacaaaaacttcagtcccggcagctcctggaccagagtcgagcccggcaccaggcaatctttggcagccagacactacctaactccaatttatggacaatgaataatggtgcaggttgtagaatttccagtgccacagctagtggccagaagccaaccactctgccacaaaaagtggtaccacctccaagttcttgcgcctccctggttcccaaacccccacccaaccacgaacaagtgctcagaagggcaacatcccagaaagcttccaatacccgcttcagatcctcctttcaaaactatttgtggtatttcttccaagcagtcagctgaactgaggacgacagcctacaaacaactacatgcatctgaactgtctcttgtaaatgagcttttttcagagccagaatcatactctccaggaaatatggagaaagaaacctgaggagattgaagtttgccaggcacaagggcaaaactcagactgaatgaatttgaaagggtggggccaaagatgttgtaacctgggagacttctctgaagaaagaaaactgtttaagaaacacagactgaactgcagtacttttccttaaatagctgagatgaccttctttaccctgggcttaggtgattctcatcagggtgacctgagtggaagttggtggtaacgactgttctgtgtcagcacccaggacagtggtgtctgttaaggctgccagggattagcagggaggaaagccatcaggactgggtagcctggtagcaccaaatcccaattaatgttacctgaacatgtggtgaggtcagccgtatgatgaaagatgtttaagagattaatgtcagaagaatatgaaaataaacaccggcttaaaaaatgttaaaaaaaaaaaaaaaaaaaaaaaaaaaaaaaaaaaaaacaccaccccaacaacaacaaagggggggcccccccacacaagacactccccacagggggccccacacatctcatcgacgactccacccacgcgtttgtgtcggacaaacaca

SEQ ID NO: 387688 - DNA, 4837 bp, Homo sapiens
  misc_feature (4)..(4): n is a, c, g, or t
  misc_feature (6)..(7): n is a, c, g, or t
  misc_feature (9)..(11): n is a, c, g, or t
  misc_feature (13)..(14): n is a, c, g, or t
  misc_feature (281)..(281): n is a, c, g, or t
  misc_feature (4378)..(4378): n is a, c, g, or t
  misc_feature (4381)..(4381): n is a, c, g, or t
attngnntnnntnnagaacgttatcatttgtcttataagattgtacgaacggacagtcgcctagtacgcagcattctgacagcccatggatttcatgaagttcacccaagcagcactgactataacctaatgtggacaggatcccacctgaagcccttcttactgcgcaccctctctgaagcacaaaaagttaatcactttcccaggtcttatgaacttacccggaaggaccgactgtacaaaaacattattcgaatgcagcatacacatggattcaaggnttttcacatcctcccccagaccttcctcctgccagctgagtacgcggaattttgtaattcatattcgaaggaccggggaccttggatagtaaaaccagtggcatcttcaagggggcggggcgtctacctgatcaacaatccaaaccagatctccctggaagagaacattttggtctcccgttacattaacaaccccctgctcatagatgatttcaagtttgacgtgcgcctctatgtgctcgtgacttcctatgatcctcttgtcatctatctctatgaagaaggattggctaggtttgcaactgtgcgatatgatcaaggagccaagaacattcggaaccagttcatgcatctgacaaactacagtgtcaacaagaaaagtggagattacgtcagttgtgacgatccagaagtggaggattatggaaacaaatggagcatgagtgctatgcttaggtacctgaaacaagaaggcagagatacaaccgcattgatggcccatgtagaagacctgatcattaagactataatctctgctgaactagctattgctactgcctgtaaaacctttgttcctcatcgcagcagttgttttgaactctatggctttgacgtgctcatagattctactctgaagccatggttgttggaagtgaatctctctccttctttggcctgtgatgcgcctctggacctaaagattaaagccagtatgatttcagatatgttcactgttgtaggatttgtgtgccaagatcctgcccagcgggcatcaactcggccaatttatcccacctttgagtcttccaggcgaaaccctttccagaaacctcagcgttgccgtccactctctgccagtgatgcggaaatgaaaaacctcgtgggctcagcccgggagaaagggccagggaagttgggtggttctgtgcttggtctgtcaatggaggagatcaaagttttacgaagggtgaaggaggagaatgatcggcgaggtggatttattcgcatatttcctacatctgagacatgggaaatatatgggtcctacctcgagcataagacctcaatgaactatatgctggcaacacgcctcttccaggacagaatgactgctgatggagcgccagaattgaagatagagagtctgaattcaaaggccaagctgcatgctgcactttacgagaggaagctcctgtctctggaggtgcgaaaacgtagacgacggagtagcagattgagggcaatgaggccaaaatacccagtgattacccaaccagctgaaatgaatgttaaaactgagacagagagtgaagaggaggaagaagtcgcattagataatgaagatgaagaacaggaggcttcccaggaggagtctgcaggatttcttagagaaaatcaagccaaatatacaccctcattgacagctttggtagaaaatacacccaaagaaaattccatgaaagttcgtgaatggaataataaaggtggacactgctgcaaacttgagactcaggagctagagcctaaatttaacctgatgcagattcttcaagataatggcaatcttagcaaaatgcaggcccgaatagcattctctgcctatctccagcatgttcaaattcgcctgatgaaagacagtggcggtcagacgttcagtgccagttgggctgccaaagaggatgaacagatggagctggttgttcgtttcctcaagcgagcatcaaataacctccagcattcactgaggatggtattacccagtcgacgattggcacttctggaacgcagaagaatcctggcccaccagctgggtgactttatcattgtatacaacaaggaaacagaacaaatggctgaaaagaaatcaaagaagaaagttgaggaagaagaggaagatggggtgaatatggaaaactttcaggagttcatcagacaagcaagtgaggctgaactggaggaggtgttgactttttatacccaaaagaacaagtctgctagtgtcttcctggggactcactctaaaatttctaagaacaacaacaattattctgatagtggggcaaaaggtgatcaccctgagactataatggaagaagtgaaaataaagccacctaaacagcaacagacgacagaaattcattctgataaattatctcgatttaccacttcagcagaaaaagaggcaaaattagtttatagcaattcctcctctggtcctactgctactctgcagaaaattcccaacacccatttgtcatctgttacaacctctgacctctctccagggccttgccaccattcttctttatctcaaattccttcagctatccccagcatgcctcaccagccaacaattttactgaacacagtctctgccagtgcttctccctgcctacatcccggggcacagaacatcccaagccctactggcctgccacgctgtcgatcaggaagtcacaccattggtcccttttcttccttccaaagtgctgcacacatctatagccagaaactgtctcgtccctcttcagcaaaggcagcaggatcgtgctatctaaacaagcatcattcaggaatagccaaaacacaaaaagagggagaagatgcttctttatatagcaaacggtacaaccaaagtatggttacagctgaacttcagcggctagctgagaagcaggcagcgagacagtattctccatccagccacatcaacctcctcacccaacaggtaacaaacctgaatttggcaactggcatcataaacagaagcagtgcttcagctcccccaaccctccgacccatcatcagtcctagtggcccgacatggtctacacagtcagacccccaagctcccgagaatcactccagctctcctggaagcaggagcctgcagacagggggatttgcctgggaaggagaagtagaaaacaacgtgtacagccaggctacaggggtggtcccccagcacaagtatcaccccacagcaggcagctatcagcttcaatttgccctgcagcaacttgaacaacaaaaacttcagtcccggcagctcctggaccagagtcgagcccggcaccaggcaatctttggcagccagacactacctaactccaatttatggacaatgaataatggtgcaggttgtagaatttccagtgccacagctagtggccagaagccaaccactctgccacaaaaagtggtaccacctccaagttcttgcgcctccctggttcccaaacccccacccaaccacgaacaagtgctcagaagggcaacatcccagaaagcttccaaagggtcctccgcggaagggcagctgaatggactccagagcagccttaaccctgcagcctttgtgcccatcaccagctctacagatcctgctcacactaaaatatgaaccacaaacacacagagaaacaacctgttcaccactcctgggtgcatgattgagggtgaagcatccaccagcacttcaaggggtccatagtatttttttttttgctgcctcaaagtccccaaagccttcgagcagaagtggcagtagatggttgccaatcagccaatgcagactttcactgggacaacaagaaagcagatcttctgggttttgatggaacttggcagtggggacattcagctgatgcattatataccccgtcagagcacacttgtatcttttaccttccctttgccccatgcccccaaactgcttaggtcttctctgtccctttactgctgctgcacagagatgatataaaagaggctctttggctatttgcattttgcttcctcttcttttccagattacagtatgaagctttattttctttgtacaagcttaaaatttcaacatcatcatccgccaaagttgttcctcccttttcggaggatctagggggaaagaggagcattcatcacaagtttcctagagagaggagacaaatcggtgtgccattgacaacatgagccagggtaaaggcaccctttggaattactgatttcaaagattaataaagtaattctatttttataaaaaaaaaaaaaaaaaaaaaaaaaaaaaaaaaaaaaaaaaaaaaaaaaaaaaaaaaaanaanaaaaaaaaaaaaaaaaaaaaaaaaaaaaaaaaaaacaaaaaaagaaaagaggggcgcgcgccgcgcgagcaagacatcctcgcccagcagggcggcgacacactaagacccaccacccctattaatgcaacagagcaggcaccccacaacagaaagcggcgccactttcaaacataacagcgaagcagggcggccgcggacgctgaaaacacacaaacaaaagcaggcggaagggcagggagaacacacaaccggagcgacccgcgagggagacctaactctagtaggagggagagacaaaaccaccaccccccgaccgagggggggggagggagagaacaccaagaaagcggaggacgaagacacaacaaccaacacgcgaaaaaaaacaaaaacaaaaccccaccaagaggcgacagagaaataacacaacacagcgaagaagagggaatgcgg

SEQ ID NO: 387689 - DNA, 4060 bp, Homo sapiens
  misc_feature (4)..(4): n is a, c, g, or t
  misc_feature (6)..(7): n is a, c, g, or t
  misc_feature (9)..(11): n is a, c, g, or t
  misc_feature (13)..(14): n is a, c, g, or t
  misc_feature (281)..(281): n is a, c, g, or t
attngnntnnntnnagaacgttatcatttgtcttataagattgtacgaacggacagtcgcctagtacgcagcattctgacagcccatggatttcatgaagttcacccaagcagcactgactataacctaatgtggacaggatcccacctgaagcccttcttactgcgcaccctctctgaagcacaaaaagttaatcactttcccaggtcttatgaacttacccggaaggaccgactgtacaaaaacattattcgaatgcagcatacacatggattcaaggnttttcacatcctcccccagaccttcctcctgccagctgagtacgcggaattttgtaattcatattcgaaggaccggggaccttggatagtaaaaccagtggcatcttcaagggggcggggcgtctacctgatcaacaatccaaaccagatctccctggaagagaacattttggtctcccgttacattaacaaccccctgctcatagatgatttcaagtttgacgtgcgcctctatgtgctcgtgacttcctatgatcctcttgtcatctatctctatgaagaaggattggctaggtttgcaactgtgcgatatgatcaaggagccaagaacattcggaaccagttcatgcatctgacaaactacagtgtcaacaagaaaagtggagattacgtcagttgtgacgatccagaagtggaggattatggaaacaaatggagcatgagtgctatgcttaggtacctgaaacaagaaggcagagatacaaccgcattgatggcccatgtagaagacctgatcattaagactataatctctgctgaactagctattgctactgcctgtaaaacctttgttcctcatcgcagcagttgttttgaactctatggctttgacgtgctcatagattctactctgaagccatggttgttggaagtgaatctctctccttctttggcctgtgatgcgcctctggacctaaagattaaagccagtatgatttcagatatgttcactgttgtaggatttgtgtgccaagatcctgcccagcgggcatcaactcggccaatttatcccacctttgagtcttccaggcgaaaccctttccagaaacctcagcgttgccgtccactctctgccagtgatgcggaaatgaaaaacctcgtgggctcagcccgggagaaagggccagggaagttgggtggttctgtgcttggtctgtcaatggaggagatcaaagttttacgaagggtgaaggaggagaatgatcggcgaggtggatttattcgcatatttcctacatctgagacatgggaaatatatgggtcctacctcgagcataagacctcaatgaactatatgctggcaacacgcctcttccaggacagaatgactgctgatggagcgccagaattgaagatagagagtctgaattcaaaggccaagctgcatgctgcactttacgagaggaagctcctgtctctggaggtgcgaaaacgtagacgacggagtagcagattgagggcaatgaggccaaaatacccagtgattacccaaccagctgaaatgaatgttaaaactgagacagagagtgaagaggaggaagaagtcgcattagataatgaagatgaagaacaggaggcttcccaggaggagtctgcaggatttcttagagaaaatcaagccaaatatacaccctcattgacagctttggtagaaaatacacccaaagaaaattccatgaaagttcgtgaatggaataataaaggtggacactgctgcaaacttgagactcaggagctagagcctaaatttaacctgatgcagattcttcaagataatggcaatcttagcaaaatgcaggcccgaatagcattctctgcctatctccagcatgttcaaattcgcctgatgaaagacagtggcggtcagacgttcagtgccagttgggctgccaaagaggatgaacagatggagctggttgttcgtttcctcaagcgagcatcaaataacctccagcattcactgaggatggtattacccagtcgacgattggcacttctggaacgcagaagaatcctggcccaccagctgggtgactttatcattgtatacaacaaggaaacagaacaaatggctgaaaagaaatcaaagaagaaagttgaggaagaagaggaagatggggtgaatatggaaaactttcaggagttcatcagacaagcaagtgaggctgaactggaggaggtgttgactttttatacccaaaagaacaagtctgctagtgtcttcctggggactcactctaaaatttctaagaacaacaacaattattctgatagtggggcaaaaggtgatcaccctgagactataatggaagaagtgaaaataaagccacctaaacagcaacagacgacagaaattcattctgataaattatctcgatttaccacttcagcagaaaaagaggcaaaattagtttatagcaattcctcctctggtcctactgctactctgcagaaaattcccaacacccatttgtcatctgttacaacctctgacctctctccagggccttgccaccattcttctttatctcaaattccttcagctatccccagcatgcctcaccagccaacaattttactgaacacagtctctgccagtgcttctccctgcctacatcccggggcacagaacatcccaagccctactggcctgccacgctgtcgatcaggaagtcacaccattggtcccttttcttccttccaaagtgctgcacacatctatagccagaaactgtctcgtccctcttcagcaaaggcagcaggatcgtgctatctaaacaagcatcattcaggaatagccaaaacacaaaaagagggagaagatgcttctttatatagcaaacggtacaaccaaagtatggttacagctgaacttcagcggctagctgagaagcaggcagcgagacagtattctccatccagccacatcaacctcctcacccaacaggtaacaaacctgaatttggcaactggcatcataaacagaagcagtgcttcagctcccccaaccctccgacccatcatcagtcctagtggcccgacatggtctacacagtcagacccccaagctcccgagaatcactccagctctcctggaagcaggagcctgcagacagggggatttgcctgggaaggagaagtagaaaacaacgtgtacagccaggctacaggggtggtcccccagcacaagtatcaccccacagcaggcagctatcagcttcaatttgccctgcagcaacttgaacaacaaaaacttcagtcccggcagctcctggaccagagtcgagcccggcaccaggcaatctttggcagccagacactacctaactccaatttatggacaatgaataatggtgcaggttgtagaatttccagtgccacagctagtggccagaagccaaccactctgccacaaaaagtggtaccacctccaagttcttgcgcctccctggttcccaaacccccacccaaccacgaacaagtgctcagaagggcaacatcccagaaagcttccaaagggtcctccgcggaagggcagctgaatggactccagagcagccttaaccctgcagcctttgtgcccatcaccagctctacagatcctgctcacactaaaatatgaaccacaaacacacagagaaacaacctgttcaccactcctgggtgcatgattgagggtgaagcatccaccagcacttcaaggggtccatagtatttttttttttgctgcctcaaagtccccaaagccttcgagcagaagtggcagtagatggttgccaatcagccaatgcagactttcactgggacaacaagaaagcagatcttctgggttttgatggaacttggcagtggggacattcagctgatgcattatataccccgtcagagcacacttgtatcttttaccttccctttgccccatgcccccaaactgcttaggtcttctctgtccctttactgctgctgcacagagatgatataaaagaggctctttggct

SEQ ID NO: 387690 - DNA, 4250 bp, Homo sapiens
  misc_feature (4)..(4): n is a, c, g, or t
  misc_feature (6)..(7): n is a, c, g, or t
  misc_feature (9)..(11): n is a, c, g, or t
  misc_feature (13)..(14): n is a, c, g, or t
  misc_feature (281)..(281): n is a, c, g, or t
attngnntnnntnnagaacgttatcatttgtcttataagattgtacgaacggacagtcgcctagtacgcagcattctgacagcccatggatttcatgaagttcacccaagcagcactgactataacctaatgtggacaggatcccacctgaagcccttcttactgcgcaccctctctgaagcacaaaaagttaatcactttcccaggtcttatgaacttacccggaaggaccgactgtacaaaaacattattcgaatgcagcatacacatggattcaaggnttttcacatcctcccccagaccttcctcctgccagctgagtacgcggaattttgtaattcatattcgaaggaccggggaccttggatagtaaaaccagtggcatcttcaagggggcggggcgtctacctgatcaacaatccaaaccagatctccctggaagagaacattttggtctcccgttacattaacaaccccctgctcatagatgatttcaagtttgacgtgcgcctctatgtgctcgtgacttcctatgatcctcttgtcatctatctctatgaagaaggattggctaggtttgcaactgtgcgatatgatcaaggagccaagaacattcggaaccagttcatgcatctgacaaactacagtgtcaacaagaaaagtggagattacgtcagttgtgacgatccagaagtggaggattatggaaacaaatggagcatgagtgctatgcttaggtacctgaaacaagaaggcagagatacaaccgcattgatggcccatgtagaagacctgatcattaagactataatctctgctgaactagctattgctactgcctgtaaaacctttgttcctcatcgcagcagttgttttgaactctatggctttgacgtgctcatagattctactctgaagccatggttgttggaagtgaatctctctccttctttggcctgtgatgcgcctctggacctaaagattaaagccagtatgatttcagatatgttcactgttgtaggatttgtgtgccaagatcctgcccagcgggcatcaactcggccaatttatcccacctttgagtcttccaggcgaaaccctttccagaaacctcagcgttgccgtccactctctgccagtgatgcggaaatgaaaaacctcgtgggctcagcccgggagaaagggccagggaagttgggtggttctgtgcttggtctgtcaatggaggagatcaaagttttacgaagggtgaaggaggagaatgatcggcgaggtggatttattcgcatatttcctacatctgagacatgggaaatatatgggtcctacctcgagcataagacctcaatgaactatatgctggcaacacgcctcttccaggacagaatgactgctgatggagcgccagaattgaagatagagagtctgaattcaaaggccaagctgcatgctgcactttacgagaggaagctcctgtctctggaggtgcgaaaacgtagacgacggagtagcagattgagggcaatgaggccaaaatacccagtgattacccaaccagctgaaatgaatgttaaaactgagacagagagtgaagaggaggaagaagtcgcattagataatgaagatgaagaacaggaggcttcccaggaggagtctgcaggatttcttagagaaaatcaagccaaatatacaccctcattgacagctttggtagaaaatacacccaaagaaaattccatgaaagttcgtgaatggaataataaaggtggacactgctgcaaacttgagactcaggagctagagcctaaatttaacctgatgcagattcttcaagataatggcaatcttagcaaaatgcaggcccgaatagcattctctgcctatctccagcatgttcaaattcgcctgatgaaagacagtggcggtcagacgttcagtgccagttgggctgccaaagaggatgaacagatggagctggttgttcgtttcctcaagcgagcatcaaataacctccagcattcactgaggatggtattacccagtcgacgattggcacttctggaacgcagaagaatcctggcccaccagctgggtgactttatcattgtatacaacaaggaaacagaacaaatggctgaaaagaaatcaaagaagaaagttgaggaagaagaggaagatggggtgaatatggaaaactttcaggagttcatcagacaagcaagtgaggctgaactggaggaggtgttgactttttatacccaaaagaacaagtctgctagtgtcttcctggggactcactctaaaatttctaagaacaacaacaattattctgatagtggggcaaaaggtgatcaccctgagactataatggaagaagtgaaaataaagccacctaaacagcaacagacgacagaaattcattctgataaattatctcgatttaccacttcagcagaaaaagaggcaaaattagtttatagcaattcctcctctggtcctactgctactctgcagaaaattcccaacacccatttgtcatctgttacaacctctgacctctctccagggccttgccaccattcttctttatctcaaattccttcagctatccccagcatgcctcaccagccaacaattttactgaacacagtctctgccagtgcttctccctgcctacatcccggggcacagaacatcccaagccctactggcctgccacgctgtcgatcaggaagtcacaccattggtcccttttcttccttccaaagtgctgcacacatctatagccagaaactgtctcgtccctcttcagcaaaggcagcaggatcgtgctatctaaacaagcatcattcaggaatagccaaaacacaaaaagagggagaagatgcttctttatatagcaaacggtacaaccaaagtatggttacagctgaacttcagcggctagctgagaagcaggcagcgagacagtattctccatccagccacatcaacctcctcacccaacaggtaacaaacctgaatttggcaactggcatcataaacagaagcagtgcttcagctcccccaaccctccgacccatcatcagtcctagtggcccgacatggtctacacagtcagacccccaagctcccgagaatcactccagctctcctggaagcaggagcctgcagacagggggatttgcctgggaaggagaagtagaaaacaacgtgtacagccaggctacaggggtggtcccccagcacaagtatcaccccacagcaggcagctatcagcttcaatttgccctgcagcaacttgaacaacaaaaacttcagtcccggcagctcctggaccagagtcgagcccggcaccaggcaatctttggcagccagacactacctaactccaatttatggacaatgaataatggtgcaggttgtagaatttccagtgccacagctagtggccagaagccaaccactctgccacaaaaagtggtaccacctccaagttcttgcgcctccctggttcccaaacccccacccaaccacgaacaagtgctcagaagggcaacatcccagaaagcttccaaagggtcctccgcggaagggcagctgaatggactccagagcagccttaaccctgcagcctttgtgcccatcaccagctctacagatgattgagggtgaagcatccaccagcacttcaaggggtccatagtatttttttttttgctgcctcaaagtccccaaagccttcgagcagaagtggcagtagatggttgccaatcagccaatgcagactttcactgggacaacaagaaagcagatcttctgggttttgatggaacttggcagtggggacattcagctgatgcattatataccccgtcagagcacacttgtatcttttaccttccctttgccccatgcccccaaactgcttaggtcttctctgtccctttactgctgctgcacagagatgatataaaagaggctctttggctatttgcattttgcttcctcttcttttccagattacagtatgaagctttattttctttgtacaagcttaaaatttcaacatcatcatccgccaaagttgttcctcccttttcggaggatctagggggaaagaggagcattcatcacaagtttcctagagagaggagacaaatcggtgtgccattgacaacatgagccagggtaaaggcaccctttggaattactgatttcaaagattaataaagtaattctatttttat

SEQ ID NO: 387691 - DNA, 1204 bp, Homo sapiens
cagctccgaccctcacacgcacttgcacggtacttctatggaagggtgagccctcacagatggagcaatggggcgcgcacacctgaacaagggaggggaaggagttcttatccctgatgcatgtgaccccagcacaagtatcaccccacagcaggcagctatcagcttcaatttgccctgcagcaacttgaacaacaaaaacttcagtcccggcagctcctggaccagagtcgagcccggcaccaggcaatctttggcagccagacactacctaactccaatttatggacaatgaataatggtgcaggttgtagaatttccagtgccacagctagtggccagaagccaaccactctgccacaaaaagtggtaccacctccaagttcttgcgcctccctggttcccaaacccccacccaaccacgaacaagtgctcagaagggcaacatcccagaaagcttccaaagggtcctccgcggaagggcagctgaatggactccagagcagccttaaccctgcagcctttgtgcccatcaccagctctacagatcctgctcacactaaaatatgaaccacaaacacacagagaaacaacctgttcaccactcctgggtgcatgattgagggtgaagcatccaccagcacttcaaggggtccatagtatttttttttttgctgcctcaaagtccccaaagccttcgagcagaagtggcagtagatggttgccaatcagccaatgcagactttcactgggacaacaagaaagcagatcttctgggttttgatggaacttggcagtggggacattcagctgatgcattatataccccgtcagagcacacttgtatcttttaccttccctttgccccatgcccccaaactgcttaggtcttctctgtccctttactgctgctgcacagagatgatataaaagaggctctttggctatttgcattttgcttcctcttcttttccagattacagtatgaagctttattttctttgtacaagcttaaaatttcaacatcatcatccgccaaagttgttcctcccttttcggaggatctagggggaaagaggagcattcatcacaagtttcctagagagaggagacaaatcggtgtgccattgacaacatgagccagggtaaaggcaccctttggaattactgatttcaaagattaataaagtaattctatttttat

SEQ ID NO: 387692 - DNA, 2897 bp, Homo sapiens
  misc_feature (4)..(4): n is a, c, g, or t
  misc_feature (6)..(7): n is a, c, g, or t
  misc_feature (9)..(11): n is a, c, g, or t
  misc_feature (13)..(14): n is a, c, g, or t
  misc_feature (281)..(281): n is a, c, g, or t
attngnntnnntnnagaacgttatcatttgtcttataagattgtacgaacggacagtcgcctagtacgcagcattctgacagcccatggatttcatgaagttcacccaagcagcactgactataacctaatgtggacaggatcccacctgaagcccttcttactgcgcaccctctctgaagcacaaaaagttaatcactttcccaggtcttatgaacttacccggaaggaccgactgtacaaaaacattattcgaatgcagcatacacatggattcaaggnttttcacatcctcccccagaccttcctcctgccagctgagtacgcggaattttgtaattcatattcgaaggaccggggaccttggatagtaaaaccagtggcatcttcaagggggcggggcgtctacctgatcaacaatccaaaccagatctccctggaagagaacattttggtctcccgttacattaacaaccccctgctcatagatgatttcaagtttgacgtgcgcctctatgtgctcgtgacttcctatgatcctcttgtcatctatctctatgaagaaggattggctaggtttgcaactgtgcgatatgatcaaggagccaagaacattcggaaccagttcatgcatctgacaaactacagtgtcaacaagaaaagtggagattacgtcagttgtgacgatccagaagtggaggattatggaaacaaatggagcatgagtgctatgcttaggtacctgaaacaagaaggcagagatacaaccgcattgatggcccatgtagaagacctgatcattaagactataatctctgctgaactagctattgctactgcctgtaaaacctttgttcctcatcgcagcagttgttttgaactctatggctttgacgtgctcatagattctactctgaagccatggttgttggaagtgaatctctctccttctttggcctgtgatgcgcctctggacctaaagattaaagccagtatgatttcagatatgttcactgttgtaggatttgtgtgccaagatcctgcccagcgggcatcaactcggccaatttatcccacctttgagtcttccaggcgaaaccctttccagaaacctcagcgttgccgtccactctctgccagtgatgcggaaatgaaaaacctcgtgggctcagcccgggagaaagggccagggaagttgggtggttctgtgcttggtctgtcaatggaggagatcaaagttttacgaagggtgaaggaggagaatgatcggcgaggtggatttattcgcatatttcctacatctgagacatgggaaatatatgggtcctacctcgagcataagacctcaatgaactatatgctggcaacacgcctcttccaggacagaatgactgctgatggagcgccagaattgaagatagagagtctgaattcaaaggccaagctgcatgctgcactttacgagaggaagctcctgtctctggaggtgcgaaaacgtagacgacggagtagcagattgagggcaatgaggccaaaatacccagtgattacccaaccagctgaaatgaatgttaaaactgagacagagagtgaagaggaggaagaagtcgcattagataatgaagatgaagaacaggaggcttcccaggaggagtctgcaggatttcttagagaaaatcaagccaaatatacaccctcattgacagctttggtagaaaatacacccaaagaaaattccatgaaagttcgtgaatggaataataaaggtggacactgctgcaaacttgagactcaggagctagagcctaaatttaacctgatgcagattcttcaagataatggcaatcttagcaaaatgcaggcccgaatagcattctctgcctatctccagcatgttcaaattcgcctgatgaaagacagtggcggtcagacgttcagtgccagttgggctgccaaagaggatgaacagatggagctggttgttcgtttcctcaagcgagcatcaaataacctccagcattcactgaggatggtattacccagtcgacgattggcacttctggaacgcagaagaatcctggcccaccagctgggtgactttatcattgtatacaacaaggaaacagaacaaatggctgaaaagaaatcaaagaagaaagttgaggaagaagaggaagatggggtgaatatggaaaactttcaggagttcatcagacaagcaagtgaggctgaactggaggaggtgttgactttttatacccaaaagaacaagtctgctagtgtcttcctggggactcactctaaaatttctaagaacaacaacaattattctgatagtggggcaaaaggtgatcaccctgagactataatggaagaagtgaaaataaagccacctaaacagcaacagacgacagaaattcattctgataaattatctcgatttaccacttcagcagaaaaagaggcaaaattagtttatagcaattcctcctctggtcctactgctactctgcagaaaattcccaacacccatttgtcatctgttacaacctctgacctctctccagggccttgccaccattcttctttatctcaaattccttcagctatccccagcatgcctcaccagccaacaattttactgaacacagtctctgccagtgcttctccctgcctacatcccggggcacagaacatcccaagccctactggcctgccacgctgtcgatcaggaagtcacaccattggtcccttttcttccttccaaagtgctgcacacatctatagccagaaactgtctcgtccctcttcagcaaaggcaggtgagtgagagaacgaaagacagtccacaatgtgagctcctccccagccccaataaagaaaggatgtcatctcttc

SEQ ID NO: 387693 - DNA, 555 bp, Homo sapiens
tattagataacagattaagaattgatttttccccttaaatgttcttatacctactgtctctatacaacactttgccctctgatttgggatgccacctctattacctactatcctattactttgatctctcctaccgatagcagagcagaggaagagattgctaaggaccagaagcccaaggcaaatgatagggtaaacagggagaggtctgagggcaggagggactcacagaggggaggaggcctgaatatgagtcccatggccattgagatgagctaagtctttcacactgtttaagcttcttatttattcggctgttgctaaaacaataaaggccctttaagaagcacccaggctggggtggctcacacctgtaatcccagcactttgagaggccaaggcgggtggatcgaggtcaggagatcgagaccatcctggctaacatggtgaaacaccgtctctactaaaaatataaaaatttagctgggcgtggtggcaggcacctgtagtcccagctactcgggaggctgaggcaggagaatggcgtgaacccgg

SEQ ID NO: 387694 - DNA, 660 bp, Homo sapiens
  misc_feature (598)..(598): n is a, c, g, or t
  misc_feature (623)..(623): n is a, c, g, or t
  misc_feature (637)..(637): n is a, c, g, or t
tgatggaaaacacatgagcagtaacaagttttaatcttgctcctcagtactaacatggactaatctgtgggagcagtttattccagtatcacccagggtgcagccacaccaggactgtgttgaagggtgttttttttcttttaaatgtaatacctcctcatcttttcttcttacacagtgtctgagaacatttacattatagataagtagtacatggtggataacttctacttttaggaggactactctcttctgacagtcctagactggtcttctacactaagacaccatgaaggagtatgtgctcctattattcctggctttgtgctctgccaaacccttctttagcccttcacacatcgcactgaagaatatgatgctgaaggatatggaagacacagatgatgatgatgatgatgatgatgatgacttatctcagggctatgatagctcagaaagggacttctcactcattgatgatcctatgatgccagctaactcagactccagtgaagatgctgatgactgaagccccagcatgggcccccattgcttggggcggctgctgttattttcatttactctgggcccttgggantatgggaaacgtggggagggggcangggagatgtggggngaagttccagggattcccagggg

SEQ ID NO: 387695 - DNA, 430 bp, Homo sapiens
actggaagatagttgttacatactgaagtaggttattaaataaagtaatgaaatatctttgaacatatatataaataggacaggcttatattctaactagtttgcggtgttttcagctaactctatcacacctaaccatctgtgtaagacttgatgcattttatatcatttttaggctgggcctaggaaacaacaaaatcacagatatcgaaaatgggagtcttgctaacataccacgtgtgagagaaatacatttggaaaacaataaactaaaaaaaatcccttcaggattaccagagttgaaatacctccaggtaaaacattctacttgtgttcagtagatattgggtatttttcttcagtttttataacacactttaggcacacctcaagcaaagaccaagtaaggcagcaaggggtggattcaaac

SEQ ID NO: 387696 - DNA, 459 bp, Homo sapiens
ggaagatagttgttacatactgaagtaggttattaaataaagtaatgaaatatctttgaacatatatataaataggacaggcttatattctaactagtttgcggtgttttcagctaactctatcacacctaaccatctgtgtaagacttgatgcattttatatcatttttaggctgggcctaggaaacaacaaaatcacagatatcgaaaatgggagtcttgctaacataccacgtgtgagagaaatacatttggaaaacaataaactaaaaaaaatcccttcaggattaccagagttgaaatacctccaggtaaaacattctacttgtgttcagtagatattgggtatttttcttcagtttttataacacactttaggcacacctcaagcaaagaccaagtaaggcagcaaggggtggattcaaacataatgactctccaggttgcatgaggtgtttt

SEQ ID NO: 387697 - DNA, 2523 bp, Homo sapiens
tgatggaaaacacatgagcagtaacaagttttaatcttgctcctcagtactaacatggactaatctgtgggagcagtttattccagtatcacccagggtgcagccacaccaggactgtgttgaagggtgttttttttcttttaaatgtaatacctcctcatcttttcttcttacacagtgtctgagaacatttacattatagataagtagtacatggtggataacttctacttttaggaggactactctcttctgacagtcctagactggtcttctacactaagacaccatgaaggagtatgtgctcctattattcctggctttgtgctctgccaaacccttctttagcccttcacacatcgcactgaagaatatgatgctgaaggatatggaagacacagatgatgatgatgatgatgatgatgatgatgatgatgatgatgaggacaactctctttttccaacaagagagccaagaagccatttttttccatttgatctgtttccaatgtgtccatttggatgtcagtgctattcacgagttgtacattgctcagatttaggtttgacctcagtcccaaccaacattccatttgatactcgaatgcttgatcttcaaaacaataaaattaaggaaatcaaagaaaatgattttaaaggactcacttcactttatggtctgatcctgaacaacaacaagctaacgaagattcacccaaaagcctttctaaccacaaagaagttgcgaaggctgtatctgtcccacaatcaactaagtgaaataccacttaatcttcccaaatcattagcagaactcagaattcatgaaaataaagttaagaaaatacaaaaggacacattcaaaggaatgaatgctttacacgttttggaaatgagtgcaaaccctcttgataataatgggatagagccaggggcatttgaaggggtgacggtgttccatatcagaattgcagaagcaaaactgacctcagttcctaaaggcttaccaccaactttattggagcttcacttagattataataaaatttcaacagtggaacttgaggattttaaacgatacaaagaactacaaaggctgggcctaggaaacaacaaaatcacagatatcgaaaatgggagtcttgctaacataccacgtgtgagagaaatacatttggaaaacaataaactaaaaaaaatcccttcaggattaccagagttgaaatacctccagataatcttccttcattctaattcaattgcaagagtgggagtaaatgacttctgtccaacagtgccaaagatgaagaaatctttatacagtgcaataagtttattcaacaacccggtgaaatactgggaaatgcaacctgcaacatttcgttgtgttttgagcagaatgagtgttcagcttgggaactttggaatgtaataattagtaattggtaatgtccatttaatataagattcaaaaatccctacatttggaatacttgaactctattaataatggtagtattatatatacaagcaaatatctattctcaagtggtaagtccactgacttattttatgacaagaaatttcaacggaattttgccaaactattgatacataagggttgagagaaacaagcatctattgcagtttctttttgcgtacaaatgatcttacataaatctcatgcttgaccattcctttcttcataacaaaaaagtaagatattcggtatttaacactttgttatcaagcatattttaaaaagaactgtactgtaaatggaatgcttgacttagcaaaatttgtgctctttcatttgctgttagaaaaacagaattaacaaagacagtaatgtgaagagtgcattacactattcttattctttagtaacttgggtagtactgtaatatttttaatcatcttaaagtatgatttgatataatcttattgaaattaccttatcatgtcttagagcccgtctttatgtttaaaactaatttcttaaaataaagccttcagtaaatgttcattaccaacttgataaatgctactcataagagctggtttggggctatagcatatgcttttttttttttaattattacctgatttaaaaatctctgtaaaaacgtgtagtgtttcataaaatctgtaactcgcattttaatgatccgctattataagcttttaatagcatgaaaattgttaggctatataacattgccacttcaactctaaggaatatttttgagatatccctttggaagaccttgcttggaagagcctggacactaacaattctacaccaaattgtctcttcaaatacgtatggactggataactctgagaaacacatctagtataactgaataagcagagcatcaaattaaacagacagaaaccgaaagctctatataaatgctcagagttctttatgtatttcttattggcattcaacatatgtaaaatcagaaaacagggaaattttcattaaaaatattggtttgaaataaaaaaaaaatg

SEQ ID NO: 387698 - DNA, 2290 bp, Homo sapiens
tgatggaaaacacatgagcagtaacaagttttaatcttgctcctcagtactaacatggactaatctgtgggagcagtttattccagtatcacccagggtgcagccacaccaggactgtgttgaagggtgttttttttcttttaaatgtaatacctcctcatcttttcttcttacacagtgtctgagaacatttacattatagataagtagtacatggtggataacttctacttttaggaggactactctcttctgacagtcctagactggtcttctacactaagacaccatgaaggagtatgtgctcctattattcctggctttgtgctctgccaaacccttctttagcccttcacacatcgcactgaagaatatgatgctgaaggatatggaagacacagatgatgatgatgatgatgatgatgatgatgatgatgatgatgaggacaactctctttttccaacaagagagccaagaagccatttttttccatttgatctgtttccaatgtgtccatttggatgtcagtgctattcacgagttgtacattgctcagatttaggtttgacctcagtcccaaccaacattccatttgatactcgaatgcttgatcttcaaaacaataaaattaaggaaatcaaagaaaatgattttaaaggactcacttcactttatggtctgatcctgaacaacaacaagctaacgaagattcacccaaaagcctttctaaccacaaagaagttgcgaaggctgtatctgtcccacaatcaactaagtgaaataccacttaatcttcccaaatcattagcagaactcagaattcatgaaaataaagttaagaaaatacaaaaggacacattcaaaggaatgaatgctttacacgttttggaaatgagtgcaaaccctcttgataataatgggatagagccaggggcatttgaaggggtgacggtgttccatatcagaattgcagaagcaaaactgacctcagttcctaaagataatcttccttcattctaattcaattgcaagagtgggagtaaatgacttctgtccaacagtgccaaagatgaagaaatctttatacagtgcaataagtttattcaacaacccggtgaaatactgggaaatgcaacctgcaacatttcgttgtgttttgagcagaatgagtgttcagcttgggaactttggaatgtaataattagtaattggtaatgtccatttaatataagattcaaaaatccctacatttggaatacttgaactctattaataatggtagtattatatatacaagcaaatatctattctcaagtggtaagtccactgacttattttatgacaagaaatttcaacggaattttgccaaactattgatacataagggttgagagaaacaagcatctattgcagtttctttttgcgtacaaatgatcttacataaatctcatgcttgaccattcctttcttcataacaaaaaagtaagatattcggtatttaacactttgttatcaagcatattttaaaaagaactgtactgtaaatggaatgcttgacttagcaaaatttgtgctctttcatttgctgttagaaaaacagaattaacaaagacagtaatgtgaagagtgcattacactattcttattctttagtaacttgggtagtactgtaatatttttaatcatcttaaagtatgatttgatataatcttattgaaattaccttatcatgtcttagagcccgtctttatgtttaaaactaatttcttaaaataaagccttcagtaaatgttcattaccaacttgataaatgctactcataagagctggtttggggctatagcatatgcttttttttttttaattattacctgatttaaaaatctctgtaaaaacgtgtagtgtttcataaaatctgtaactcgcattttaatgatccgctattataagcttttaatagcatgaaaattgttaggctatataacattgccacttcaactctaaggaatatttttgagatatccctttggaagaccttgcttggaagagcctggacactaacaattctacaccaaattgtctcttcaaatacgtatggactggataactctgagaaacacatctagtataactgaataagcagagcatcaaattaaacagacagaaaccgaaagctctatataaatgctcagagttctttatgtatttcttattggcattcaacatatgtaaaatcagaaaacagggaaattttcattaaaaatattggtttgaaataaaaaaaaaatg

SEQ ID NO: 387699 - DNA, 2461 bp, Homo sapiens
tgatggaaaacacatgagcagtaacaagttttaatcttgctcctcagtactaacatggactaatctgtgggagcagtttattccagtatcacccagggtgcagccacaccaggactgtgttgaagggtgttttttttcttttaaatgtaatacctcctcatcttttcttcttacacagtgtctgagaacatttacattatagataagtagtacatggtggataacttctacttttaggaggactactctcttctgacagtcctagactggtcttctacactaagacaccatgaaggagtatgtgctcctattattcctggctttgtgctctgccaaacccttctttagcccttcacacatcgcactgaagaatatgatgctgaaggatatggaagacacagatgatgatgatgatgatgatgatgatgatgatgatgatgatgaggacaactctctttttccaacaagagagccaagaagccatttttttccatttgatctgtttccaatgtgtccatttggatgtcagtgctattcacgagttgtacattgctcagatttaggtttgacctcagtcccaaccaacattccatttgatactcgaatgcttgatcttcaaaacaataaaattaaggaaatcaaagaaaatgattttaaaggactcacttcactttatggtctgatcctgaacaacaacaagctaacgaagattcacccaaaagcctttctaaccacaaagaagttgcgaaggctgtatctgtcccacaatcaactaagtgaaataccacttaatcttcccaaatcattagcagaactcagaattcatgaaaataaagttaagaaaatacaaaaggacacattcaaaggaatgaatgctttacacgttttggaaatgagtgcaaaccctcttgataataatgggatagagccaggggcatttgaaggggtgacggtgttccatatcagaattgcagaagcaaaactgacctcagttcctaaaggcttaccaccaactttattggagcttcacttagattataataaaatttcaacagtggaacttgaggattttaaacgatacaaagaactacaaaggctgggcctaggaaacaacaaaatcacagatatcgaaaatgggagtcttgctaacataccacgtgtgagagaaatacatttggaaaacaataaactaaaaaaaatcccttcaggattaccagagttgaaatacctccagataatcttccttcattctaattcaattgcaagagtgggagtaaatgacttctgtccaacagtgccaaagatgaagaaatctttatacagtgcaataagtttattcaacaacccggtgaaatactgggaaatgcaacctgcaacatttcgttgtgttttgagcagaatgagtgttcagcttgggaactttggaatgtaataattagtaattggtaatgtccatttaatataagattcaaaaatccctacatttggaatacttgaactctattaataatggtagtattatatatacaagcaaatatctattctcaagtggtaagtccactgacttattttatgacaagaaatttcaacggaattttgccaaactattgatacataagggttgagagaaacaagcatctattgcagtttctttttgcgtacaaatgatcttacataaatctcatgcttgaccattcctttcttcataacaaaaaagtaagatattcggtatttaacactttgttatcaagcatattttaaaaagaactgtactgtaaatggaatgcttgacttagcaaaatttgtgctctttcatttgctgttagaaaaacagaattaacaaagacagtaatgtgaagagtgcattacactattcttattctttagtaacttgggtagtactgtaatatttttaatcatcttaaagtatgatttgatataatcttattgaaattaccttatcatgtcttagagcccgtctttatgtttaaaactaatttcttaaaataaagccttcagtaaatgttcattaccaattattacctgatttaaaaatctctgtaaaaacgtgtagtgtttcataaaatctgtaactcgcattttaatgatccgctattataagcttttaatagcatgaaaattgttaggctatataacattgccacttcaactctaaggaatatttttgagatatccctttggaagaccttgcttggaagagcctggacactaacaattctacaccaaattgtctcttcaaatacgtatggactggataactctgagaaacacatctagtataactgaataagcagagcatcaaattaaacagacagaaaccgaaagctctatataaatgctcagagttctttatgtatttcttattggcattcaacatatgtaaaatcagaaaacagggaaattttcattaaaaatattggtttgaaataaaaaaaaaatg

SEQ ID NO: 387700 - DNA, 757 bp, Homo sapiens
acagctgaaaaactcaagatctgtccaaagcagatccacatgtagacatcaccaagggtatcaatagacacaaccacagaggtgtctgcagtgtgcatcatgaagtccagcccctaactttagaccaacttcccagtctggaaggaaatttccttagaggatgccagtgctagtggcatcagccacgactcaggtgcagccatggagtggtccagcatgttactgtaagcagccagagggcagaggaaaggagcaagaaagatgagagggagggtggcaacatcatgggtgggcccctactggtatatctcactaccctacagtggcctgggggacacaaagaacacgatattttgatgggcagaggctctctcaggccagagcagtaggacttggaaagaaactgaagccaagctgaggaatgaggtttcctgtttcaatttgaccactcgtggctgtggatcccaggatatcacaaattgcaatgcctttcccattttctctgtggctgcaaacacttgggtcaggctctcattgacctggcgcccttgaggcacttaataaagcctattacttgaaactgataatacattagcactttatttactatgactttcaatgaagtattgttctccagtattgaaaataggaaaacgattaacaagagcttgatagttacgtgaataaacaatggttgatcctaaagaacaattaggcagcacttgataataaacagttggtatttcatgtatgctca

SEQ ID NO: 387701 - DNA, 506 bp, Homo sapiens
tttgcaggagagtgtgcggggaaggaaccgtgtcctccttcagccactgtgagcctctgggtttgggatctgtgtttctgtcccccaggtctctcctgtgactctgagtctgcctgtctgttgctcagattggctgtcccagaaacacaactgtgcacctcccacctctcctttcagaatggaaactgaggcccagatgggatgggactgggctaaggtcattcagcggggctggagtgagtgggcaaggttgatctgattctgtcttttccttacctgtcatctgcctttcctggttgctggctctctggttgctcattcatttattcagtcagccagccagccattcagtcatttgaagaccaaagactttgtctaatccacgtgtgtgtgtgtgtgtgtgtgtgtgtgtgtgtgtgtatgagcgcacacgtgcatgcatgcacaccagtgtgacgtgtctttcagtttctgtgggtccatctttttccttgtctcttagtgtc

SEQ ID NO: 387702 - DNA, 1049 bp, Homo sapiens
cagccccacagggcaccagcctgtgtgagcacccagcagacgccgctgcactgaaccctgaggactttctttcctcttcttcttggatatattagctcataattccaagtgttggataaggttgtggtaaatcttttaaaaattctctcaaaaagcaatatagtcaatggttacgtgataatgatcatgcatttactcccaaaaagaataagacagctgttgtattgttagagcatgtgcctgcagctggggacacgcttttcagtgtctgcatcacacacacactgaagtgcctccaacaagtatgtggaagggcccatcacgtgccctcgatggcccaggaaggggccagtgctgatggagacacagccccaaggcactcatggtgagtctgctgttctgtgacactggggtgtaggggagggaaaagcaacatgaacctgtaaatgcacaactggctatctgctataatgtgggaattttttaattatgtgcaacaaaattagtaaatgaaatactgtaagtagacaatgtcacctatatctctaaaaactgacacattcaaattggcctgatcacctcttcgaacttccccctttggggtggcccttatccctggactccaggagggaggggtcctggacaggctgcgccaccccctcacccctcctccccacacttacctgaggaacagcccttccaggtggctgcgtggcttcaggagtgaggagtccaggatgcatggcagggggtgacacctgggcagaaacacagtctcacctggatggaccggcgggatggtctgcagggacactgagtacttttccaccagcatcctggcaaggcaaggggcaggagggccgggcatcagcagatgcacctcggcctgaggcatggccattagcccagggaaggatagaggggggccacgggctccctgccttgcagtccttgcggcaaaccaaggggacagcgccacctgctgatggaggaagagcccacctaggcacgcaggagcccttcagtctcccatcaataaggcctatccc

SEQ ID NO: 387703 - DNA, 311 bp, Homo sapiens
ccactgtgccctgcccctgctaatttttgtattttttgtagagatgagttttcaccttattgccctggctgatcttgaactcctggtctcaaatggtcttccctccttggccacccaaagtgctgggattccaggtgtgagccactatgcccagctggagcttaatttttaagacaggcctgccttgttgataaataaggaactacaaattaaaacaaaatgatttgttaatggctcctggggtacagggttctgggagaagttcttcactttctgcttgatacacttttgtagtatttgcattttcatag

SEQ ID NO: 387704 - DNA, 417 bp, Homo sapiens
ctgtgctttggggcaatacttttgtagtattatgttggatggaatgacatgggaaaaggctggcaggagggagaccagatagactctattgtcaaagtaggggaaagatggaaagaggcagtgggaggcaagaagggaacacacctaagaggtggtgtgcgggaattatctgaggagcttgaacagtcactggaaagtgaggaagggaaaagggaggccaaaagatcattgtcaggcttagctgagagagcagttgggtcattttcagaaagaagatataacagaggataaggaagaggagagaagtttctttttgagcatgacaggcttgtccaagttaagggactagaatacagagggaggttagagctaccaggagatttgtaggtcatctgcttaggagcgattttcatatcc

SEQ ID NO: 387705 - DNA, 1151 bp, Homo sapiens
gtatgctgttctagaggatccctcataggttcgaggtcatggtcattgcctgtgatggcatctggaatgtgatgagcagccaggaagttgtagatttcattcaatcaaagatcagccagcgtgatgaaaatggggagcttcggttattgtcatccattgtggaagagctgctggatcagtgcctggcaccagacacttctggggatggtacagggtgtgacaacatgacctgcatcatcatttgcttcaagccccgaaacacagcagagctccagccagagagtggcaagcgaaaactagaggaggtgctctctactgagggggctgaagaaaatggcaacagcgacaagaagaagaaggccaagcgagactagcagtcatccagacccctgcccacctagactgttttctgagccctccggacctgagactgagttttgtctttttcctttagccttagcagtgggtatgaggtgtgcagggggagctgggtggcttcactccgcccattccaaagagggctctccctccacactgcagccgggagcctctgctgtccttcccagccgcctctgctcctcgggctcatcaccggttctgtgcctgtgctctgttgtgttggagggaaggactggcggttctggtttttactctgtgaactttatttaaggacattcttttttattggcggctccatggccctcggccgcttgcacccgctctctgttgtacactttcaatcaacactttttcagactaaaggccaaaacctaatcgtacgcatcgtgtccttttttttctgctgccgtggcccccgacttggtcccatctgtagcatgtggcgagcccccatgtgagtgtgtgcgtgtgctcgtgtgtgtcctgcgcgtgtataggagagcccagagcgagctgctggtaggccggcctggcgggcgtcgcggctgcccctcgccccctcctgcagccagaaatgatctagttcccccagggacaggttgggaccggtctggctggcctgaagcctggagtcgggcaggacgcctcctgcgctgctccctggccggctccccgctgccgctgattggcttgctccccgcctcgtcacaatcacttcccggtcacgccattgaggctcccgccgcggccgc

SEQ ID NO: 387706 - DNA, 495 bp, Homo sapiens
  misc_feature (13)..(13): n is a, c, g, or t
  misc_feature (16)..(18): n is a, c, g, or t
ccccccccccccncannncattaggctaggtacgaggctgggtgtgaatcggccgaggccttgcgtcggtcgcgccgcggggcctgctcctgccgcgcgcacccccggggcttcggctccggcacgggtcgcgcccagctttcctgcacctgaggccgccggccagccgccgccatgggtgcctacctctcccagcccaacacggtgaagtgctccggggacggggtcggcgccccgcgcctgccgctgccctacggcttctccgccatgcaaggctggcgcgtctccatggagatcgcaggagccacaaaaagaaaaacagaacacaaacacaaaaacacaaaccaacaaacaacaacacacaaaaacacaaacaagaagcaaaaaaaaacaccacaaaccacacacacaacaaccacaacaacaccaacacacacacaacaaaaccaccaaacacacaacacaaaaaccacaacaacaaacacaaacaaaaca

SEQ ID NO: 387707 - DNA, 2256 bp, Homo sapiens
aggatccttaattaaattattcttccccccccgcgcttccgctccctcacagctcccgtcccgttaccgcctcctggccggcctcgcgcctttcaccggcaccttgcgtcggtcgcgccgcggggcctgctcctgccgcgcgcacccccggggcttcggctccggcacgggtcgcgcccagctttcctgcacctgaggccgccggccagccgccgccatgggtgcctacctctcccagcccaacacggtgaagtgctccggggacggggtcggcgccccgcgcctgccgctgccctacggcttctccgccatgcaaggctggcgcgtctccatggaggatgctcacaactgtattcctgagctggacagtgagacagccatgttttctgtctacgatggacatggaggggaggaagttgccttgtactgtgccaaatatcttcctgatatcatcaaagatcagaaggcctacaaggaaggcaagctacagaaggctttagaagatgccttcttggctattgacgccaaattgaccactgaagaagtcattaaagagctggcacagattgcagggcgacccactgaggatgaagatgaaaaagaaaaagtagctgatgaagatgatgtggacaatgaggaggctgcactgctgcatgaagaggctaccatgactattgaagagctgctgacacgctacgggcagaactgtcacaagggccctccccacagcaaatctggaggtgggacaggcgaggaaccagggtcccagggcctcaatggggaggcaggacctgaggactcaactagggaaactccttcacaagaaaatggccccacagccaaggcctacacaggcttttcctccaactcggaacgtgggactgaggcaggccaagttggtgagcctggcattcccactggtgaggctgggccttcctgctcttcagcctctgacaagctgcctcgagttgctaagtccaagttctttgaggacagtgaggatgagtcagatgaggcggaggaagaagaggaagacagtgaggaatgcagcgaggaagaggatggctacagcagtgaggaggcagagaatgaggaagatgaggatgacaccgaggaggctgaagaggacgatgaagaagaagaagaagagatgatggtgccagggatggaaggcaaagaggagcctggctctgacagtggtacaacagcggtggtggccctgatacgagggaagcagttgattgtagccaacgcaggagactctcgctgtgtggtatctgaggctggcaaagctttagacatgtcctatgatcacaaaccagaggatgaagtagaactagcacgcatcaagaatgctggtggcaaggtcaccatggatgggcgagtcaacgggggcctcaacctctccagagccattggggaccacttctataagagaaacaagaacctgccacctgaggaacagatgatttcagcccttcctgacatcaaggtgctgactctcactgacgaccatgaattcatggtcattgcctgtgatggcatctggaatgtgatgagcagccaggaagttgtagatttcattcaatcaaagatcagccagcgtgatgaaaatggggagcttcggttattgtcatccattgtggaagagctgctggatcagtgcctggcaccagacacttctggggatggtacagggtgtgacaacatgacctgcatcatcatttgcttcaagccccgaaacacagcagagctccagccagagagtggcaagcgaaaactagaggaggtgctctctactgagggggctgaagaaaatggcaacagcgacaagaagaagaaggccaagcgagactagcagtcatccagacccctgcccacctagactgttttctgagccctccggacctgagactgagttttgtctttttcctttagccttagcagtgggtatgaggtgtgcagggggagctgggtggcttcactccgcccattccaaagagggctctccctccacactgcagccgggagcctctgctgtccttcccagccgcctctgctcctcgggctcatcaccggttctgtgcctgtgctctgttgtgttggagggaaggactggcggttctggtttttactctgtgaactttatttaaggacattcttttttattggcggctccatggccctcggccgcttgcacccgctctctgttgtacactttcaatcaacactttttcagactaaaggccaaaacct

SEQ ID NO: 387708 - DNA, 2233 bp, Homo sapiens
acttaggctcaagtacgaggccgcgtgtttcattcggccgaggactgctcctggccggcctcgcgcctttcaccggcaccttgcgtcggtcgcgccgcggggcctgctcctgccgcgcgcacccccggggcttcggctccggcacgggtcgcgcccagctttcctgcacctgaggccgccggccagccgccgccatgggtgcctacctctcccagcccaacacggtgaagtgctccggggacggggtcggcgccccgcgcctgccgctgccctacggcttctccgccatgcaaggctggcgcgtctccatggaggatgctcacaactgtattcctgagctggacagtgagacagccatgttttctgtctacgatggacatggaggggaggaagttgccttgtactgtgccaaatatcttcctgatatcatcaaagatcagaaggcctacaaggaaggcaagctacagaaggctttagaagatgccttcttggctattgacgccaaattgaccactgaagaagtcattaaagagctggcacagattgcagggcgacccactgaggatgaagatgaaaaagaaaaagtagctgatgaagatgatgtggacaatgaggaggctgcactgctgcatgaagaggctaccatgactattgaagagctgctgacacgctacgggcagaactgtcacaagggccctccccacagcaaatctggaggtgggacaggcgaggaaccagggtcccagggcctcaatggggaggcaggacctgaggactcaactagggaaactccttcacaagaaaatggccccacagccaaggcctacacaggcttttcctccaactcggaacgtgggactgaggcaggccaagttggtgagcctggcattcccactggtgaggctgggccttcctgctcttcagcctctgacaagctgcctcgagttgctaagtccaagttctttgaggacagtgaggatgagtcagatgaggcggaggaagaagaggaagacagtgaggaatgcagcgaggaagaggatggctacagcagtgaggaggcagagaatgaggaagatgaggatgacaccgaggaggctgaagaggacgatgaagaagaagaagaagagatgatggtgccagggatggaaggcaaagaggagcctggctctgacagtggtacaacagcggtggtggccctgatacgagggaagcagttgattgtagccaacgcaggagactctcgctgtgtggtatctgaggctggcaaagctttagacatgtcctatgatcacaaaccagaggatgaagtagaactagcacgcatcaagaatgctggtggcaaggtcaccatggatgggcgagtcaacgggggcctcaacctctccagagccattggggaccacttctataagagaaacaagaacctgccacctgaggaacagatgatttcagcccttcctgacatcaaggtgctgactctcactgacgaccatgaattcatggtcattgcctgtgatggcatctggaatgtgatgagcagccaggaagttgtagatttcattcaatcaaagatcagccagcgtgatgaaaatggggagcttcggttattgtcatccattgtggaagagctgctggatcagtgcctggcaccagacacttctggggatggtacagggtgtgacaacatgacctgcatcatcatttgcttcaagccccgaaacacagcagagctccagccagagagtggcaagcgaaaactagaggaggtgctctctactgagggggctgaagaaaatggcaacagcgacaagaagaagaaggccaagcgagactagcagtcatccagacccctgcccacctagactgttttctgagccctccggacctgagactgagttttgtctttttcctttagccttagcagtgggtatgaggtgtgcagggggagctgggtggcttcactccgcccattccaaagagggctctccctccacactgcagccgggagcctctgctgtccttcccagccgcctctgctcctcgggctcatcaccggttctgtgcctgtgctctgttgtgttggagggaaggactggcggttctggtttttactctgtgaactttatttaaggacattcttttttattggcggctccatggccctcggccgcttgcacccgctctctgttgtacactttcaatcaacactttttcagactaaaggccaaaacct

SEQ ID NO: 387709 - DNA, 2608 bp, Homo sapiens
aggatccttaattaaattattcttccccccccgcgcttccgctccctcacagctcccgtcccgttaccgcctcctggccggcctcgcgcctttcaccggcaccttgcgtcggtcgcgccgcggggcctgctcctgccgcgcgcacccccggggcttcggctccggcacgggtcgcgcccagctttcctgcacctgaggccgccggccagccgccgccatgggtgcctacctctcccagcccaacacggtgaagtgctccggggacggggtcggcgccccgcgcctgccgctgccctacggcttctccgccatgcaaggctggcgcgtctccatggaggatgctcacaactgtattcctgagctggacagtgagacagccatgttttctgtctacgatggacatggaggggaggaagttgccttgtactgtgccaaatatcttcctgatatcatcaaagatcagaaggcctacaaggaaggcaagctacagaaggctttagaagatgccttcttggctattgacgccaaattgaccactgaagaagtcattaaagagctggcacagattgcagggcgacccactgaggatgaagatgaaaaagaaaaagtagctgatgaagatgatgtggacaatgaggaggctgcactgctgcatgaagaggctaccatgactattgaagagctgctgacacgctacgggcagaactgtcacaagggccctccccacagcaaatctggaggtgggacaggcgaggaaccagggtcccagggcctcaatggggaggcaggacctgaggactcaactagggaaactccttcacaagaaaatggccccacagccaaggcctacacaggcttttcctccaactcggaacgtgggactgaggcaggccaagttggtgagcctggcattcccactggtgaggctgggccttcctgctcttcagcctctgacaagctgcctcgagttgctaagtccaagttctttgaggacagtgaggatgagtcagatgaggcggaggaagaagaggaagacagtgaggaatgcagcgaggaagaggatggctacagcagtgaggaggcagagaatgaggaagatgaggatgacaccgaggaggctgaagaggacgatgaagaagaagaagaagagatgatggtgccagggatggaaggcaaagaggagcctggctctgacagtggtacaacagcggtggtggccctgatacgagggaagcagttgattgtagccaacgcaggagactctcgctgtgtgatgtcctatgatcacaaaccagaggatgaagtagaactagcacgcatcaagaatgctggtggcaaggtcaccatggatgggcgagtcaacgggggcctcaacctctccagagccattggggaccacttctataagagaaacaagaacctgccacctgaggaacagatgatttcagcccttcctgacatcaaggtgctgactctcactgacgaccatgaattcatggtcattgcctgtgatggcatctggaatgtgatgagcagccaggaagttgtagatttcattcaatcaaagatcagccagcgtgatgaaaatggggagcttcggttattgtcatccattgtggaagagctgctggatcagtgcctggcaccagacacttctggggatggtacagggtgtgacaacatgacctgcatcatcatttgcttcaagccccgaaacacagcagagctccagccagagagtggcaagcgaaaactagaggaggtgctctctactgagggggctgaagaaaatggcaacagcgacaagaagaagaaggccaagcgagactagcagtcatccagacccctgcccacctagactgttttctgagccctccggacctgagactgagttttgtctttttcctttagccttagcagtgggtatgaggtgtgcagggggagctgggtggcttcactccgcccattccaaagagggctctccctccacactgcagccgggagcctctgctgtccttcccagccgcctctgctcctcgggctcatcaccggttctgtgcctgtgctctgttgtgttggagggaaggactggcggttctggtttttactctgtgaactttatttaaggacattcttttttattggcggctccatggccctcggccgcttgcacccgctctctgttgtacactttcaatcaacactttttcagactaaaggccaaaacctaatcgtacgcatcgtgtccttttttttctgctgccgtggcccccgacttggtcccatctgtagcatgtggcgagcccccatgtgagtgtgtgcgtgtgctcgtgtgtgtcctgcgcgtgtataggagagcccagagcgagctgctggtaggccggcctggcgggcgtcgcggctgcccctcgccccctcctgcagccagaaatgatctagttcccccagggacaggttgggaccggtctggctggcctgaagcctggagtcgggcaggacgcctcctgcgctgctccctggccggctccccgctgccgctgattggcttgctccccgcctcgtcacaatcacttcccggtcacgccattgaggctcccgccgcggccgc

SEQ ID NO: 387710 - DNA, 2213 bp, Homo sapiens
  misc_feature (13)..(13): n is a, c, g, or t
  misc_feature (16)..(18): n is a, c, g, or t
ccccccccccccncannncattaggctaggtacgaggctgggtgtgaatcggccgaggccttgcgtcggtcgcgccgcggggcctgctcctgccgcgcgcacccccggggcttcggctccggcacgggtcgcgcccagctttcctgcacctgaggccgccggccagccgccgccatgggtgcctacctctcccagcccaacacggtgaagtgctccggggacggggtcggcgccccgcgcctgccgctgccctacggcttctccgccatgcaaggctggcgcgtctccatggaggatgctcacaactgtattcctgagctggacagtgagacagccatgttttctgtctacgatggacatggaggggaggaagttgccttgtactgtgccaaatatcttcctgatatcatcaaagatcagaaggcctacaaggaaggcaagctacagaaggctttagaagatgccttcttggctattgacgccaaattgaccactgaagaagtcattaaagagctggcacagattgcagggcgacccactgaggatgaagatgaaaaagaaaaagtagctgatgaagatgatgtggacaatgaggaggctgcactgctgcatgaagaggctaccatgactattgaagagctgctgacacgctacgggcagaactgtcacaagggccctccccacagcaaatctggaggtgggacaggcgaggaaccagggtcccagggcctcaatggggaggcaggacctgaggactcaactagggaaactccttcacaagaaaatggccccacagccaaggcctacacaggcttttcctccaactcggaacgtgggactgaggcaggccaagttggtgagcctggcattcccactggtgaggctgggccttcctgctcttcagcctctgacaagctgcctcgagttgctaagtccaagttctttgaggacagtgaggatgagtcagatgaggcggaggaagaagaggaagacagtgaggaatgcagcgaggaagaggatggctacagcagtgaggaggcagagaatgaggaagatgaggatgacaccgaggaggctgaagaggacgatgaagaagaagaagaagagatgatggtgccagggatggaaggcaaagaggagcctggctctgacagtggtacaacagcggtggtggccctgatacgagggaagcagttgattgtagccaacgcaggagactctcgctgtgtggtatctgaggctggcaaagctttagacatgtcctatgatcacaaaccagaggatgaagtagaactagcacgcatcaagaatgctggtggcaaggtcaccatggatgggcgagtcaacgggggcctcaacctctccagagccattggggaccacttctataagagaaacaagaacctgccacctgaggaacagatgatttcagcccttcctgacatcaaggtgctgactctcactgacgaccatgaattcatggtcattgcctgtgatggcatctggaatgtgatgagcagccaggaagttgtagatttcattcaatcaaagatcagccagcgtgatgaaaatggggagcttcggttattgtcatccattgtggaagagctgctggatcagtgcctggcaccagacacttctggggatggtacagggtgtgacaacatgacctgcatcatcatttgcttcaagccccgaaacacagcagagctccagccagagagtggcaagcgaaaactagaggaggtgctctctactgagggggctgaagaaaatggcaacagcgacaagaagaagaaggccaagcgagactagcagtcatccagacccctgcccacctagactgttttctgagccctccggacctgagactgagttttgtctttttcctttagccttagcagtgggtatgaggtgtgcagggggagctgggtggcttcactccgcccattccaaagagggctctccctccacactgcagccgggagcctctgctgtccttcccagccgcctctgctcctcgggctcatcaccggttctgtgcctgtgctctgttgtgttggagggaaggactggcggttctggtttttactctgtgaactttatttaaggacattcttttttattggcggctccatggccctcggccgcttgcacccgctctctgttgtacactttcaatcaacactttttcagactaaaggccaaaacct

SEQ ID NO: 387711 - DNA, 2208 bp, Homo sapiens
aattatcgggctcgggtttgttgctgttcctgtgcgttggcgtcaatttcacaccttgcgtcggtcgcgccgcggggcctgctcctgccgcgcgcacccccggggcttcggctccggcacgggtcgcgcccagctttcctgcacctgaggccgccggccagccgccgccatgggtgcctacctctcccagcccaacacggtgaagtgctccggggacggggtcggcgccccgcgcctgccgctgccctacggcttctccgccatgcaaggctggcgcgtctccatggaggatgctcacaactgtattcctgagctggacagtgagacagccatgttttctgtctacgatggacatggaggggaggaagttgccttgtactgtgccaaatatcttcctgatatcatcaaagatcagaaggcctacaaggaaggcaagctacagaaggctttagaagatgccttcttggctattgacgccaaattgaccactgaagaagtcattaaagagctggcacagattgcagggcgacccactgaggatgaagatgaaaaagaaaaagtagctgatgaagatgatgtggacaatgaggaggctgcactgctgcatgaagaggctaccatgactattgaagagctgctgacacgctacgggcagaactgtcacaagggccctccccacagcaaatctggaggtgggacaggcgaggaaccagggtcccagggcctcaatggggaggcaggacctgaggactcaactagggaaactccttcacaagaaaatggccccacagccaaggcctacacaggcttttcctccaactcggaacgtgggactgaggcaggccaagttggtgagcctggcattcccactggtgaggctgggccttcctgctcttcagcctctgacaagctgcctcgagttgctaagtccaagttctttgaggacagtgaggatgagtcagatgaggcggaggaagaagaggaagacagtgaggaatgcagcgaggaagaggatggctacagcagtgaggaggcagagaatgaggaagatgaggatgacaccgaggaggctgaagaggacgatgaagaagaagaagaagagatgatggtgccagggatggaaggcaaagaggagcctggctctgacagtggtacaacagcggtggtggccctgatacgagggaagcagttgattgtagccaacgcaggagactctcgctgtgtggtatctgaggctggcaaagctttagacatgtcctatgatcacaaaccagaggatgaagtagaactagcacgcatcaagaatgctggtggcaaggtcaccatggatgggcgagtcaacgggggcctcaacctctccagagccattggggaccacttctataagagaaacaagaacctgccacctgaggaacagatgatttcagcccttcctgacatcaaggtgctgactctcactgacgaccatgaattcatggtcattgcctgtgatggcatctggaatgtgatgagcagccaggaagttgtagatttcattcaatcaaagatcagccagcgtgatgaaaatggggagcttcggttattgtcatccattgtggaagagctgctggatcagtgcctggcaccagacacttctggggatggtacagggtgtgacaacatgacctgcatcatcatttgcttcaagccccgaaacacagcagagctccagccagagagtggcaagcgaaaactagaggaggtgctctctactgagggggctgaagaaaatggcaacagcgacaagaagaagaaggccaagcgagactagcagtcatccagacccctgcccacctagactgttttctgagccctccggacctgagactgagttttgtctttttcctttagccttagcagtgggtatgaggtgtgcagggggagctgggtggcttcactccgcccattccaaagagggctctccctccacactgcagccgggagcctctgctgtccttcccagccgcctctgctcctcgggctcatcaccggttctgtgcctgtgctctgttgtgttggagggaaggactggcggttctggtttttactctgtgaactttatttaaggacattcttttttattggcggctccatggccctcggccgcttgcacccgctctctgttgtacactttcaatcaacactttttcagactaaaggccaaaacct

SEQ ID NO: 387712 - DNA, 2184 bp, Homo sapiens
ggccgtggttaatcggccgaggaaggaaggcaagctacagaaggctttagaagatgccttcttggctattgacgccaaattgaccactgaagaagtcattaaagagctggcacagattgcagggcgacccactgaggatgaagatgaaaaagaaaaagtagctgatgaagatgatgtggacaatgaggaggctgcactgctgcatgaagaggctaccatgactattgaagagctgctgacacgctacgggcagaactgtcacaagggccctccccacagcaaatctggaggtgggacaggcgaggaaccaggtcccagggcctcaatggggaggcaggacctgaggactcaactagggaaactccttcacaagaaaatggccccacagccaaggcctacacaggcttttcctccaactcggaacgtgggactgaggcaggccaagttggtgagcctggcattcccactggtgaggctgggccttcctgctcttcagcctctgacaagctgcctcgagttgctaagtccaagttctttgaggacagtgaggatgagtcagatgaggcggaggaagaagaggaagacagtgaggaatgcagcgaggaagaggatggctacagcagtgaggaggcagagaatgaggaagatgaggatgacaccgaggaggctgaagaggacgatgaagaagaagaagaagagatgatggtgccagggatggaaggcaaagaggagcctggctctgacagtggtacaacagcggtggtggccctgatacgagggaagcagttgattgtagccaacgcaggagactctcgctgtgtggtatctgaggctggcaaagctttagacatgtcctatgatcacaaaccagaggatgaagtagaactagcacgcatcaagaatgctggtggcaaggtcaccatggatgggcgagtcaacgggggcctcaacctctccagagccattggggaccacttctataagagaaacaagaacctgccacctgaggaacagatgatttcagcccttcctgacatcaaggtgctgactctcactgacgaccatgaattcatggtcattgcctgtgatggcatctggaatgtgatgagcagccaggaagttgtagatttcattcaatcaaagatcagccagcgtgatgaaaatggggagcttcggttattgtcatccattgtggaagagctgctggatcagtgcctggcaccagacacttctggggatggtacagggtgtgacaacatgacctgcatcatcatttgcttcaagccccgaaacacagcagagctccagccagagagtggcaagcgaaaactagaggaggtgctctctactgagggggctgaagaaaatggcaacagcgacaagaagaagaaggccaagcgagactagcagtcatccagacccctgcccacctagactgttttctgagccctccggacctgagactgagttttgtctttttcctttagccttagcagtgggtatgaggtgtgcagggggagctgggtggcttcactccgcccattccaaagagggctctccctccacactgcagccgggagcctctgctgtccttcccagccgcctctgctcctcgggctcatcaccggttctgtgcctgtgctctgttgtgttggagggaaggactggcggttctggtttttactctgtgaactttatttaaggacattcttttttattggcggctccatggccctcggccgcttgcacccgctctctgttgtacactttcaatcaacactttttcagactaaaggccaaaacctaatcgtacgcatcgtgtccttttttttctgctgccgtggcccccgacttggtcccatctgtagcatgtggcgagcccccatgtgagtgtgtgcgtgtgctcgtgtgtgtcctgcgcgtgtataggagagcccagagcgagctgctggtaggccggcctggcgggcgtcgcggctgcccctcgccccctcctgcagccagaaatgatctagttcccccagggacaggttgggaccggtctggctggcctgaagcctggagtcgggcaggacgcctcctgcgctgctccctggccggctccccgctgccgctgattggcttgctccccgcctcgtcacaatcacttcccggtcacgccattgaggctcccgccgcggccgc

SEQ ID NO: 387713 - DNA, 2564 bp, Homo sapiens
aggatccttaattaaattattcttccccccccgcgcttccgctccctcacagctcccgtcccgttaccgcctcctggccggcctcgcgcctttcaccggcaccttgcgtcggtcgcgccgcggggcctgctcctgccgcgcgcacccccggggcttcggctccggcacgggtcgcgcccagctttcctgcacctgaggccgccggccagccgccgccatgggtgcctacctctcccagcccaacacggtgaagtgctccggggacggggtcggcgccccgcgcctgccgctgccctacggcttctccgccatgcaaggctggcgcgtctccatggaggggaggaagttgccttgtactgtgccaaatatcttcctgatatcatcaaagatcagaaggcctacaaggaaggcaagctacagaaggctttagaagatgccttcttggctattgacgccaaattgaccactgaagaagtcattaaagagctggcacagattgcagggcgacccactgaggatgaagatgaaaaagaaaaagtagctgatgaagatgatgtggacaatgaggaggctgcactgctgcatgaagaggctaccatgactattgaagagctgctgacacgctacgggcagaactgtcacaagggccctccccacagcaaatctggaggtgggacaggcgaggaaccaggtcccagggcctcaatggggaggcaggacctgaggactcaactagggaaactccttcacaagaaaatggccccacagccaaggcctacacaggcttttcctccaactcggaacgtgggactgaggcaggccaagttggtgagcctggcattcccactggtgaggctgggccttcctgctcttcagcctctgacaagctgcctcgagttgctaagtccaagttctttgaggacagtgaggatgagtcagatgaggcggaggaagaagaggaagacagtgaggaatgcagcgaggaagaggatggctacagcagtgaggaggcagagaatgaggaagatgaggatgacaccgaggaggctgaagaggacgatgaagaagaagaagaagagatgatggtgccagggatggaaggcaaagaggagcctggctctgacagtggtacaacagcggtggtggccctgatacgagggaagcagttgattgtagccaacgcaggagactctcgctgtgtggtatctgaggctggcaaagctttagacatgtcctatgatcacaaaccagaggatgaagtagaactagcacgcatcaagaatgctggtggcaaggtcaccatggatgggcgagtcaacgggggcctcaacctctccagagccattggggaccacttctataagagaaacaagaacctgccacctgaggaacagatgatttcagcccttcctgacatcaaggtgctgactctcactgacgaccatgaattcatggtcattgcctgtgatggcatctggaatgtgatgagcagccaggaagttgtagatttcattcaatcaaagatcagccagcgtgatgaaaatggggagcttcggttattgtcatccattgtggaagagctgctggatcagtgcctggcaccagacacttctggggatggtacagggtgtgacaacatgacctgcatcatcatttgcttcaagccccgaaacacagcagagctccagccagagagtggcaagcgaaaactagaggaggtgctctctactgagggggctgaagaaaatggcaacagcgacaagaagaagaaggccaagcgagactagcagtcatccagacccctgcccacctagactgttttctgagccctccggacctgagactgagttttgtctttttcctttagccttagcagtgggtatgaggtgtgcagggggagctgggtggcttcactccgcccattccaaagagggctctccctccacactgcagccgggagcctctgctgtccttcccagccgcctctgctcctcgggctcatcaccggttctgtgcctgtgctctgttgtgttggagggaaggactggcggttctggtttttactctgtgaactttatttaaggacattcttttttattggcggctccatggccctcggccgcttgcacccgctctctgttgtacactttcaatcaacactttttcagactaaaggccaaaacctaatcgtacgcatcgtgtccttttttttctgctgccgtggcccccgacttggtcccatctgtagcatgtggcgagcccccatgtgagtgtgtgcgtgtgctcgtgtgtgtcctgcgcgtgtataggagagcccagagcgagctgctggtaggccggcctggcgggcgtcgcggctgcccctcgccccctcctgcagccagaaatgatctagttcccccagggacaggttgggaccggtctggctggcctgaagcctggagtcgggcaggacgcctcctgcgctgctccctggccggctccccgctgccgctgattggcttgctccccgcctcgtcacaatcacttcccggtcacgccattgaggctcccgccgcggccgc

SEQ ID NO: 387714 - DNA, 2440 bp, Homo sapiens
ttttatatgaaaggttccatttgtgtttctgtataaaggcttttatcctgtaaggaaaaaaaaaaaacacaaaaccctagaacataataaatgccggttttctacaaaaacaatggtctaactctggggtgggactgatctcttctcaacagcccagggcagggctgggtccctcattcacctggtgtccacagggccgaagacactgcacacactaggacaggatttggattggaatttaaatcctgccacccaccaaggagacctcgcccacgcgtccgtatggaatgggatcaatggctttagaagatgccttcttggctattgacgccaaattgaccactgaagaagtcattaaagagctggcacagattgcagggcgacccactgaggatgaagatgaaaaagaaaaagtagctgatgaagatgatgtggacaatgaggaggctgcactgctgcatgaagaggctaccatgactattgaagagctgctgacacgctacgggcagaactgtcacaagggccctccccacagcaaatctggaggtgggacaggcgaggaaccaggtcccagggcctcaatggggaggcaggacctgaggactcaactagggaaactccttcacaagaaaatggccccacagccaaggcctacacaggcttttcctccaactcggaacgtgggactgaggcaggccaagttggtgagcctggcattcccactggtgaggctgggccttcctgctcttcagcctctgacaagctgcctcgagttgctaagtccaagttctttgaggacagtgaggatgagtcagatgaggcggaggaagaagaggaagacagtgaggaatgcagcgaggaagaggatggctacagcagtgaggaggcagagaatgaggaagatgaggatgacaccgaggaggctgaagaggacgatgaagaagaagaagaagagatgatggtgccagggatggaaggcaaagaggagcctggctctgacagtggtacaacagcggtggtggccctgatacgagggaagcagttgattgtagccaacgcaggagactctcgctgtgtggtatctgaggctggcaaagctttagacatgtcctatgatcacaaaccagaggatgaagtagaactagcacgcatcaagaatgctggtggcaaggtcaccatggatgggcgagtcaacgggggcctcaacctctccagagccattggggaccacttctataagagaaacaagaacctgccacctgaggaacagatgatttcagcccttcctgacatcaaggtgctgactctcactgacgaccatgaattcatggtcattgcctgtgatggcatctggaatgtgatgagcagccaggaagttgtagatttcattcaatcaaagatcagccagcgtgatgaaaatggggagcttcggttattgtcatccattgtggaagagctgctggatcagtgcctggcaccagacacttctggggatggtacagggtgtgacaacatgacctgcatcatcatttgcttcaagccccgaaacacagcagagctccagccagagagtggcaagcgaaaactagaggaggtgctctctactgagggggctgaagaaaatggcaacagcgacaagaagaagaaggccaagcgagactagcagtcatccagacccctgcccacctagactgttttctgagccctccggacctgagactgagttttgtctttttcctttagccttagcagtgggtatgaggtgtgcagggggagctgggtggcttcactccgcccattccaaagagggctctccctccacactgcagccgggagcctctgctgtccttcccagccgcctctgctcctcgggctcatcaccggttctgtgcctgtgctctgttgtgttggagggaaggactggcggttctggtttttactctgtgaactttatttaaggacattcttttttattggcggctccatggccctcggccgcttgcacccgctctctgttgtacactttcaatcaacactttttcagactaaaggccaaaacctaatcgtacgcatcgtgtccttttttttctgctgccgtggcccccgacttggtcccatctgtagcatgtggcgagcccccatgtgagtgtgtgcgtgtgctcgtgtgtgtcctgcgcgtgtataggagagcccagagcgagctgctggtaggccggcctggcgggcgtcgcggctgcccctcgccccctcctgcagccagaaatgatctagttcccccagggacaggttgggaccggtctggctggcctgaagcctggagtcgggcaggacgcctcctgcgctgctccctggccggctccccgctgccgctgattggcttgctccccgcctcgtcacaatcacttcccggtcacgccattgaggctcccgccgcggccgc

SEQ ID NO: 387715 - DNA, 2434 bp, Homo sapiens
aggatccttaattaaattattcttccccccccgcgcttccgctccctcacagctcccgtcccgttaccgcctcctggccggcctcgcgcctttcaccggcaccttgcgtcggtcgcgccgcggggcctgctcctgccgcgcgcacccccggggcttcggctccggcacgggtcgcgcccagctttcctgcacctgaggccgccggccagccgccgccatgggtgcctacctctcccagcccaacacggtgaagtgctccggggacggggtcggcgccccgcgcctgccgctgccctacggcttctccgccatgcaaggctggcgcgtctccatggaggatgctcacaactgtattcctgagctggacagtgagacagccatgttttctgtctacgatggacatggaggggaggaagttgccttgtactgtgccaaatatcttcctgatatcatcaaagatcagaaggcctacaaggaaggcaagctacagaaggctttagaagatgccttcttggctattgacgccaaattgaccactgaagaagtcattaaagagctggcacagattgcagggcgacccactgaggatgaagatgaaaaagaaaaagtagctgatgaagatgatgtggacaatgaggaggctgcactgctgcatgaagaggctaccatgactattgaagagctgctgacacgctacgggcagaactgtcacaagggccctccccacagcaaatctggagcttcagcctctgacaagctgcctcgagttgctaagtccaagttctttgaggacagtgaggatgagtcagatgaggcggaggaagaagaggaagacagtgaggaatgcagcgaggaagaggatggctacagcagtgaggaggcagagaatgaggaagatgaggatgacaccgaggaggctgaagaggacgatgaagaagaagaagaagagatgatggtgccagggatggaaggcaaagaggagcctggctctgacagtggtacaacagcggtggtggccctgatacgagggaagcagttgattgtagccaacgcaggagactctcgctgtgtggtatctgaggctggcaaagctttagacatgtcctatgatcacaaaccagaggatgaagtagaactagcacgcatcaagaatgctggtggcaaggtcaccatggatgggcgagtcaacgggggcctcaacctctccagagccattggggaccacttctataagagaaacaagaacctgccacctgaggaacagatgatttcagcccttcctgacatcaaggtgctgactctcactgacgaccatgaattcatggtcattgcctgtgatggcatctggaatgtgatgagcagccaggaagttgtagatttcattcaatcaaagatcagccagcgtgatgaaaatggggagcttcggttattgtcatccattgtggaagagctgctggatcagtgcctggcaccagacacttctggggatggtacagggtgtgacaacatgacctgcatcatcatttgcttcaagccccgaaacacagcagagctccagccagagagtggcaagcgaaaactagaggaggtgctctctactgagggggctgaagaaaatggcaacagcgacaagaagaagaaggccaagcgagactagcagtcatccagacccctgcccacctagactgttttctgagccctccggacctgagactgagttttgtctttttcctttagccttagcagtgggtatgaggtgtgcagggggagctgggtggcttcactccgcccattccaaagagggctctccctccacactgcagccgggagcctctgctgtccttcccagccgcctctgctcctcgggctcatcaccggttctgtgcctgtgctctgttgtgttggagggaaggactggcggttctggtttttactctgtgaactttatttaaggacattcttttttattggcggctccatggccctcggccgcttgcacccgctctctgttgtacactttcaatcaacactttttcagactaaaggccaaaacctaatcgtacgcatcgtgtccttttttttctgctgccgtggcccccgacttggtcccatctgtagcatgtggcgagcccccatgtgagtgtgtgcgtgtgctcgtgtgtgtcctgcgcgtgtataggagagcccagagcgagctgctggtaggccggcctggcgggcgtcgcggctgcccctcgccccctcctgcagccagaaatgatctagttcccccagggacaggttgggaccggtctggctggcctgaagcctggagtcgggcaggacgcctcctgcgctgctccctggccggctccccgctgccgctgattggcttgctccccgcctcgtcacaatcacttcccggtcacgccattgaggctcccgccgcggccgc

SEQ ID NO: 387716 - DNA, 3093 bp, Homo sapiens
aggatccttaattaaattattcttccccccccgcgcttccgctccctcacagctcccgtcccgttaccgcctcctggccggcctcgcgcctttcaccggcaccttgcgtcggtcgcgccgcggggcctgctcctgccgcgcgcacccccggggcttcggctccggcacgggtcgcgcccagctttcctgcacctgaggccgccggccagccgccgccatgggtgcctacctctcccagcccaacacggtgaagtgctccggggacggggtcggcgccccgcgcctgccgctgccctacggcttctccgccatgcaaggctggcgcgtctccatggaggctttagaagatgccttcttggctattgacgccaaattgaccactgaagaagtcattaaagagctggcacagattgcagggcgacccactgaggatgaagatgaaaaagaaaaagtagctgatgaagatgatgtggacaatgaggaggctgcactgctgcatgaagaggctaccatgactattgaagagctgctgacacgctacgggcagaactgtcacaagggccctccccacagcaaatctggaggtgggacaggcgaggaaccaggtcccagggcctcaatggggaggcaggacctgaggactcaactagggaaactccttcacaagaaaatggccccacagccaaggcctacacaggcttttccttgaagtgctccggggacggggtcggcgccccgcgcctgccgctgccctacggcttctccgccatgcaaggctggcgcgtctccatggaggatgctcacaactgtattcctgagctggacagtgagacagccatgttttctgtctacgatggacatggaggggaggaagttgccttgtactgtgccaaatatcttcctgatatcatcaaagatcagaaggcctacaaggaaggcaagctacagaaggctttagaagatgccttcttggctattgacgccaaattgaccactgaagaagtcattaaagagctggcacagattgcagggcgacccactgaggatgaagatgaaaaagaaaaagtagctgatgaagatgatgtggacaatgaggaggctgcactgctgcatgaagaggctaccatgactattgaagagctgctgacacgctacgggcagaactgtcacaagggccctccccacagcaaatctggaggtgggacaggcgaggaaccagggtcccagggcctcaatggggaggcaggacctgaggactcaactagggaaactccttcacaagaaaatggccccacagccaaggcctacacaggcttttcctccaactcggaacgtgggactgaggcaggccaagttggtgagcctggcattcccactggtgaggctgggccttcctgctcttcagcctctgacaagctgcctcgagttgctaagtccaagttctttgaggacagtgaggatgagtcagatgaggcggaggaagaagaggaagacagtgaggaatgcagcgaggaagaggatggctacagcagtgaggaggcagagaatgaggaagatgaggatgacaccgaggaggctgaagaggacgatgaagaagaagaagaagagatgatggtgccagggatggaaggcaaagaggagcctggctctgacagtggtacaacagcggtggtggccctgatacgagggaagcagttgattgtagccaacgcaggagactctcgctgtgtggtatctgaggctggcaaagctttagacatgtcctatgatcacaaaccagaggatgaagtagaactagcacgcatcaagaatgctggtggcaaggtcaccatggatgggcgagtcaacgggggcctcaacctctccagagccattggggaccacttctataagagaaacaagaacctgccacctgaggaacagatgatttcagcccttcctgacatcaaggtgctgactctcactgacgaccatgaattcatggtcattgcctgtgatggcatctggaatgtgatgagcagccaggaagttgtagatttcattcaatcaaagatcagccagcgtgatgaaaatggggagcttcggttattgtcatccattgtggaagagctgctggatcagtgcctggcaccagacacttctggggatggtacagggtgtgacaacatgacctgcatcatcatttgcttcaagccccgaaacacagcagagctccagccagagagtggcaagcgaaaactagaggaggtgctctctactgagggggctgaagaaaatggcaacagcgacaagaagaagaaggccaagcgagactagcagtcatccagacccctgcccacctagactgttttctgagccctccggacctgagactgagttttgtctttttcctttagccttagcagtgggtatgaggtgtgcagggggagctgggtggcttcactccgcccattccaaagagggctctccctccacactgcagccgggagcctctgctgtccttcccagccgcctctgctcctcgggctcatcaccggttctgtgcctgtgctctgttgtgttggagggaaggactggcggttctggtttttactctgtgaactttatttaaggacattcttttttattggcggctccatggccctcggccgcttgcacccgctctctgttgtacactttcaatcaacactttttcagactaaaggccaaaacctaatcgtacgcatcgtgtccttttttttctgctgccgtggcccccgacttggtcccatctgtagcatgtggcgagcccccatgtgagtgtgtgcgtgtgctcgtgtgtgtcctgcgcgtgtataggagagcccagagcgagctgctggtaggccggcctggcgggcgtcgcggctgcccctcgccccctcctgcagccagaaatgatctagttcccccagggacaggttgggaccggtctggctggcctgaagcctggagtcgggcaggacgcctcctgcgctgctccctggccggctccccgctgccgctgattggcttgctccccgcctcgtcacaatcacttcccggtcacgccattgaggctcccgccgcggccgc

SEQ ID NO: 387717 - DNA, 1598 bp, Homo sapiens
  misc_feature (1551)..(1552): n is a, c, g, or t
  misc_feature (1556)..(1556): n is a, c, g, or t
  misc_feature (1562)..(1562): n is a, c, g, or t
  misc_feature (1564)..(1564): n is a, c, g, or t
aggatccttaattaaattattcttccccccccgcgcttccgctccctcacagctcccgtcccgttaccgcctcctggccggcctcgcgcctttcaccggcaccttgcgtcggtcgcgccgcggggcctgctcctgccgcgcgcacccccggggcttcggctccggcacgggtcgcgcccagctttcctgcacctgaggccgccggccagccgccgccatgggtgcctacctctcccagcccaacacggtgaagtgctccggggacggggtcggcgccccgcgcctgccgctgccctacggcttctccgccatgcaaggctggcgcgtctccatggaggatgctcacaactgtattcctgagctggacagtgagacagccatgttttctgtctacgatggacatggaggggaggaagttgccttgtactgtgccaaatatcttcctgatatcatcaaagatcagaaggcctacaaggaaggcaagctacagaaggctttagaagatgccttcttggctattgacgccaaattgaccactgaagaagtcattaaagagctggcacagattgcagggcgacccactgaggatgaagatgaaaaagaaaaagtagctgatgaagatgatgtggacaatgaggaggctgcactgctgcatgaagaggctaccatgactattgaagagctgctgacacgctacgggcagaactgtcacaagggccctccccacagcaaatctggaggtgggacaggcgaggaaccagggtcccagggcctcaatggggaggcaggacctgaggactcaactagggaaactccttcacaagaaaatggccccacagccaaggcctacacaggcttttcctccaactcggaacgtgggactgaggcaggccaagttggtgagcctggcattcccactggtgaggctgggccttcctgctcttcagcctctgacaagctgcctcgagttgctaagtccaagttctttgaggacagtgaggatgagtcagatgaggcggaggaagaagaggaagacagtgaggaatgcagcgaggaagaggatggctacagcagtgaggaggcagagaatgaggaagatgaggatgacaccgaggaggctgaagaggacgatgaagaagaagaagaagagatgatggtgccagggatggaaggcaaagaggagcctggctctgacagtggtacaacagcggtggtggccctgatacgagggaagcagttgattgtagccaacgcaggagactctcgctgtgtggtatctgaggctggcaaagctttagacatgtcctatgatcacaaaccagaggatgaagtagaactagcacgcatcaagaatgctggtggcaaggtcaccatggatgggcgagtcaacgggggcctcaacctctccagagccattggggaccacttctataagagaaacaagaacctgccacctgaggaacagatgatttcagcccttcctgacatcaaggtgctgactctcactgacgaccatgaattcatggtcattgcctgtgatggcatctgganntgtnagcgcngnagttgtgattcctccataagatcgcggggtgaag

SEQ ID NO: 387718 - DNA, 1842 bp, Homo sapiens
  misc_feature (1842)..(1842): n is a, c, g, or t
aggatccttaattaaattattcttccccccccgcgcttccgctccctcacagctcccgtcccgttaccgcctcctggccggcctcgcgcctttcaccggcaccttgcgtcggtcgcgccgcggggcctgctcctgccgcgcgcacccccggggcttcggctccggcacgggtcgcgcccagctttcctgcacctgaggccgccggccagccgccgccatgggtgcctacctctcccagcccaacacggtgaagtgctccggggacggggtcggcgccccgcgcctgccgctgccctacggcttctccgccatgcaaggctggcgcgtctccatggaggatgctcacaactgtattcctgagctggacagtgagacagccatgttttctgtctacgatggacatggaggggaggaagttgccttgtactgtgccaaatatcttcctgatatcatcaaagatcagaaggcctacaaggaaggcaagctacagaaggctttagaagatgccttcttggctattgacgccaaattgaccactgaagaagtcattaaagagctggcacagattgcagggcgacccactgaggatgaagatgaaaaagaaaaagtagctgatgaagatgatgtggacaatgaggaggctgcactgctgcatgaagaggctaccatgactattgaagagctgctgacacgctacgggcagaactgtcacaagggccctccccacagcaaatctggaggtgggacaggcgaggaaccagggtcccagggcctcaatggggaggcaggacctgaggactcaactagggaaactccttcacaagaaaatggccccacagccaaggcctacacaggcttttcctccaactcggaacgtgggactgaggcaggccaagttggtgagcctggcattcccactggtgaggctgggccttcctgctcttcagcctctgacaagctgcctcgagttgctaagtccaagttctttgaggacagtgaggatgagtcagatgaggcggaggaagaagaggaagacagtgaggaatgcagcgaggaagaggatggctacagcagtgaggaggcagagaatgaggaagatgaggatgacaccgaggaggctgaagaggacgatgaagaagaagaagaagagatgatggtgccagggatggaaggcaaagaggagcctggctctgacagtggtacaacagcggtggtggccctgatacgagggaagcagttgattgtagccaacgcaggagactctcgctgtgtggtatctgaggctggcaaagctttagacatgtcctatgatcacaaaccagaggatgaagtagaactagcacgcatcaagaatgctggtggcaaggtcaccatggatgggcgagtcaacgggggcctcaacctctccagagccattggggaccacttctataagagaaacaagaacctgccacctgaggaacagatgatttcagcccttcctgacatcaaggtgctgactctcactgacgaccatgaattcatggtcattgcctgtgatggcatctggaatgtgatgagcagccaggaagttgtcactctccttccgaccaagaatatccaccggtcagacaacggggactcgggtcaatggcaccctgggggaagagcgtggcatatgtcggtccacaacttcgcatgctaggggtgtatccatcacgtcacatgttagtcccagacaacgatggcgcaagatagagcacacagtgctacgatgggtgtgaagagacaaagcaagaacagcgaacccctgtaactgaattcgtttagtgatcccttcccggtctcgcgcccgtctactgn

SEQ ID NO: 387719 - DNA, 2560 bp, Homo sapiens
aggatccttaattaaattattcttccccccccgcgcttccgctccctcacagctcccgtcccgttaccgcctcctggccggcctcgcgcctttcaccggcaccttgcgtcggtcgcgccgcggggcctgctcctgccgcgcgcacccccggggcttcggctccggcacgggtcgcgcccagctttcctgcacctgaggccgccggccagccgccgccatgggtgcctacctctcccagcccaacacggtgaagtgctccggggacggggtcggcgccccgcgcctgccgctgccctacggcttctccgccatgcaaggctggcgcgtctccatggaggatgctcacaactgtattcctgagctggacagtgagacagccatgttttctgtctacgatggacatggaggggaggaagttgccttgtactgtgccaaatatcttcctgatatcatcaaagatcagaaggcctacaaggaaggcaagctacagaaggctttagaagatgccttcttggctattgacgccaaattgaccactgaagaagtcattaaagagctggcacagattgcagggcgacccactgaggctaccatgactattgaagagctgctgacacgctacgggcagaactgtcacaagggccctccccacagcaaatctggaggtgggacaggcgaggaaccagggtcccagggcctcaatggggaggcaggacctgaggactcaactagggaaactccttcacaagaaaatggccccacagccaaggcctacacaggcttttcctccaactcggaacgtgggactgaggcaggccaagttggtgagcctggcattcccactggtgaggctgggccttcctgctcttcagcctctgacaagctgcctcgagttgctaagtccaagttctttgaggacagtgaggatgagtcagatgaggcggaggaagaagaggaagacagtgaggaatgcagcgaggaagaggatggctacagcagtgaggaggcagagaatgaggaagatgaggatgacaccgaggaggctgaagaggacgatgaagaagaagaagaagagatgatggtgccagggatggaaggcaaagaggagcctggctctgacagtggtacaacagcggtggtggccctgatacgagggaagcagttgattgtagccaacgcaggagactctcgctgtgtggtatctgaggctggcaaagctttagacatgtcctatgatcacaaaccagaggatgaagtagaactagcacgcatcaagaatgctggtggcaaggtcaccatggatgggcgagtcaacgggggcctcaacctctccagagccattggggaccacttctataagagaaacaagaacctgccacctgaggaacagatgatttcagcccttcctgacatcaaggtgctgactctcactgacgaccatgaattcatggtcattgcctgtgatggcatctggaatgtgatgagcagccaggaagttgtagatttcattcaatcaaagatcagccagcgtgatgaaaatggggagcttcggttattgtcatccattgtggaagagctgctggatcagtgcctggcaccagacacttctggggatggtacagggtgtgacaacatgacctgcatcatcatttgcttcaagccccgaaacacagcagagctccagccagagagtggcaagcgaaaactagaggaggtgctctctactgagggggctgaagaaaatggcaacagcgacaagaagaagaaggccaagcgagactagcagtcatccagacccctgcccacctagactgttttctgagccctccggacctgagactgagttttgtctttttcctttagccttagcagtgggtatgaggtgtgcagggggagctgggtggcttcactccgcccattccaaagagggctctccctccacactgcagccgggagcctctgctgtccttcccagccgcctctgctcctcgggctcatcaccggttctgtgcctgtgctctgttgtgttggagggaaggactggcggttctggtttttactctgtgaactttatttaaggacattcttttttattggcggctccatggccctcggccgcttgcacccgctctctgttgtacactttcaatcaacactttttcagactaaaggccaaaacctaatcgtacgcatcgtgtccttttttttctgctgccgtggcccccgacttggtcccatctgtagcatgtggcgagcccccatgtgagtgtgtgcgtgtgctcgtgtgtgtcctgcgcgtgtataggagagcccagagcgagctgctggtaggccggcctggcgggcgtcgcggctgcccctcgccccctcctgcagccagaaatgatctagttcccccagggacaggttgggaccggtctggctggcctgaagcctggagtcgggcaggacgcctcctgcgctgctccctggccggctccccgctgccgctgattggcttgctccccgcctcgtcacaatcacttcccggtcacgccattgaggctcccgccgcggccgc

SEQ ID NO: 387720 - DNA, 2873 bp, Homo sapiens
aggatccttaattaaattattcttccccccccgcgcttccgctccctcacagctcccgtcccgttaccgcctcctggccggcctcgcgcctttcaccggcaccttgcgtcggtcgcgccgcggggcctgctcctgccgcgcgcacccccggggcttcggctccggcacgggtcgcgcccagctttcctgcacctgaggccgccggccagccgccgccatgggtgcctacctctcccagcccaacacggtgaagtgctccggggacggggtcggcgccccgcgcctgccgctgccctacggcttctccgccatgcaaggctggcgcgtctccatggaggctttagaagatgccttcttggctattgacgccaaattgaccactgaagaagtcattaaagagctggcacagattgcagggcgacccactgaggatgaagatgaaaaagaaaaagtagctgatgaagatgatgtggacaatgaggaggctgcactgctgcatgaagaggctaccatgactattgaagagctgctgacacgctacgggcagaactgtcacaagggccctccccacagcaaatctggaggtgggacaggcgaggaaccaggtcccagggcctcaatggggaggcaggacctgaggactcaactagggaaactccttcacaagaaaatggccccacagccaaggcctacacaggcttttcctgatgctcacaactgtattcctgagctggacagtgagacagccatgttttctgtctacgatggacatggaggggaggaagttgccttgtactgtgccaaatatcttcctgatatcatcaaagatcagaaggcctacaaggaaggcaagctacagaaggctttagaagatgccttcttggctattgacgccaaattgaccactgaagaagtcattaaagagctggcacagattgcagggcgacccactgaggatgaagatgaaaaagaaaaagtagctgatgaagatgatgtggacaatgaggaggctgcactgctgcatgaagaggctaccatgactattgaagagctgctgacacgctacgggcagaactgtcacaagggccctccccacagcaaatctggaggtgggacaggcgaggaaccagggtcccagggcctcaatggggaggcaggacctgaggactcaactagggacttcagcctctgacaagctgcctcgagttgctaagtccaagttctttgaggacagtgaggatgagtcagatgaggcggaggaagaagaggaagacagtgaggaatgcagcgaggaagaggatggctacagcagtgaggaggcagagaatgaggaagatgaggatgacaccgaggaggctgaagaggacgatgaagaagaagaagaagagatgatggtgccagggatggaaggcaaagaggagcctggctctgacagtggtacaacagcggtggtggccctgatacgagggaagcagttgattgtagccaacgcaggagactctcgctgtgtggtatctgaggctggcaaagctttagacatgtcctatgatcacaaaccagaggatgaagtagaactagcacgcatcaagaatgctggtggcaaggtcaccatggatgggcgagtcaacgggggcctcaacctctccagagccattggggaccacttctataagagaaacaagaacctgccacctgaggaacagatgatttcagcccttcctgacatcaaggtgctgactctcactgacgaccatgaattcatggtcattgcctgtgatggcatctggaatgtgatgagcagccaggaagttgtagatttcattcaatcaaagatcagccagcgtgatgaaaatggggagcttcggttattgtcatccattgtggaagagctgctggatcagtgcctggcaccagacacttctggggatggtacagggtgtgacaacatgacctgcatcatcatttgcttcaagccccgaaacacagcagagctccagccagagagtggcaagcgaaaactagaggaggtgctctctactgagggggctgaagaaaatggcaacagcgacaagaagaagaaggccaagcgagactagcagtcatccagacccctgcccacctagactgttttctgagccctccggacctgagactgagttttgtctttttcctttagccttagcagtgggtatgaggtgtgcagggggagctgggtggcttcactccgcccattccaaagagggctctccctccacactgcagccgggagcctctgctgtccttcccagccgcctctgctcctcgggctcatcaccggttctgtgcctgtgctctgttgtgttggagggaaggactggcggttctggtttttactctgtgaactttatttaaggacattcttttttattggcggctccatggccctcggccgcttgcacccgctctctgttgtacactttcaatcaacactttttcagactaaaggccaaaacctaatcgtacgcatcgtgtccttttttttctgctgccgtggcccccgacttggtcccatctgtagcatgtggcgagcccccatgtgagtgtgtgcgtgtgctcgtgtgtgtcctgcgcgtgtataggagagcccagagcgagctgctggtaggccggcctggcgggcgtcgcggctgcccctcgccccctcctgcagccagaaatgatctagttcccccagggacaggttgggaccggtctggctggcctgaagcctggagtcgggcaggacgcctcctgcgctgctccctggccggctccccgctgccgctgattggcttgctccccgcctcgtcacaatcacttcccggtcacgccattgaggctcccgccgcggccgc

SEQ ID NO: 387721 - DNA, 2677 bp, Homo sapiens
aggatccttaattaaattattcttccccccccgcgcttccgctccctcacagctcccgtcccgttaccgcctcctggccggcctcgcgcctttcaccggcaccttgcgtcggtcgcgccgcggggcctgctcctgccgcgcgcacccccggggcttcggctccggcacgggtcgcgcccagctttcctgcacctgaggccgccggccagccgccgccatgggtgcctacctctcccagcccaacacggtgaagtgctccggggacggggtcggcgccccgcgcctgccgctgccctacggcttctccgccatgcaaggctggcgcgtctccatggaggctttagaagatgccttcttggctattgacgccaaattgaccactgaagaagtcattaaagagctggcacagattgcagggcgacccactgaggatgaagatgaaaaagaaaaagtagctgatgaagatgatgtggacaatgaggaggctgcactgctgcatgaagaggctaccatgactattgaagagctgctgacacgctacgggcagaactgtcacaagggccctccccacagcaaatctggaggtgggacaggcgaggaaccaggtcccagggcctcaatggggaggcaggacctgaggactcaactagggaaactccttcacaagaaaatggccccacagccaaggcctacacaggcttttccttgaagtgctccggggacggggtcggcgccccgcgcctgccgctgccctacggcttctccgccatgcaaggctggcgcgtctccatggaggatgctcacaactgtattcctgagctggacagtgagacagccatgttttctgtctacgatggacatggaggggaggaagttgccttgtactgtgccaaatatcttcctgatatcatcaaagatcagaaggcctacaaggaaggcaagctacagaaggctttagaagatgccttcttggctattgacgccaaattgaccactgaagaagtcattaaagagctggcacagattgcagggcgacccactgaggatgaagatgaaaaagaaaaagtagctgatgaagatgatggaatgcagcgaggaagaggatggctacagcagtgaggaggcagagaatgaggaagatgaggatgacaccgaggaggctgaagaggacgatgaagaagaagaagaagagatgatggtgccagggatggaaggcaaagaggagcctggctctgacagtggtacaacagcggtggtggccctgatacgagggaagcagttgattgtagccaacgcaggagactctcgctgtgtggtatctgaggctggcaaagctttagacatgtcctatgatcacaaaccagaggatgaagtagaactagcacgcatcaagaatgctggtggcaaggtcaccatggatgggcgagtcaacgggggcctcaacctctccagagccattggggaccacttctataagagaaacaagaacctgccacctgaggaacagatgatttcagcccttcctgacatcaaggtgctgactctcactgacgaccatgaattcatggtcattgcctgtgatggcatctggaatgtgatgagcagccaggaagttgtagatttcattcaatcaaagatcagccagcgtgatgaaaatggggagcttcggttattgtcatccattgtggaagagctgctggatcagtgcctggcaccagacacttctggggatggtacagggtgtgacaacatgacctgcatcatcatttgcttcaagccccgaaacacagcagagctccagccagagagtggcaagcgaaaactagaggaggtgctctctactgagggggctgaagaaaatggcaacagcgacaagaagaagaaggccaagcgagactagcagtcatccagacccctgcccacctagactgttttctgagccctccggacctgagactgagttttgtctttttcctttagccttagcagtgggtatgaggtgtgcagggggagctgggtggcttcactccgcccattccaaagagggctctccctccacactgcagccgggagcctctgctgtccttcccagccgcctctgctcctcgggctcatcaccggttctgtgcctgtgctctgttgtgttggagggaaggactggcggttctggtttttactctgtgaactttatttaaggacattcttttttattggcggctccatggccctcggccgcttgcacccgctctctgttgtacactttcaatcaacactttttcagactaaaggccaaaacctaatcgtacgcatcgtgtccttttttttctgctgccgtggcccccgacttggtcccatctgtagcatgtggcgagcccccatgtgagtgtgtgcgtgtgctcgtgtgtgtcctgcgcgtgtataggagagcccagagcgagctgctggtaggccggcctggcgggcgtcgcggctgcccctcgccccctcctgcagccagaaatgatctagttcccccagggacaggttgggaccggtctggctggcctgaagcctggagtcgggcaggacgcctcctgcgctgctccctggccggctccccgctgccgctgattggcttgctccccgcctcgtcacaatcacttcccggtcacgccattgaggctcccgccgcggccgc

SEQ ID NO: 387722 - DNA, 1668 bp, Homo sapiens
cctccccccctccccctcaacctaccgtctcgaacataggtaggtcgaggctgttctaaaagaggaagacagtaggaatgcagcgaggaagaggatggctacagcagtgaggaggcagagaatgaggaagatgaggatgacaccgaggaggctgaagaggacgatgaagaagaagaagaagagatgatggtgccagggatggaaggcaaagaggagcctggctctgacagtggtacaacagcggtggtggccctgatacgagggaagcagttgattgtagccaacgcaggagactctcgctgtgtggtatctgaggctggcaaagctttagacatgtcctatgatcacaaaccagaggatgaagtagaactagcacgcatcaagaatgctggtggcaaggtcaccatggatgggcgagtcaacgggggcctcaacctctccagagccattggggaccacttctataagagaaacaagaacctgccacctgaggaacagatgatttcagcccttcctgacatcaaggtgctgactctcactgacgaccatgaattcatggtcattgcctgtgatggcatctggaatgtgatgagcagccaggaagttgtagatttcattcaatcaaagatcagccagcgtgatgaaaatggggagcttcggttattgtcatccattgtggaagagctgctggatcagtgcctggcaccagacacttctggggatggtacagggtgtgacaacatgacctgcatcatcatttgcttcaagccccgaaacacagcagagctccagccagagagtggcaagcgaaaactagaggaggtgctctctactgagggggctgaagaaaatggcaacagcgacaagaagaagaaggccaagcgagactagcagtcatccagacccctgcccacctagactgttttctgagccctccggacctgagactgagttttgtctttttcctttagccttagcagtgggtatgaggtgtgcagggggagctgggtggcttcactccgcccattccaaagagggctctccctccacactgcagccgggagcctctgctgtccttcccagccgcctctgctcctcgggctcatcaccggttctgtgcctgtgctctgttgtgttggagggaaggactggcggttctggtttttactctgtgaactttatttaaggacattcttttttattggcggctccatggccctcggccgcttgcacccgctctctgttgtacactttcaatcaacactttttcagactaaaggccaaaacctaatcgtacgcatcgtgtccttttttttctgctgccgtggcccccgacttggtcccatctgtagcatgtggcgagcccccatgtgagtgtgtgcgtgtgctcgtgtgtgtcctgcgcgtgtataggagagcccagagcgagctgctggtaggccggcctggcgggcgtcgcggctgcccctcgccccctcctgcagccagaaatgatctagttcccccagggacaggttgggaccggtctggctggcctgaagcctggagtcgggcaggacgcctcctgcgctgctccctggccggctccccgctgccgctgattggcttgctccccgcctcgtcacaatcacttcccggtcacgccattgaggctcccgccgcggccgc

SEQ ID NO: 387723 - DNA, 1738 bp, Homo sapiens
ggtgtcacccgcaaaccccctcacttgtatctttcagtgttttgaggacctgtgttcagtcaggacctcttgattctgagtatgagctgtggggagggaggggatcatcccagtctcagcagtctgggatcctccccctggcagggaatgcagcgaggaagaggatggctacagcagtgaggaggcagagaatgaggaagatgaggatgacaccgaggaggctgaagaggacgatgaagaagaagaagaagagatgatggtgccagggatggaaggcaaagaggagcctggctctgacagtggtacaacagcggtggtggccctgatacgagggaagcagttgattgtagccaacgcaggagactctcgctgtgtggtatctgaggctggcaaagctttagacatgtcctatgatcacaaaccagaggatgaagtagaactagcacgcatcaagaatgctggtggcaaggtcaccatggatgggcgagtcaacgggggcctcaacctctccagagccattggggaccacttctataagagaaacaagaacctgccacctgaggaacagatgatttcagcccttcctgacatcaaggtgctgactctcactgacgaccatgaattcatggtcattgcctgtgatggcatctggaatgtgatgagcagccaggaagttgtagatttcattcaatcaaagatcagccagcgtgatgaaaatggggagcttcggttattgtcatccattgtggaagagctgctggatcagtgcctggcaccagacacttctggggatggtacagggtgtgacaacatgacctgcatcatcatttgcttcaagccccgaaacacagcagagctccagccagagagtggcaagcgaaaactagaggaggtgctctctactgagggggctgaagaaaatggcaacagcgacaagaagaagaaggccaagcgagactagcagtcatccagacccctgcccacctagactgttttctgagccctccggacctgagactgagttttgtctttttcctttagccttagcagtgggtatgaggtgtgcagggggagctgggtggcttcactccgcccattccaaagagggctctccctccacactgcagccgggagcctctgctgtccttcccagccgcctctgctcctcgggctcatcaccggttctgtgcctgtgctctgttgtgttggagggaaggactggcggttctggtttttactctgtgaactttatttaaggacattcttttttattggcggctccatggccctcggccgcttgcacccgctctctgttgtacactttcaatcaacactttttcagactaaaggccaaaacctaatcgtacgcatcgtgtccttttttttctgctgccgtggcccccgacttggtcccatctgtagcatgtggcgagcccccatgtgagtgtgtgcgtgtgctcgtgtgtgtcctgcgcgtgtataggagagcccagagcgagctgctggtaggccggcctggcgggcgtcgcggctgcccctcgccccctcctgcagccagaaatgatctagttcccccagggacaggttgggaccggtctggctggcctgaagcctggagtcgggcaggacgcctcctgcgctgctccctggccggctccccgctgccgctgattggcttgctccccgcctcgtcacaatcacttcccggtcacgccattgaggctcccgccgcggccgc

SEQ ID NO: 387724 - DNA, 1779 bp, Homo sapiens
gaggagaagaagaagcagctggtcagacaggtgcgggagatggaggcagagctggaggacgagaggaagcagcgctcgatggcagtgaccgcccggaagaagctggagatggacctgaaggacctggaggcgcacatcgactcggccaacaagaaccgggacgaagccatcaaacagctgcggaagctgcaggcccagatgaaggactgcatgcgcgagctggatgacacccgcgcctctcgtgaggagatcctggcccaggctgaagaggacgatgaagaagaagaagaagagatgatggtgccagggatggaaggcaaagaggagcctggctctgacagtggtacaacagcggtggtggccctgatacgagggaagcagttgattgtagccaacgcaggagactctcgctgtgtggtatctgaggctggcaaagctttagacatgtcctatgatcacaaaccagaggatgaagtagaactagcacgcatcaagaatgctggtggcaaggtcaccatggatgggcgagtcaacgggggcctcaacctctccagagccattggggaccacttctataagagaaacaagaacctgccacctgaggaacagatgatttcagcccttcctgacatcaaggtgctgactctcactgacgaccatgaattcatggtcattgcctgtgatggcatctggaatgtgatgagcagccaggaagttgtagatttcattcaatcaaagatcagccagcgtgatgaaaatggggagcttcggttattgtcatccattgtggaagagctgctggatcagtgcctggcaccagacacttctggggatggtacagggtgtgacaacatgacctgcatcatcatttgcttcaagccccgaaacacagcagagctccagccagagagtggcaagcgaaaactagaggaggtgctctctactgagggggctgaagaaaatggcaacagcgacaagaagaagaaggccaagcgagactagcagtcatccagacccctgcccacctagactgttttctgagccctccggacctgagactgagttttgtctttttcctttagccttagcagtgggtatgaggtgtgcagggggagctgggtggcttcactccgcccattccaaagagggctctccctccacactgcagccgggagcctctgctgtccttcccagccgcctctgctcctcgggctcatcaccggttctgtgcctgtgctctgttgtgttggagggaaggactggcggttctggtttttactctgtgaactttatttaaggacattcttttttattggcggctccatggccctcggccgcttgcacccgctctctgttgtacactttcaatcaacactttttcagactaaaggccaaaacctaatcgtacgcatcgtgtccttttttttctgctgccgtggcccccgacttggtcccatctgtagcatgtggcgagcccccatgtgagtgtgtgcgtgtgctcgtgtgtgtcctgcgcgtgtataggagagcccagagcgagctgctggtaggccggcctggcgggcgtcgcggctgcccctcgccccctcctgcagccagaaatgatctagttcccccagggacaggttgggaccggtctggctggcctgaagcctggagtcgggcaggacgcctcctgcgctgctccctggccggctccccgctgccgctgattggcttgctccccgcctcgtcacaatcacttcccggtcacgccattgaggctcccgccgcggccgc

SEQ ID NO: 387725 - DNA, 1287 bp, Homo sapiens
agttcgacggagactctcccatccatggatgggcgagtcaacgggggcctcaacctctccagagccattggggaccacttctataagagaaacaagaacctgccacctgaggaacagatgatttcagcccttcctgacatcaaggtgctgactctcactgacgaccatgaattcatggtcattgcctgtgatggcatctggaatgtgatgagcagccaggaagttgtagatttcattcaatcaaagatcagccagcgtgatgaaaatggggagcttcggttattgtcatccattgtggaagagctgctggatcagtgcctggcaccagacacttctggggatggtacagggtgtgacaacatgacctgcatcatcatttgcttcaagccccgaaacacagcagagctccagccagagagtggcaagcgaaaactagaggaggtgctctctactgagggggctgaagaaaatggcaacagcgacaagaagaagaaggccaagcgagactagcagtcatccagacccctgcccacctagactgttttctgagccctccggacctgagactgagttttgtctttttcctttagccttagcagtgggtatgaggtgtgcagggggagctgggtggcttcactccgcccattccaaagagggctctccctccacactgcagccgggagcctctgctgtccttcccagccgcctctgctcctcgggctcatcaccggttctgtgcctgtgctctgttgtgttggagggaaggactggcggttctggtttttactctgtgaactttatttaaggacattcttttttattggcggctccatggccctcggccgcttgcacccgctctctgttgtacactttcaatcaacactttttcagactaaaggccaaaacctaatcgtacgcatcgtgtccttttttttctgctgccgtggcccccgacttggtcccatctgtagcatgtggcgagcccccatgtgagtgtgtgcgtgtgctcgtgtgtgtcctgcgcgtgtataggagagcccagagcgagctgctggtaggccggcctggcgggcgtcgcggctgcccctcgccccctcctgcagccagaaatgatctagttcccccagggacaggttgggaccggtctggctggcctgaagcctggagtcgggcaggacgcctcctgcgctgctccctggccggctccccgctgccgctgattggcttgctccccgcctcgtcacaatcacttcccggtcacgccattgaggctcccgccgcggccgc

SEQ ID NO: 387726 - DNA, 1227 bp, Homo sapiens
cgcagccatggaagttgtagatttcattcaatcaaagatctgccacctgaggaacagatgatttcagcccttcctgacatcaaggtgctgactctcactgacgaccatgaattcatggtcattgcctgtgatggcatctggaatgtgatgagcagccaggaagttgtagatttcattcaatcaaagatcagccagcgtgatgaaaatggggagcttcggttattgtcatccattgtggaagagctgctggatcagtgcctggcaccagacacttctggggatggtacagggtgtgacaacatgacctgcatcatcatttgcttcaagccccgaaacacagcagagctccagccagagagtggcaagcgaaaactagaggaggtgctctctactgagggggctgaagaaaatggcaacagcgacaagaagaagaaggccaagcgagactagcagtcatccagacccctgcccacctagactgttttctgagccctccggacctgagactgagttttgtctttttcctttagccttagcagtgggtatgaggtgtgcagggggagctgggtggcttcactccgcccattccaaagagggctctccctccacactgcagccgggagcctctgctgtccttcccagccgcctctgctcctcgggctcatcaccggttctgtgcctgtgctctgttgtgttggagggaaggactggcggttctggtttttactctgtgaactttatttaaggacattcttttttattggcggctccatggccctcggccgcttgcacccgctctctgttgtacactttcaatcaacactttttcagactaaaggccaaaacctaatcgtacgcatcgtgtccttttttttctgctgccgtggcccccgacttggtcccatctgtagcatgtggcgagcccccatgtgagtgtgtgcgtgtgctcgtgtgtgtcctgcgcgtgtataggagagcccagagcgagctgctggtaggccggcctggcgggcgtcgcggctgcccctcgccccctcctgcagccagaaatgatctagttcccccagggacaggttgggaccggtctggctggcctgaagcctggagtcgggcaggacgcctcctgcgctgctccctggccggctccccgctgccgctgattggcttgctccccgcctcgtcacaatcacttcccggtcacgccattgaggctcccgccgcggccgc

SEQ ID NO: 387727 - DNA, 1391 bp, Homo sapiens
  misc_feature (1391)..(1391): n is a, c, g, or t
ggccgtggttaatcggccgaggaaggaaggcaagctacagaaggctttagaagatgccttcttggctattgacgccaaattgaccactgaagaagtcattaaagagctggcacagattgcagggcgacccactgaggatgaagatgaaaaagaaaaagtagctgatgaagatgatgtggacaatgaggaggctgcactgctgcatgaagaggctaccatgactattgaagagctgctgacacgctacgggcagaactgtcacaagggccctccccacagcaaatctggaggtgggacaggcgaggaaccaggtcccagggcctcaatggggaggcaggacctgaggactcaactagggaaactccttcacaagaaaatggccccacagccaaggcctacacaggcttttcctccaactcggaacgtgggactgaggcaggccaagttggtgagcctggcattcccactggtgaggctgggccttcctgctcttcagcctctgacaagctgcctcgagttgctaagtccaagttctttgaggacagtgaggatgagtcagatgaggcggaggaagaagaggaagacagtgaggaatgcagcgaggaagaggatggctacagcagtgaggaggcagagaatgaggaagatgaggatgacaccgaggaggctgaagaggacgatgaagaagaagaagaagagatgatggtgccagggatggaaggcaaagaggagcctggctctgacagtggtacaacagcggtggtggccctgatacgagggaagcagttgattgtagccaacgcaggagactctcgctgtgtggtatctgaggctggcaaagctttagacatgtcctatgatcacaaaccagaggatgaagtagaactagcacgcatcaagaatgctggtggcaaggtcaccatggatgggcgagtcaacgggggcctcaacctctccagagccattggggaccacttctataagagaaacaagaacctgccacctgaggaacagatgatttcagcccttcctgacatcaaggtgctgactctcactgacgaccatgaattcatggtcattgcctgtgatggcatctggaatgtgatgagcagccaggaagttgtcactctccttccgaccaagaatatccaccggtcagacaacggggactcgggtcaatggcaccctgggggaagagcgtggcatatgtcggtccacaacttcgcatgctaggggtgtatccatcacgtcacatgttagtcccagacaacgatggcgcaagatagagcacacagtgctacgatgggtgtgaagagacaaagcaagaacagcgaacccctgtaactgaattcgtttagtgatcccttcccggtctcgcgcccgtctactgn

SEQ ID NO: 387728 - DNA, 899 bp, Homo sapiens
atttccccgggaccgagtatgccatgtttcgattctcgagcggggctccccatggaatacgcgtatgaggggctgaagaaaatggcaacagcgacaagaagaagaaggccaagcgagactagcagtcatccagacccctgcccacctagactgttttctgagccctccggacctgagactgagttttgtctttttcctttagccttagcagtgggtatgaggtgtgcagggggagctgggtggcttcactccgcccattccaaagagggctctccctccacactgcagccgggagcctctgctgtccttcccagccgcctctgctcctcgggctcatcaccggttctgtgcctgtgctctgttgtgttggagggaaggactggcggttctggtttttactctgtgaactttatttaaggacattcttttttattggcggctccatggccctcggccgcttgcacccgctctctgttgtacactttcaatcaacactttttcagactaaaggccaaaacctaatcgtacgcatcgtgtccttttttttctgctgccgtggcccccgacttggtcccatctgtagcatgtggcgagcccccatgtgagtgtgtgcgtgtgctcgtgtgtgtcctgcgcgtgtataggagagcccagagcgagctgctggtaggccggcctggcgggcgtcgcggctgcccctcgccccctcctgcagccagaaatgatctagttcccccagggacaggttgggaccggtctggctggcctgaagcctggagtcgggcaggacgcctcctgcgctgctccctggccggctccccgctgccgctgattggcttgctccccgcctcgtcacaatcacttcccggtcacgccattgaggctcccgccgcggccgc

SEQ ID NO: 387729 - DNA, 1057 bp, Homo sapiens
tcctcagtctcactccgataacatagaggggaggaagttgccttgtactgtgccaaatatcttcctgatatcatcaaagatcagaaggcctacaaggaaggcaagctacagaaggctttagaagatgccttcttggctattgacgccaaattgaccactgaagaagtcattaaagagctggcacagattgcagggcgacccactgaggatgaagatgaaaaagaaaaagtagctgatgaagatgatgagcgacaagaagaagaaggccaagcgagactagcagtcatccagacccctgcccacctagactgttttctgagccctccggacctgagactgagttttgtctttttcctttagccttagcagtgggtatgaggtgtgcagggggagctgggtggcttcactccgcccattccaaagagggctctccctccacactgcagccgggagcctctgctgtccttcccagccgcctctgctcctcgggctcatcaccggttctgtgcctgtgctctgttgtgttggagggaaggactggcggttctggtttttactctgtgaactttatttaaggacattcttttttattggcggctccatggccctcggccgcttgcacccgctctctgttgtacactttcaatcaacactttttcagactaaaggccaaaacctaatcgtacgcatcgtgtccttttttttctgctgccgtggcccccgacttggtcccatctgtagcatgtggcgagcccccatgtgagtgtgtgcgtgtgctcgtgtgtgtcctgcgcgtgtataggagagcccagagcgagctgctggtaggccggcctggcgggcgtcgcggctgcccctcgccccctcctgcagccagaaatgatctagttcccccagggacaggttgggaccggtctggctggcctgaagcctggagtcgggcaggacgcctcctgcgctgctccctggccggctccccgctgccgctgattggcttgctccccgcctcgtcacaatcacttcccggtcacgccattgaggctcccgccgcggccgc

SEQ ID NO: 387730 - DNA, 987 bp, Homo sapiens
aggatccttaattaaattattcttccccccccgcgcttccgctccctcacagctcccgtcccgttaccgcctcctggccggcctcgcgcctttcaccggcaccttgcgtcggtcgcgccgcggggcctgctcctgccgcgcgcacccccggggcttcggctccggcacgggtcgcgcccagctttcctgcacctgaggccgccggccagccgccgccatgggtgcctacctctcccagcccaacacggtgaagtgctccggggacggggtcggcgccccgcgcctgccgctgccctacggcttctccgccatgcaaggctggcgcgtctccatggaggggaggaagttgccttgtactgtgccaaatatcttcctgatatcatcaaagatcagaaggcctacaaggaaggcaagctacagaaggctttagaagatgccttcttggctattgacgccaaattgaccactgaagaagtcattaaagagctggcacagattgcagggcgacccactgaggatgaagatgaaaaagaaaaagtagctgatgaagatgatgagcgacaagaagaagaaggccaagcgagactagcagtcatccagacccctgcccacctagactgttttctgagccctccggacctgagactgagttttgtctttttcctttagccttagcagtgggtatgaggtgtgcagggggagctgggtggcttcactccgcccattccaaagagggctctccctccacactgcagccgggagcctctgctgtccttcccagccgcctctgctcctcgggctcatcaccggttctgtgcctgtgctctgttgtgttggagggaaggactggcggttctggtttttactctgtgaactttatttaaggacattcttttttattggcggctccatggccctcggccgcttgcacccgctctctgttgtacactttcaatcaacactttttcagactaaaggccaaaacct

SEQ ID NO: 387731 - DNA, 1617 bp, Homo sapiens
aggatccttaattaaattattcttccccccccgcgcttccgctccctcacagctcccgtcccgttaccgcctcctggccggcctcgcgcctttcaccggcaccttgcgtcggtcgcgccgcggggcctgctcctgccgcgcgcacccccggggcttcggctccggcacgggtcgcgcccagctttcctgcacctgaggccgccggccagccgccgccatgggtgcctacctctcccagcccaacacggtgaagtgctccggggacggggtcggcgccccgcgcctgccgctgccctacggcttctccgccatgcaaggctggcgcgtctccatggaggctttagaagatgccttcttggctattgacgccaaattgaccactgaagaagtcattaaagagctggcacagattgcagggcgacccactgaggatgaagatgaaaaagaaaaagtagctgatgaagatgatgtggacaatgaggaggctgcactgctgcatgaagaggctaccatgactattgaagagctgctgacacgctacgggcagaactgtcacaagggccctccccacagcaaatctggaggtgggacaggcgaggaaccaggtcccagggcctcaatggggaggcaggacctgaggactcaactagggaaactccttcacaagaaaatggccccacagccaaggcctacacaggcttttccttgaagtgctccggggacggggtcggcgccccgcgcctgccgctgccctacggcttctccgccatgcaaggctggcgcgtctccatggaggatgctcacaactgtattcctgagctggacagtgagacagccatgttttctgtctacgatggacatggaggggaggaagttgccttgtactgtgccaaatatcttcctgatatcatcaaagatcagaaggcctacaaggaaggcaagctacagaaggctttagaagatgccttcttggctattgacgccaaattgaccactgaagaagtcattaaagagctctgctgtccttcccagccgcctctgctcctcgggctcatcaccggttctgtgcctgtgctctgttgtgttggagggaaggactggcggttctggtttttactctgtgaactttatttaaggacattcttttttattggcggctccatggccctcggccgcttgcacccgctctctgttgtacactttcaatcaacactttttcagactaaaggccaaaacctaatcgtacgcatcgtgtccttttttttctgctgccgtggcccccgacttggtcccatctgtagcatgtggcgagcccccatgtgagtgtgtgcgtgtgctcgtgtgtgtcctgcgcgtgtataggagagcccagagcgagctgctggtaggccggcctggcgggcgtcgcggctgcccctcgccccctcctgcagccagaaatgatctagttcccccagggacaggttgggaccggtctggctggcctgaagcctggagtcgggcaggacgcctcctgcgctgctccctggccggctccccgctgccgctgattggcttgctccccgcctcgtcacaatcacttcccggtcacgccattgaggctcccgccgcggccgc

SEQ ID NO: 387732 - DNA, 1078 bp, Homo sapiens
aggatccttaattaaattattcttccccccccgcgcttccgctccctcacagctcccgtcccgttaccgcctcctggccggcctcgcgcctttcaccggcaccttgcgtcggtcgcgccgcggggcctgctcctgccgcgcgcacccccggggcttcggctccggcacgggtcgcgcccagctttcctgcacctgaggccgccggccagccgccgccatgggtgcctacctctcccagcccaacacggtgaagtgctccggggacggggtcggcgccccgcgcctgccgctgccctacggcttctccgccatgcaaggctggcgcgtctccatggaggggaggaagttgccttgtactgtgccaaatatcttcctgatatcatcaaagatcagaaggcctacaaggaaggcaagctacagaaggctttagaagatgccttcttggctattgacgccaaattgaccactgaagaagtcattaaagagctggcacagattgcagggcgacccactgaggatgaagatgaaaaagaaaaagtagctgatgaagatgatgtggacaatgaggaggctgcactgctgcatgaagaggctaccatgactattgaagagctgctgacacgctacgggcagaactgtcacaagggccctccccacagcaaatctggaggtgggacaggcgaggaaccaggtcccagggcctcaatggggaggcaggacctgaggactcaactagggaaactccttcacaagaaaatggccccacagccaaggcctacacaggcttttcctccaactcggaacgtgggactgaggcaggccaagttggtgagcctggcattcccactggtgaggctgggccttcctgctcttcagcctctgacaagctgccgtagtcagtcttgcggcagtgggtgatcacaaaggggcggaaaaaggaacgggggaagcggagaaagaggacgggaggggggataggacgagggacgggtgagggaaacaacaatggtcggagcaagagccagacgggggaaaatgaaaaaaggggggaaaaaggaaaggggagcataacatggtg

SEQ ID NO: 387733 - DNA, 1727 bp, Homo sapiens
  misc_feature (1261)..(1261): n is a, c, g, or t
aggatccttaattaaattattcttccccccccgcgcttccgctccctcacagctcccgtcccgttaccgcctcctggccggcctcgcgcctttcaccggcaccttgcgtcggtcgcgccgcggggcctgctcctgccgcgcgcacccccggggcttcggctccggcacgggtcgcgcccagctttcctgcacctgaggccgccggccagccgccgccatgggtgcctacctctcccagcccaacacggtgaagtgctccggggacggggtcggcgccccgcgcctgccgctgccctacggcttctccgccatgcaaggctggcgcgtctccatggaggctttagaagatgccttcttggctattgacgccaaattgaccactgaagaagtcattaaagagctggcacagattgcagggcgacccactgaggatgaagatgaaaaagaaaaagtagctgatgaagatgatgtggacaatgaggaggctgcactgctgcatgaagaggctaccatgactattgaagagctgctgacacgctacgggcagaactgtcacaagggccctccccacagcaaatctggaggtgggacaggcgaggaaccaggtcccagggcctcaatggggaggcaggacctgaggactcaactagggaaactccttcacaagaaaatggccccacagccaaggcctacacaggcttttccttgaagtgctccggggacggggtcggcgccccgcgcctgccgctgccctacggcttctccgccatgcaaggctggcgcgtctccatggaggatgctcacaactgtattcctgagctggacagtgagacagccatgttttctgtctacgatggacatggaggggaggaagttgccttgtactgtgccaaatatcttcctgatatcatcaaagatcagaaggcctacaaggaaggcaagctacagaaggctttagaagatgccttcttggctattgacgccaaattgaccactgaagaagtcattaaagagctctgctgtccttcccagccgcctctgctcctcgggctcatcaccggttctgtgcctgtgctctgttgtgttggagggaaggactggcggttctggtttttactctgtgaactttatttaaggacattcttttttattggcggctccatggccctcggccgcttgcacccgctctctgttgtacactttcaatcaacactttttcagactaaaggccaaaacctctaaaaaaaaaaaaaaaaaaaanaaaaaaaaaaaaaaaaaggggggggccgcgcgggcccataaaatttattcccccgcgggggggcccccgggtttcggcgcgcgttacccccgtttttttgtggtccaagggggccccctatatagggggggggcgcgtatatatatataaagccgagggggccggggcccgcgccgggtttaacacacggttcgcgggggcggggggaaaaaagcgggctaccgtggggaactcttgtggggagaggaggacccctaactctgcggggggcgggtggacattatcgtggggaccaaacttcccttaccggagagattttaagcgccccctgggggaacttattacaactttttcaggggtttatacgtgtgtttacccacacgcggcattatgcgtgcccgctggacgagtgtgcctaccggggttgtgctttgtgcaacattttttcccgggatttttctaaaga

SEQ ID NO: 387734 - DNA, 642 bp, Homo sapiens
cagcgtgatgaaaatggggagcttcggttattgtcatccattgtggaagaggtgagtaccagggtggagaagagagggtgtctggtctgcacagccagggttcactcttttaatctgagctaagtcggcaatctgggagcattatcagtaattgctgacagacgctaaaccccgactccaaagttccaccttctgtcatttccctgacttagccttatgccttatggactagcaggtgggccgttgtgtgatacctcttgcccattcctctcctaccaccctgactcagcaagccagccctcttgtgggactgtagattcctggcaaggtgttcaaaccctgtggctgagctacccccatccctttcttagctgctggatcagtgcctggcaccagacacttctggggatggtacagggtgtgacaacatgacctgcatcatcatttgcttcaagccccgaaacacagcagagctccagccagagagtggcaagcgaaaactagaggaggtgctctctactgagggggctgaagaaaatggcaacagcgacaagaagaagaaggccaagcgagactagcagtcatccagacccctgcccacctagactgttttctgagccctccggacctgagactgagttt

SEQ ID NO: 387735 - DNA, 885 bp, Homo sapiens
  misc_feature (13)..(13): n is a, c, g, or t
  misc_feature (16)..(18): n is a, c, g, or t
ccccccccccccncannncattaggctaggtacgaggctgggtgtgaatcggccgaggctggccggcctcgcgcctttcaccggcaccttgcgtcggtcgcgccgcggggcctgctcctgccgcgcgcacccccggggcttcggctccggcacgggtcgcgcccagctttcctgcacctgaggccgccggccagccgccgccatgggtgcctacctctcccagcccaacacggtgaagtgctccggggacggggtcggcgccccgcgcctgccgctgccctacggcttctccgccatgcaaggctggcgcgtctccatggaggatgctcacaactgtattcctgagctggacagtgagacagccatgttttctgtctacgatggacatggaggtaactttaacagatcatattggtaacattctaggaccccaattccagacgttccagggcaagaacaggtccctttgttcatttactttccagggtctggccctcattatcatttcctgcgtggtgctgtttttctgtattctgtcattcttttttcccagtaggtactgtattggtttataatctcaccaggacttgttttaatccaaagagcctctatctttttttatttttattttttaaaatttttaggctgggcacgcggtaggtcacacctgtaatcccggcacagtggatcacgaggtcaggagttcgagaccagcctgaccaatatggtgaaaccccatctctactaaaaatacaaaaattagctgggcgtagtggtgggcgcctgtggtcccagctgctcggaaggctgaggcaggagaatcgcttgaacctgggaggtggaggttgcagtgagccaagaccatgccactgcactccagcctgg

SEQ ID NO: 387736 - DNA, 2635 bp, Homo sapiens
aggatccttaattaaattattcttccccccccgcgcttccgctccctcacagctcccgtcccgttaccgcctcctggccggcctcgcgcctttcaccggcaccttgcgtcggtcgcgccgcggggcctgctcctgccgcgcgcacccccggggcttcggctccggcacgggtcgcgcccagctttcctgcacctgaggccgccggccagccgccgccatgggtgcctacctctcccagcccaacacggtgaagtgctccggggacggggtcggcgccccgcgcctgccgctgccctacggcttctccgccatgcaaggctggcgcgtctccatggaggatgctcacaactgtattcctgagctggacagtgagacagccatgttttctgtctacgatggacatggaggggaggaagttgccttgtactgtgccaaatatcttcctgatatcatcaaagatcagaaggcctacaaggaaggcaagctacagaaggctttagaagatgccttcttggctattgacgccaaattgaccactgaagaagtcattaaagagctggcacagattgcagggcgacccactgaggatgaagatgaaaaagaaaaagtagctgatgaagatgatgtggacaatgaggaggctgcactgctgcatgaagaggctaccatgactattgaagagctgctgacacgctacgggcagaactgtcacaagggccctccccacagcaaatctggaggtgggacaggcgaggaaccagggtcccagggcctcaatggggaggcaggacctgaggactcaactagggaaactccttcacaagaaaatggccccacagccaaggcctacacaggcttttcctccaactcggaacgtgggactgaggcaggccaagttggtgagcctggcattcccactggtgaggctgggccttcctgctcttcagcctctgacaagctgcctcgagttgctaagtccaagttctttgaggacagtgaggatgagtcagatgaggcggaggaagaagaggaagacagtgaggaatgcagcgaggaagaggatggctacagcagtgaggaggcagagaatgaggaagatgaggatgacaccgaggaggctgaagaggacgatgaagaagaagaagaagagatgatggtgccagggatggaaggcaaagaggagcctggctctgacagtggtacaacagcggtggtggccctgatacgagggaagcagttgattgtagccaacgcaggagactctcgctgtgtggtatctgaggctggcaaagctttagacatgtcctatgatcacaaaccagaggatgaagtagaactagcacgcatcaagaatgctggtggcaaggtcaccatggatgggcgagtcaacgggggcctcaacctctccagagccattggggaccacttctataagagaaacaagaacctgccacctgaggaacagatgatttcagcccttcctgacatcaaggtgctgactctcactgacgaccatgaattcatggtcattgcctgtgatggcatctggaatgtgatgagcagccaggaagttgtagatttcattcaatcaaagatcagccagcgtgatgaaaatggggagcttcggttattgtcatccattgtggaagagctgctggatcagtgcctggcaccagacacttctggggatggtacagggtgtgacaacatgacctgcatcatcatttgcttcaagccccgaaacacagcagagctccagccagagagtggcaagcgaaaactagaggaggtgctctctactgagggggctgaagaaaatggcaacagcgacaagaagaagaaggccaagcgagactagcagtcatccagacccctgcccacctagactgttttctgagccctccggacctgagactgagttttgtctttttcctttagccttagcagtgggtatgaggtgtgcagggggagctgggtggcttcactccgcccattccaaagagggctctccctccacactgcagccgggagcctctgctgtccttcccagccgcctctgctcctcgggctcatcaccggttctgtgcctgtgctctgttgtgttggagggaaggactggcggttctggtttttactctgtgaactttatttaaggacattcttttttattggcggctccatggccctcggccgcttgcacccgctctctgttgtacactttcaatcaacactttttcagactaaaggccaaaacctaatcgtacgcatcgtgtccttttttttctgctgccgtggcccccgacttggtcccatctgtagcatgtggcgagcccccatgtgagtgtgtgcgtgtgctcgtgtgtgtcctgcgcgtgtataggagagcccagagcgagctgctggtaggccggcctggcgggcgtcgcggctgcccctcgccccctcctgcagccagaaatgatctagttcccccagggacaggttgggaccggtctggctggcctgaagcctggagtcgggcaggacgcctcctgcgctgctccctggccggctccccgctgccgctgattggcttgctccccgcctcgtcacaatcacttcccggtcacgccattgaggctcccgccgcggccgc

SEQ ID NO: 387737 - DNA, 2707 bp, Homo sapiens
  misc_feature (2279)..(2279): n is a, c, g, or t
aggatccttaattaaattattcttccccccccgcgcttccgctccctcacagctcccgtcccgttaccgcctcctggccggcctcgcgcctttcaccggcaccttgcgtcggtcgcgccgcggggcctgctcctgccgcgcgcacccccggggcttcggctccggcacgggtcgcgcccagctttcctgcacctgaggccgccggccagccgccgccatgggtgcctacctctcccagcccaacacggtgaagtgctccggggacggggtcggcgccccgcgcctgccgctgccctacggcttctccgccatgcaaggctggcgcgtctccatggaggatgctcacaactgtattcctgagctggacagtgagacagccatgttttctgtctacgatggacatggaggggaggaagttgccttgtactgtgccaaatatcttcctgatatcatcaaagatcagaaggcctacaaggaaggcaagctacagaaggctttagaagatgccttcttggctattgacgccaaattgaccactgaagaagtcattaaagagctggcacagattgcagggcgacccactgaggatgaagatgaaaaagaaaaagtagctgatgaagatgatgtggacaatgaggaggctgcactgctgcatgaagaggctaccatgactattgaagagctgctgacacgctacgggcagaactgtcacaagggccctccccacagcaaatctggaggtgggacaggcgaggaaccagggtcccagggcctcaatggggaggcaggacctgaggactcaactagggaaactccttcacaagaaaatggccccacagccaaggcctacacaggcttttcctccaactcggaacgtgggactgaggcaggccaagttggtgagcctggcattcccactggtgaggctgggccttcctgctcttcagcctctgacaagctgcctcgagttgctaagtccaagttctttgaggacagtgaggatgagtcagatgaggcggaggaagaagaggaagacagtgaggaatgcagcgaggaagaggatggctacagcagtgaggaggcagagaatgaggaagatgaggatgacaccgaggaggctgaagaggacgatgaagaagaagaagaagagatgatggtgccagggatggaaggcaaagaggagcctggctctgacagtggtacaacagcggtggtggccctgatacgagggaagcagttgattgtagccaacgcaggagactctcgctgtgtggtatctgaggctggcaaagctttagacatgtcctatgatcacaaaccagaggatgaagtagaactagcacgcatcaagaatgctggtggcaaggtcaccatggatgggcgagtcaacgggggcctcaacctctccagagccattggggaccacttctataagagaaacaagaacctgccacctgaggaacagatgatttcagcccttcctgacatcaaggtgctgactctcactgacgaccatgaattcatggtcattgcctgtgatggcatctggaatgtgatgagcagccaggaagttgtagatttcattcaatcaaagatcagccagcgtgatgaaaatggggagcttcggttattgtcatccattgtggaagagctgctggatcagtgcctggcaccagacacttctggggatggtacagggtgtgacaacatgacctgcatcatcatttgcttcaagccccgaaacacagcagagctccagccagagagtggcaagcgaaaactagaggaggtgctctctactgagggggctgaagaaaatggcaacagcgacaagaagaagaaggccaagcgagactagcagtcatccagacccctgcccacctagactgttttctgagccctccggacctgagactgagttttgtctttttcctttagccttagcagtgggtatgaggtgtgcagggggagctgggtggcttcactccgcccattccaaagagggctctccctccacactgcagccgggagcctctgctgtccttcccagccgcctctgctcctcgggctcatcaccggttctgtgcctgtgctctgttgtgttggagggaaggactggcggttctggtttttactctgtgaactttatttaaggacattcttttttattggcggctccatggccctcggccgcttgcacccgctctctgttgtacactttcaatcaacactttttcagactaaaggccaaaacctctaaaaaaaaaaaaaaaaaaaanaaaaaaaaattttggggccctggccagaagaaaggttttacaacccaatcgtttggggcacgcgaggcccccagtaaggtaagctgacaccttggtggcataagggtgggacgcaaaggaaaggaccggcgggcacaagaacaatctgcggtgggatcctccccccagaataaaaaaaaaagcgccgggggaacacaaccgtagactgtttattagaaacaaaacccagacaaagatggcgcgactccgacgagcacacaacagggtcggaccatcaacaacaaggaggacgatacaagagagcgaagctgggaaaatcaaaattaaacgacccgcgatgcgggggatcaataacacgaccagacgagaaacacgaagacaacaacacacactaacgacagacacaaagagacacagaagcacactgc

SEQ ID NO: 387738 - DNA, 2189 bp, Homo sapiens
aaaacttacggctaggtagcgaggctgggtggtgccttgcgtcggtcgcgccgcggggcctgctcctgccgcgcgcacccccggggcttcggctccggcacgggtcgcgcccagctttcctgcacctgaggccgccggccagccgccgccatgggtgcctacctctcccagcccaacacggtgaagtgctccggggacggggtcggcgccccgcgcctgccgctgccctacggcttctccgccatgcaaggctggcgcgtctccatggaggatgctcacaactgtattcctgagctggacagtgagacagccatgttttctgtctacgatggacatggaggggaggaagttgccttgtactgtgccaaatatcttcctgatatcatcaaagatcagaaggcctacaaggaaggcaagctacagaaggctttagaagatgccttcttggctattgacgccaaattgaccactgaagaagtcattaaagagctggcacagattgcagggcgacccactgaggatgaagatgaaaaagaaaaagtagctgatgaagatgatgtggacaatgaggaggctgcactgctgcatgaagaggctaccatgactattgaagagctgctgacacgctacgggcagaactgtcacaagggccctccccacagcaaatctggaggtgggacaggcgaggaaccagggtcccagggcctcaatggggaggcaggacctgaggactcaactagggaaactccttcacaagaaaatggccccacagccaaggcctacacaggcttttcctccaactcggaacgtgggactgaggcaggccaagttggtgagcctggcattcccactggtgaggctgggccttcctgctcttcagcctctgacaagctgcctcgagttgctaagtccaagttctttgaggacagtgaggatgagtcagatgaggcggaggaagaagaggaagacagtgaggaatgcagcgaggaagaggatggctacagcagtgaggaggcagagaatgaggaagatgaggatgacaccgaggaggctgaagaggacgatgaagaagaagaagaagagatgatggtgccagggatggaaggcaaagaggagcctggctctgacagtggtacaacagcggtggtggccctgatacgagggaagcagttgattgtagccaacgcaggagactctcgctgtgtggtatctgaggctggcaaagctttagacatgtcctatgatcacaaaccagaggatgaagtagaactagcacgcatcaagaatgctggtggcaaggtcaccatggatgggcgagtcaacgggggcctcaacctctccagagccattggggaccacttctataagagaaacaagaacctgccacctgaggaacagatgatttcagcccttcctgacatcaaggtgctgactctcactgacgaccatgaattcatggtcattgcctgtgatggcatctggaatgtgatgagcagccaggaagttgtagatttcattcaatcaaagatcagccagcgtgatgaaaatggggagcttcggttattgtcatccattgtggaagagctgctggatcagtgcctggcaccagacacttctggggatggtacagggtgtgacaacatgacctgcatcatcatttgcttcaagccccgaaacacagcagagctccagccagagagtggcaagcgaaaactagaggaggtgctctctactgagggggctgaagaaaatggcaacagcgacaagaagaagaaggccaagcgagactagcagtcatccagacccctgcccacctagactgttttctgagccctccggacctgagactgagttttgtctttttcctttagccttagcagtgggtatgaggtgtgcagggggagctgggtggcttcactccgcccattccaaagagggctctccctccacactgcagccgggagcctctgctgtccttcccagccgcctctgctcctcgggctcatcaccggttctgtgcctgtgctctgttgtgttggagggaaggactggcggttctggtttttactctgtgaactttatttaaggacattcttttttattggcggctccatggccctcggccgcttgcacccgctctctgttgtacactttcaatcaacactttttcagactaaaggccaaaacct

SEQ ID NO: 387739 - DNA, 2213 bp, Homo sapiens
taatttcatatgggacggcgttttattgacttagttgccgtagcttctgacattgacaccttgcgtcggtcgcgccgcggggcctgctcctgccgcgcgcacccccggggcttcggctccggcacgggtcgcgcccagctttcctgcacctgaggccgccggccagccgccgccatgggtgcctacctctcccagcccaacacggtgaagtgctccggggacggggtcggcgccccgcgcctgccgctgccctacggcttctccgccatgcaaggctggcgcgtctccatggaggatgctcacaactgtattcctgagctggacagtgagacagccatgttttctgtctacgatggacatggaggggaggaagttgccttgtactgtgccaaatatcttcctgatatcatcaaagatcagaaggcctacaaggaaggcaagctacagaaggctttagaagatgccttcttggctattgacgccaaattgaccactgaagaagtcattaaagagctggcacagattgcagggcgacccactgaggatgaagatgaaaaagaaaaagtagctgatgaagatgatgtggacaatgaggaggctgcactgctgcatgaagaggctaccatgactattgaagagctgctgacacgctacgggcagaactgtcacaagggccctccccacagcaaatctggaggtgggacaggcgaggaaccagggtcccagggcctcaatggggaggcaggacctgaggactcaactagggaaactccttcacaagaaaatggccccacagccaaggcctacacaggcttttcctccaactcggaacgtgggactgaggcaggccaagttggtgagcctggcattcccactggtgaggctgggccttcctgctcttcagcctctgacaagctgcctcgagttgctaagtccaagttctttgaggacagtgaggatgagtcagatgaggcggaggaagaagaggaagacagtgaggaatgcagcgaggaagaggatggctacagcagtgaggaggcagagaatgaggaagatgaggatgacaccgaggaggctgaagaggacgatgaagaagaagaagaagagatgatggtgccagggatggaaggcaaagaggagcctggctctgacagtggtacaacagcggtggtggccctgatacgagggaagcagttgattgtagccaacgcaggagactctcgctgtgtggtatctgaggctggcaaagctttagacatgtcctatgatcacaaaccagaggatgaagtagaactagcacgcatcaagaatgctggtggcaaggtcaccatggatgggcgagtcaacgggggcctcaacctctccagagccattggggaccacttctataagagaaacaagaacctgccacctgaggaacagatgatttcagcccttcctgacatcaaggtgctgactctcactgacgaccatgaattcatggtcattgcctgtgatggcatctggaatgtgatgagcagccaggaagttgtagatttcattcaatcaaagatcagccagcgtgatgaaaatggggagcttcggttattgtcatccattgtggaagagctgctggatcagtgcctggcaccagacacttctggggatggtacagggtgtgacaacatgacctgcatcatcatttgcttcaagccccgaaacacagcagagctccagccagagagtggcaagcgaaaactagaggaggtgctctctactgagggggctgaagaaaatggcaacagcgacaagaagaagaaggccaagcgagactagcagtcatccagacccctgcccacctagactgttttctgagccctccggacctgagactgagttttgtctttttcctttagccttagcagtgggtatgaggtgtgcagggggagctgggtggcttcactccgcccattccaaagagggctctccctccacactgcagccgggagcctctgctgtccttcccagccgcctctgctcctcgggctcatcaccggttctgtgcctgtgctctgttgtgttggagggaaggactggcggttctggtttttactctgtgaactttatttaaggacattcttttttattggcggctccatggccctcggccgcttgcacccgctctctgttgtacactttcaatcaacactttttcagactaaaggccaaaacct

SEQ ID NO: 387740 - DNA, 2582 bp, Homo sapiens
aggatccttaattaaattattcttccccccccgcgcttccgctccctcacagctcccgtcccgttaccgcctcctgctcctgccgcgcgcacccccggggcttcggctccggcacgggtcgcgcccagctttcctgcacctgaggccgccggccagccgccgccatgggtgcctacctctcccagcccaacacggtgaagtgctccggggacggggtcggcgccccgcgcctgccgctgccctacggcttctccgccatgcaaggctggcgcgtctccatggaggatgctcacaactgtattcctgagctggacagtgagacagccatgttttctgtctacgatggacatggaggggaggaagttgccttgtactgtgccaaatatcttcctgatatcatcaaagatcagaaggcctacaaggaaggcaagctacagaaggctttagaagatgccttcttggctattgacgccaaattgaccactgaagaagtcattaaagagctggcacagattgcagggcgacccactgaggatgaagatgaaaaagaaaaagtagctgatgaagatgatgtggacaatgaggaggctgcactgctgcatgaagaggctaccatgactattgaagagctgctgacacgctacgggcagaactgtcacaagggccctccccacagcaaatctggaggtgggacaggcgaggaaccagggtcccagggcctcaatggggaggcaggacctgaggactcaactagggaaactccttcacaagaaaatggccccacagccaaggcctacacaggcttttcctccaactcggaacgtgggactgaggcaggccaagttggtgagcctggcattcccactggtgaggctgggccttcctgctcttcagcctctgacaagctgcctcgagttgctaagtccaagttctttgaggacagtgaggatgagtcagatgaggcggaggaagaagaggaagacagtgaggaatgcagcgaggaagaggatggctacagcagtgaggaggcagagaatgaggaagatgaggatgacaccgaggaggctgaagaggacgatgaagaagaagaagaagagatgatggtgccagggatggaaggcaaagaggagcctggctctgacagtggtacaacagcggtggtggccctgatacgagggaagcagttgattgtagccaacgcaggagactctcgctgtgtggtatctgaggctggcaaagctttagacatgtcctatgatcacaaaccagaggatgaagtagaactagcacgcatcaagaatgctggtggcaaggtcaccatggatgggcgagtcaacgggggcctcaacctctccagagccattggggaccacttctataagagaaacaagaacctgccacctgaggaacagatgatttcagcccttcctgacatcaaggtgctgactctcactgacgaccatgaattcatggtcattgcctgtgatggcatctggaatgtgatgagcagccaggaagttgtagatttcattcaatcaaagatcagccagcgtgatgaaaatggggagcttcggttattgtcatccattgtggaagagctgctggatcagtgcctggcaccagacacttctggggatggtacagggtgtgacaacatgacctgcatcatcatttgcttcaagccccgaaacacagcagagctccagccagagagtggcaagcgaaaactagaggaggtgctctctactgagggggctgaagaaaatggcaacagcgacaagaagaagaaggccaagcgagactagcagtcatccagacccctgcccacctagactgttttctgagccctccggacctgagactgagttttgtctttttcctttagccttagcagtgggtatgaggtgtgcagggggagctgggtggcttcactccgcccattccaaagagggctctccctccacactgcagccgggagcctctgctgtccttcccagccgcctctgctcctcgggctcatcaccggttctgtgcctgtgctctgttgtgttggagggaaggactggcggttctggtttttactctgtgaactttatttaaggacattcttttttattggcggctccatggccctcggccgcttgcacccgctctctgttgtacactttcaatcaacactttttcagactaaaggccaaaacctaatcgtacgcatcgtgtccttttttttctgctgccgtggcccccgacttggtcccatctgtagcatgtggcgagcccccatgtgagtgtgtgcgtgtgctcgtgtgtgtcctgcgcgtgtataggagagcccagagcgagctgctggtaggccggcctggcgggcgtcgcggctgcccctcgccccctcctgcagccagaaatgatctagttcccccagggacaggttgggaccggtctggctggcctgaagcctggagtcgggcaggacgcctcctgcgctgctccctggccggctccccgctgccgctgattggcttgctccccgcctcgtcacaatcacttcccggtcacgccattgaggctcccgccgcggccgc

SEQ ID NO: 387741 - DNA, 2478 bp, Homo sapiens
aggatccttaattaaattattcttccccccccgcgcttccgctccctcacagctcccgtcccgttaccgcctcctggccggcctcgcgcctttcaccggcaccttgcgtcggtcgcgccgcggggcctgctcctgccgcgcgcacccccggggcttcggctccggcacgggtcgcgcccagctttcctgcacctgaggccgccggccagccgccgccatgggtgcctacctctcccagcccaacacggtgaagtgctccggggacggggtcggcgccccgcgcctgccgctgccctacggcttctccgccatgcaaggctggcgcgtctccatggaggctttagaagatgccttcttggctattgacgccaaattgaccactgaagaagtcattaaagagctggcacagattgcagggcgacccactgaggatgaagatgaaaaagaaaaagtagctgatgaagatgatgtggacaatgaggaggctgcactgctgcatgaagaggctaccatgactattgaagagctgctgacacgctacgggcagaactgtcacaagggccctccccacagcaaatctggaggtgggacaggcgaggaaccaggtcccagggcctcaatggggaggcaggacctgaggactcaactagggaaactccttcacaagaaaatggccccacagccaaggcctacacaggcttttcctccaactcggaacgtgggactgaggcaggccaagttggtgagcctggcattcccactggtgaggctgggccttcctgctcttcagcctctgacaagctgcctcgagttgctaagtccaagttctttgaggacagtgaggatgagtcagatgaggcggaggaagaagaggaagacagtgaggaatgcagcgaggaagaggatggctacagcagtgaggaggcagagaatgaggaagatgaggatgacaccgaggaggctgaagaggacgatgaagaagaagaagaagagatgatggtgccagggatggaaggcaaagaggagcctggctctgacagtggtacaacagcggtggtggccctgatacgagggaagcagttgattgtagccaacgcaggagactctcgctgtgtggtatctgaggctggcaaagctttagacatgtcctatgatcacaaaccagaggatgaagtagaactagcacgcatcaagaatgctggtggcaaggtcaccatggatgggcgagtcaacgggggcctcaacctctccagagccattggggaccacttctataagagaaacaagaacctgccacctgaggaacagatgatttcagcccttcctgacatcaaggtgctgactctcactgacgaccatgaattcatggtcattgcctgtgatggcatctggaatgtgatgagcagccaggaagttgtagatttcattcaatcaaagatcagccagcgtgatgaaaatggggagcttcggttattgtcatccattgtggaagagctgctggatcagtgcctggcaccagacacttctggggatggtacagggtgtgacaacatgacctgcatcatcatttgcttcaagccccgaaacacagcagagctccagccagagagtggcaagcgaaaactagaggaggtgctctctactgagggggctgaagaaaatggcaacagcgacaagaagaagaaggccaagcgagactagcagtcatccagacccctgcccacctagactgttttctgagccctccggacctgagactgagttttgtctttttcctttagccttagcagtgggtatgaggtgtgcagggggagctgggtggcttcactccgcccattccaaagagggctctccctccacactgcagccgggagcctctgctgtccttcccagccgcctctgctcctcgggctcatcaccggttctgtgcctgtgctctgttgtgttggagggaaggactggcggttctggtttttactctgtgaactttatttaaggacattcttttttattggcggctccatggccctcggccgcttgcacccgctctctgttgtacactttcaatcaacactttttcagactaaaggccaaaacctaatcgtacgcatcgtgtccttttttttctgctgccgtggcccccgacttggtcccatctgtagcatgtggcgagcccccatgtgagtgtgtgcgtgtgctcgtgtgtgtcctgcgcgtgtataggagagcccagagcgagctgctggtaggccggcctggcgggcgtcgcggctgcccctcgccccctcctgcagccagaaatgatctagttcccccagggacaggttgggaccggtctggctggcctgaagcctggagtcgggcaggacgcctcctgcgctgctccctggccggctccccgctgccgctgattggcttgctccccgcctcgtcacaatcacttcccggtcacgccattgaggctcccgccgcggccgc

SEQ ID NO: 387742 - DNA, 1905 bp, Homo sapiens
aggatccttaattaaattattcttccccccccgcgcttccgctccctcacagctcccgtcccgttaccgcctcctggccggcctcgcgcctttcaccggcaccttgcgtcggtcgcgccgcggggcctgctcctgccgcgcgcacccccggggcttcggctccggcacgggtcgcgcccagctttcctgcacctgaggccgccggccagccgccgccatgggtgcctacctctcccagcccaacacggtgaagtgctccggggacggggtcggcgccccgcgcctgccgctgccctacggcttctccgccatgcaaggctggcgcgtctccatggaggatgctcacaactgtattcctgagctggacagtgagacagccatgttttctgtctacgatggacatggaggggaggaagttgccttgtactgtgccaaatatcttcctgatatcatcaaagatcagaaggcctacaaggaaggcaagctacagaaggctttagaagatgccttcttggctattgacgccaaattgaccactgaagaagtcattaaagagctggcacagattgcagggcgacccactgaggatgaagatgaaaaagaaaaagtagctgatgaagatgatgtggacaatgaggaggctgcactgctgcatgaagaggctaccatgactattgaagagctgctgacacgctacgggcagaactgtcacaagggccctccccacagcaaatctggaggtgggacaggcgaggaaccagggtcccagggcctcaatggggaggcaggacctgaggactcaactagggaaactccttcacaagaaaatggccccacagccaaggcctacacaggcttttcctccaactcggaacgtgggactgaggcaggccaagttggtgagcctggcattcccactggtgaggctgggccttcctgctcttcagcctctgacaagctgcctcgagttgctaagtccaagttctttgaggacagtgaggatgagtcagatgaggcggaggaagaagaggaagacagtgaggaatgcagcgaggaagaggatggctacagcagtgaggaggcagagaatgaggaagatgaggatgacaccgaggaggctgaagaggacgatgaagaagaagaagaagagatgatggtgccagggatggaaggcaaagaggagcctggctctgacagtggtacaacagcggtggtggccctgatacgagggaagcagttgattgtagccaacgcaggagactctcgctgtgtggtatctgaggctggcaaagctttagacatgtcctatgatcacaaaccagaggatgaagtagaactagcacgcatcaagaatgctggtggcaaggtcaccatggatgggcgagtcaacgggggcctcaacctctccagagccattggggaccacttctataagagaaacaagaacctgccacctgaggaacagatgatttcagcccttcctgacatcaaggtgctgactctcactgacgaccatgaattcatggtcattgcctgtgatggcatctggaatgtgatgagcagccaggaagttgtagatttcattcaatcaaagatcagccagcgtgatgaaaatggggagcttcggttattgtcatccattgtggaagagctgctggatcagtgcctggcaccagacacttctggggatggtacagggtgtgacaacatgacctgcatcatcatttgcttcaagccccgaaacacagcagagctccagccagagaggcggttctggtttttactctgtgaactttatttaaggacattcttttttattggcggctccatggccctcggccgcttgcacccgctctctgttgtacactttcaatcaacactttttcagactaaaggccaaaacct

SEQ ID NO: 387743 - DNA, 1807 bp, Homo sapiens
acaggctagtcaggccggggtgaatcggccgaggcccaactcggaacgtgggactgaggcaggccaagttggtgagcctggcattcccactggtgaggctgggccttcctgctcttcagcctctgacaagctgcctcgagttgctaagtccaagttctttgaggacagtgaggatgagtcagatgaggcggaggaagaagaggaagacagtgaggaatgcagcgaggaagaggatggctacagcagtgaggaggcagagaatgaggaagatgaggatgacaccgaggaggctgaagaggacgatgaagaagaagaagaagagatgatggtgccagggatggaaggcaaagaggagcctggctctgacagtggtacaacagcggtggtggccctgatacgagggaagcagttgattgtagccaacgcaggagactctcgctgtgtggtatctgaggctggcaaagctttagacatgtcctatgatcacaaaccagaggatgaagtagaactagcacgcatcaagaatgctggtggcaaggtcaccatggatgggcgagtcaacgggggcctcaacctctccagagccattggggaccacttctataagagaaacaagaacctgccacctgaggaacagatgatttcagcccttcctgacatcaaggtgctgactctcactgacgaccatgaattcatggtcattgcctgtgatggcatctggaatgtgatgagcagccaggaagttgtagatttcattcaatcaaagatcagccagcgtgatgaaaatggggagcttcggttattgtcatccattgtggaagagctgctggatcagtgcctggcaccagacacttctggggatggtacagggtgtgacaacatgacctgcatcatcatttgcttcaagccccgaaacacagcagagctccagccagagagtggcaagcgaaaactagaggaggtgctctctactgagggggctgaagaaaatggcaacagcgacaagaagaagaaggccaagcgagactagcagtcatccagacccctgcccacctagactgttttctgagccctccggacctgagactgagttttgtctttttcctttagccttagcagtgggtatgaggtgtgcagggggagctgggtggcttcactccgcccattccaaagagggctctccctccacactgcagccgggagcctctgctgtccttcccagccgcctctgctcctcgggctcatcaccggttctgtgcctgtgctctgttgtgttggagggaaggactggcggttctggtttttactctgtgaactttatttaaggacattcttttttattggcggctccatggccctcggccgcttgcacccgctctctgttgtacactttcaatcaacactttttcagactaaaggccaaaacctaatcgtacgcatcgtgtccttttttttctgctgccgtggcccccgacttggtcccatctgtagcatgtggcgagcccccatgtgagtgtgtgcgtgtgctcgtgtgtgtcctgcgcgtgtataggagagcccagagcgagctgctggtaggccggcctggcgggcgtcgcggctgcccctcgccccctcctgcagccagaaatgatctagttcccccagggacaggttgggaccggtctggctggcctgaagcctggagtcgggcaggacgcctcctgcgctgctccctggccggctccccgctgccgctgattggcttgctccccgcctcgtcacaatcacttcccggtcacgccattgaggctcccgccgcggccgc

SEQ ID NO: 387744 - DNA, 1557 bp, Homo sapiens
aggatccttaattaaattattcttccccccccgcgcttccgctccctcacagctcccgtcccgttaccgcctcctggccggcctcgcgcctttcaccggcaccttgcgtcggtcgcgccgcggggcctgctcctgccgcgcgcacccccggggcttcggctccggcacgggtcgcgcccagctttcctgcacctgaggccgccggccagccgccgccatgggtgcctacctctcccagcccaacacggtgaagtgctccggggacggggtcggcgccccgcgcctgccgctgccctacggcttctccgccatgcaaggctggcgcgtctccatggaggatgctcacaactgtattcctgagctggacagtgagacagccatgttttctgtctacgatggacatggaggggaggaagttgccttgtactgtgccaaatatcttcctgatatcatcaaagatcagaaggcctacaaggaaggcaagctacagaaggctttagaagatgccttcttggctattgacgccaaattgaccactgaagaagtcattaaagagctggcacagattgcagggcgacccactgaggatgaagatgaaaaagaaaaagtagctgatgaagatgatgtggacaatgaggaggctgcactgctgcatgaagaggctaccatgactattgaagagctgctgacacgctacgggcagaactgtcacaagggccctccccacagcaaatctggaggtgggacaggcgaggaaccagggtcccagggcctcaatggggaggcaggacctgaggactcaactagggaaactccttcacaagaaaatggccccacagccaaggcctacacaggcttttcctccaactcggaacgtgggactgaggcaggccaagttggtgagcctggcattcccactggtgaggctgggccttcctgctcttcagcctctgacaagctgcctcgagttgctaagtccaagttctttgaggacagtgaggatgagtcagatgaggcggaggaagaagaggaagacagtgaggaatgcagcgaggaagaggatggctacagcagtgaggaggcagagaatgaggaagatgaggatgacaccgaggaggctgaagaggacgatgaagaagaagaagaagagatgatggtgccagggatggaaggcaaagaggagcctggctctgacagtggtacaacagcggtggtggccctgatacgagggaagcagttgattgtagccaacgcaggagactctcgctgtgtggtatctgaggctggcaaagctttagacatgtcctatgatcacaaaccagaggatgaagtagaactagcacgcatcaagaatgctggtggcaaggtcaccatggatgggcgagtcaacgggggcctcaacctctccagagccattgggcggttctggtttttactctgtgaactttatttaaggacattcttttttattggcggctccatggccctcggccgcttgcacccgctctctgttgtacactttcaatcaacactttttcagactaaaggccaaaacct

SEQ ID NO: 387745 - DNA, 1772 bp, Homo sapiens
attagctaggtagagcctggttgatcggccaagttggtgagcctggcattcccactggtgaggctgggccttcctgctcttcagcctctgacaagctgcctcgagttgctaagtccaagttctttgaggacagtgaggatgagtcagatgaggcggaggaagaagaggaagacagtgaggaatgcagcgaggaagaggatggctacagcagtgaggaggcagagaatgaggaagatgaggatgacaccgaggaggctgaagaggacgatgaagaagaagaagaagagatgatggtgccagggatggaaggcaaagaggagcctggctctgacagtggtacaacagcggtggtggccctgatacgagggaagcagttgattgtagccaacgcaggagactctcgctgtgtggtatctgaggctggcaaagctttagacatgtcctatgatcacaaaccagaggatgaagtagaactagcacgcatcaagaatgctggtggcaaggtcaccatggatgggcgagtcaacgggggcctcaacctctccagagccattggggaccacttctataagagaaacaagaacctgccacctgaggaacagatgatttcagcccttcctgacatcaaggtgctgactctcactgacgaccatgaattcatggtcattgcctgtgatggcatctggaatgtgatgagcagccaggaagttgtagatttcattcaatcaaagatcagccagcgtgatgaaaatggggagcttcggttattgtcatccattgtggaagagctgctggatcagtgcctggcaccagacacttctggggatggtacagggtgtgacaacatgacctgcatcatcatttgcttcaagccccgaaacacagcagagctccagccagagagtggcaagcgaaaactagaggaggtgctctctactgagggggctgaagaaaatggcaacagcgacaagaagaagaaggccaagcgagactagcagtcatccagacccctgcccacctagactgttttctgagccctccggacctgagactgagttttgtctttttcctttagccttagcagtgggtatgaggtgtgcagggggagctgggtggcttcactccgcccattccaaagagggctctccctccacactgcagccgggagcctctgctgtccttcccagccgcctctgctcctcgggctcatcaccggttctgtgcctgtgctctgttgtgttggagggaaggactggcggttctggtttttactctgtgaactttatttaaggacattcttttttattggcggctccatggccctcggccgcttgcacccgctctctgttgtacactttcaatcaacactttttcagactaaaggccaaaacctaatcgtacgcatcgtgtccttttttttctgctgccgtggcccccgacttggtcccatctgtagcatgtggcgagcccccatgtgagtgtgtgcgtgtgctcgtgtgtgtcctgcgcgtgtataggagagcccagagcgagctgctggtaggccggcctggcgggcgtcgcggctgcccctcgccccctcctgcagccagaaatgatctagttcccccagggacaggttgggaccggtctggctggcctgaagcctggagtcgggcaggacgcctcctgcgctgctccctggccggctccccgctgccgctgattggcttgctccccgcctcgtcacaatcacttcccggtcacgccattgaggctcccgccgcggccgc

SEQ ID NO: 387746 - DNA, 1647 bp, Homo sapiens
aaaacttacggctaggtagcgaggctgggtggtgaagaagaggaagacagtgaggaatgcagcgaggaagaggatggctacagcagtgaggaggcagagaatgaggaagatgaggatgacaccgaggaggctgaagaggacgatgaagaagaagaagaagagatgatggtgccagggatggaaggcaaagaggagcctggctctgacagtggtacaacagcggtggtggccctgatacgagggaagcagttgattgtagccaacgcaggagactctcgctgtgtggtatctgaggctggcaaagctttagacatgtcctatgatcacaaaccagaggatgaagtagaactagcacgcatcaagaatgctggtggcaaggtcaccatggatgggcgagtcaacgggggcctcaacctctccagagccattggggaccacttctataagagaaacaagaacctgccacctgaggaacagatgatttcagcccttcctgacatcaaggtgctgactctcactgacgaccatgaattcatggtcattgcctgtgatggcatctggaatgtgatgagcagccaggaagttgtagatttcattcaatcaaagatcagccagcgtgatgaaaatggggagcttcggttattgtcatccattgtggaagagctgctggatcagtgcctggcaccagacacttctggggatggtacagggtgtgacaacatgacctgcatcatcatttgcttcaagccccgaaacacagcagagctccagccagagagtggcaagcgaaaactagaggaggtgctctctactgagggggctgaagaaaatggcaacagcgacaagaagaagaaggccaagcgagactagcagtcatccagacccctgcccacctagactgttttctgagccctccggacctgagactgagttttgtctttttcctttagccttagcagtgggtatgaggtgtgcagggggagctgggtggcttcactccgcccattccaaagagggctctccctccacactgcagccgggagcctctgctgtccttcccagccgcctctgctcctcgggctcatcaccggttctgtgcctgtgctctgttgtgttggagggaaggactggcggttctggtttttactctgtgaactttatttaaggacattcttttttattggcggctccatggccctcggccgcttgcacccgctctctgttgtacactttcaatcaacactttttcagactaaaggccaaaacctaatcgtacgcatcgtgtccttttttttctgctgccgtggcccccgacttggtcccatctgtagcatgtggcgagcccccatgtgagtgtgtgcgtgtgctcgtgtgtgtcctgcgcgtgtataggagagcccagagcgagctgctggtaggccggcctggcgggcgtcgcggctgcccctcgccccctcctgcagccagaaatgatctagttcccccagggacaggttgggaccggtctggctggcctgaagcctggagtcgggcaggacgcctcctgcgctgctccctggccggctccccgctgccgctgattggcttgctccccgcctcgtcacaatcacttcccggtcacgccattgaggctcccgccgcggccgc

SEQ ID NO: 387747 - DNA, 1094 bp, Homo sapiens
aggatccttaattaaattattcttccccccccgcgcttccgctccctcacagctcccgtcccgttaccgcctcctggccggcctcgcgcctttcaccggcaccttgcgtcggtcgcgccgcggggcctgctcctgccgcgcgcacccccggggcttcggctccggcacgggtcgcgcccagctttcctgcacctgaggccgccggccagccgccgccatgggtgcctacctctcccagcccaacacggtgaagtgctccggggacggggtcggcgccccgcgcctgccgctgccctacggcttctccgccatgcaaggctggcgcgtctccatggaggatgctcacaactgtattcctgagctggacagtgagacagccatgttttctgtctacgatggacatggaggggaggaagttgccttgtactgtgccaaatatcttcctgatatcatcaaagatcagaaggcctacaaggaaggcaagctacagaaggctttagaagatgccttcttggctattgacgccaaattgaccactgaagaagtcattaaagagctggcacagattgcagggcgacccactgaggatgaagatgaaaaagaaaaagtagctgatgaagatgatgtggacaatgaggaggctgcactgctgcatgaagaggctaccatgactattgaagagctgctgacacgctacgggcagaactgtcacaagggccctccccacagcaaatctggaggtgggacaggcgaggaaccagggtcccagggcctcaatggggaggcaggacctgaggactcaactagggaaactccttcacaagaaaatggccccacagccaaggcctacacaggcttttcctccaactcggaacgtgggactgaggcaggccaagttggtgagcctggcattcccactggtgaggctgggccttcctgctcttcagcctctgacaagctgcctcgagttgctaagtccaagttctttgaggacagtgaggatgagtcagatgaggcggaggaagaagaggaagacagtgagaatgcagcgcgtaagggccagcacgcgcgtaaggcgcgctaaggtcagcagt

SEQ ID NO: 387748 - DNA, 1007 bp, Homo sapiens
aggatccttaattaaattattcttccccccccgcgcttccgctccctcacagctcccgtcccgttaccgcctcctggccggcctcgcgcctttcaccggcaccttgcgtcggtcgcgccgcggggcctgctcctgccgcgcgcacccccggggcttcggctccggcacgggtcgcgcccagctttcctgcacctgaggccgccggccagccgccgccatgggtgcctacctctcccagcccaacacggtgaagtgctccggggacggggtcggcgccccgcgcctgccgctgccctacggcttctccgccatgcaaggctggcgcgtctccatggaggatgctcacaactgtattcctgagctggacagtgagacagccatgttttctgtctacgatggacatggaggggaggaagttgccttgtactgtgccaaatatcttcctgatatcatcaaagatcagaaggcctacaaggaaggcaagctacagaaggctttagaagatgccttcttggctattgacgccaaattgaccactgaagaagtcattaaagagctggcacagattgcagggcgacccactgaggatgaagatgaaaaagaaaaagtagctgatgaagatgatgtggacaatgaggaggctgcactgctgcatgaagaggctaccatgactattgaagagctgctgacacgctacgggcagaactgtcacaagggccctccccacagcaaatctggaggtgggacaggcgaggaaccagggtcccagggcctcaatggggaggcaggacctgaggactcaactagggaaactccttcacaagaaaatggccccacagccaaggcctacacaggcttttcctccaactcggaacgtgggactgaggcaggccaagttgtgaccggctccctgtgaggggcttctgcttaacctgaaagtgctcaatgtaacagtttggaacgcagaacacaagggagaagagagaacgcgggaagtacagggaaaa

SEQ ID NO: 387749 - DNA, 1393 bp, Homo sapiens
ccggcacaagcgtggaaagccgagccccaggtgatctgccaggcgcgatgtaggtcagcacgaaacgcagcttgtacagcacgtcccacagcttgctgaaagcagggacatgaggaagtagtcaagcagaaagccctgggagaggcgcgggggcctcaacctctccagagccattggggaccacttctataagagaaacaagaacctgccacctgaggaacagatgatttcagcccttcctgacatcaaggtgctgactctcactgacgaccatgaattcatggtcattgcctgtgatggcatctggaatgtgatgagcagccaggaagttgtagatttcattcaatcaaagatcagccagcgtgatgaaaatggggagcttcggttattgtcatccattgtggaagagctgctggatcagtgcctggcaccagacacttctggggatggtacagggtgtgacaacatgacctgcatcatcatttgcttcaagccccgaaacacagcagagctccagccagagagtggcaagcgaaaactagaggaggtgctctctactgagggggctgaagaaaatggcaacagcgacaagaagaagaaggccaagcgagactagcagtcatccagacccctgcccacctagactgttttctgagccctccggacctgagactgagttttgtctttttcctttagccttagcagtgggtatgaggtgtgcagggggagctgggtggcttcactccgcccattccaaagagggctctccctccacactgcagccgggagcctctgctgtccttcccagccgcctctgctcctcgggctcatcaccggttctgtgcctgtgctctgttgtgttggagggaaggactggcggttctggtttttactctgtgaactttatttaaggacattcttttttattggcggctccatggccctcggccgcttgcacccgctctctgttgtacactttcaatcaacactttttcagactaaaggccaaaacctaatcgtacgcatcgtgtccttttttttctgctgccgtggcccccgacttggtcccatctgtagcatgtggcgagcccccatgtgagtgtgtgcgtgtgctcgtgtgtgtcctgcgcgtgtataggagagcccagagcgagctgctggtaggccggcctggcgggcgtcgcggctgcccctcgccccctcctgcagccagaaatgatctagttcccccagggacaggttgggaccggtctggctggcctgaagcctggagtcgggcaggacgcctcctgcgctgctccctggccggctccccgctgccgctgattggcttgctccccgcctcgtcacaatcacttcccggtcacgccattgaggctcccgccgcggccgc

SEQ ID NO: 387750 - DNA, 868 bp, Homo sapiens
aggatccttaattaaattattcttccccccccgcgcttccgctccctcacagctcccgtcccgttaccgcctcctggccggcctcgcgcctttcaccggcaccttgcgtcggtcgcgccgcggggcctgctcctgccgcgcgcacccccggggcttcggctccggcacgggtcgcgcccagctttcctgcacctgaggccgccggccagccgccgccatgggtgcctacctctcccagcccaacacggtgaagtgctccggggacggggtcggcgccccgcgcctgccgctgccctacggcttctccgccatgcaaggctggcgcgtctccatggaggatgctcacaactgtattcctgagctggacagtgagacagccatgttttctgtctacgatggacatggaggggaggaagttgccttgtactgtgccaaatatcttcctgatatcatcaaagatcagaaggcctacaaggaaggcaagctacagaaggctttagaagatgccttcttggctattgacgccaaattgaccactgaagaagtcattaaagagctggcacagattgcagggcgacccactgaggatgaagatgaaaaagaaaaagtagctgatgaagatgatgtggacaatgaggaggctgcactgctgcatgaagaggctaccatgactattgaagagctgctgacacgctacgggcagaactgtcacaagggccctccccacagcaaatctggaggtgggacaggcgaggaaccagggtcccagggcctcaatggggaggcaggacctgaggactcaactagggaggaaatcttcaagaattgccaagcagacaaaaggatctcaatcgacgtgatgggcatt

SEQ ID NO: 387751 - DNA, 934 bp, Homo sapiens
  misc_feature (241)..(241): n is a, c, g, or t
  misc_feature (255)..(255): n is a, c, g, or t
  misc_feature (261)..(261): n is a, c, g, or t
aaaccccccaattgtctttaaagcccttggaaaaatccccggggtattccaggattttttggccaaaagccctttcccatttaattcttccccactaatggctttcaccaaacaatttagactttaagtgcagtactcttttaattacccccgccccaaatttgggttccccaaaaattgaatgtttgttttcaaacgaatattaggcatttgctcgtcaaatgtggttgttaataaaccnaatgttccaacggncccccnagtatcaattgttctctactggttatgctccagcttcgtgggcctttcacagaatttgctgctgcgttctcctggatttcgccaactttgccgaataccatcgaccaagtcagattcagaaactccttataaagacatatttgctgcctttaataccaagttcatttcaagaaaatgacatattttccaataattttgaaacagttgcaggagtcactatcatctaaatgtatttagacttagaaattcagatgttacttgatttccttttatttaaaatcattaacttcatgaaatattgtaggttaagatgtaatccagaccaggcacagtggctcatgcctgtaatcccagcactttgggaggtcgaggtgggtggatcacctgaggtctggagtttgagaccagcctggccaacatggtgaaaccctgtctgtactaaaataacaaaaaaattagctgggcttagtggcaggtgcctgtaatcccagctacttgggaggctgaggcaggagaatcgcttgaacctggaatacagaggtttcagtgagctgagatcaccccattgcactccagcctggacaacaagagtgaaacgctatcaaagaaaaaaaaaagatgtaatccagatatatttgacagtaattaaaatcttttaaatgttataaatgca

SEQ ID NO: 387752 - DNA, 2021 bp, Homo sapiens
tgttgctggcgcgtgcgcgtatcagccttggctggccggtgtatgtccgctggattgtgaggcccgggatctgggctccgccgtggtgcagaaatgctgtgccggctcggcggtcggtggctgcggccgctccctgccctgcagctttgggctagggacctgccgcttgcgccggttcctacgagcggcgccaagcgccccactctcccagtgtgggcagtggcaccagtctctgcagtacatgcgaacggctggtacgaggccctggccgcgtcttcgccggtgcgggttgcggaggaagtactgctcggcgtgcacgccgccacgggcctgccctggtggggcagcattctgctctccaccgtggccttacggggtgctgtcacgctgcctttggcagcctaccagcactacatcctggccaagctaggtggaaaatttgcagccagaaataaaaactattgccaggcatcttaaccaagaagttgcagttcgtgcaaatcagttggggtggtccaaaagagatgccaggctcacttatctaaagaatatgaggaggctaatttcagagctatatgtgcgagataactgccaccctttcaaagccactgtgttggtttggattcagcttccaatgtggatcttcatgtcttttgctctccggaatttaagcacgggggcagcacattcagaaggtttttctgttcaggaacagttagctactggtggaattctgtggtttcctgacctcactgcacccgactccacttggattctgcctatctctgttggcgtcatcaatttgttaatagtggagatttgtgctctacaaaaaattggaatgtctcgttttcagacgtatattacgtactttgtccgtgcaatgtcggtgttgatgataccaattgctgcaacggtaccctcatcaattgttctctactggttatgctccagcttcgtgggcctttcacagaatttgctgctgcgttctcctggatttcgccaactttgccgaataccatcgaccaagtcagattcagaaactccttataaagacatatttgctgcctttaataccaagttcatttcaagaaaatgacatattttccaataattttgaaacagttgcaggagtcactatcatctaaatgtatttagacttagaaattcagatgttacttgatttccttttatttaaaatcattaacttcatgaaatattgtaggttaagatgtaatccactgtgcccagctgagatgtttcttattattttggaggtggagaggattttagacctctttgagcatctgaaaaaaggctatatatgtatggttttctcttcagaaaaatcttaagactcacaatacggggacttccttgttaccaggaagattttctggcaattcctagttaataaatcttattctaatggaacatacattgatcttgagttaatgcgtggttgaaaaaaaaagcgggggcaacttgaaatatatgcagtaaagtagtccatgcatacaagtccctaacatggtagatgatgttgcctcccggccctgctcagaaagaatacaaaaagtgtacattcctttttctataatttaagaagtctggaatacagagtgtaacactgtgtactgctagcacccaaagtggaaaatcttaagcattcagattgtttagtcaaagaagaaaaccagaagggcagttgcctattgaggtgattttaaacctgtttatttgtaaggattaagtaccctaataggcttaaactatgatagaggtttaatacagaaaaaattgacaggtattataaattgtggatccagttacttgcttatttaatttgtaaagaggtaaaattagctctggttgagatatcaagtatggcaggtatttgagaaggctataaatcataattttcatttagttaaaatatggacctgattctgggaaaccctatcattccatctcaatgttttacaataaaataaaaactaaagtgaaattcattagtcatt

SEQ ID NO: 387753 - DNA, 2074 bp, Homo sapiens
tgttgctggcgcgtgcgcgtatcagccttggctggccggtgtatgtccgctggattgtgaggcccgggatctgggctccgccgtggtgcagaaatgctgtgccggctcggcggtcggtggctgcggccgctccctgccctgcagctttgggctagggacctgccgcttgcgccggttcctacgagcggcgccaagcgccccactctcccagtgtgggcagtggcaccagtctctgcagtacatgcgaacggctggtacgaggccctggccgcgtcttcgccggtgcgggttgcggaggaagtactgctcggcgtgcacgccgccacgggcctgccctggtggggcagcattctgctctccaccgtggccttacggggtgctgtcacgctgcctttggcagcctaccagcactacatcctggccaagctaggtggaaaatttgcagccagaaataaaaactattgccaggcatcttaaccaagaagttgcagttcgtgcaaatcagttggggtggtccaaaagagatgccaggctcacttatctaaagaatatgaggaggctaatttcagagctatatgtgcgagataactgccaccctttcaaagccactgtgttggtttggattcagcttccaatgtggatcttcatgtcttttgctctccggaatttaagcacgggggcagcacattcagaaggtttttctgttcaggaacagttagctactggtggaattctgtggtttcctgacctcactgcacccgactccacttggattctgcctatctctgttggcgtcatcaatttgttaatagtggagatttgtgctctacaaaaaattggaatgtctcgttttcagacgtatattacgtactttgtccgtgcaatgtcggtgttgatgataccaattgctgcaacggtaccctcatcaattgttctctactggttatgctccagcttcgtgggcctttcacagaatttgctgctgcgttctcctggatttcgccaactttgccgaataccatcgaccaagtcagattcagaaactccttataaagacatatttgctgcctttaataccaagttcatttcaagaaaatgacatattttccaataattttgaaacagttgcaggagtcactatcatctaaatgtatttagacttagaaattcagatgttacttgatttccttttatttaaaatcattaacttcatgaaatattgtaggttaagatgtaatccagaccaggcacagtggctcatgccccaaagtgctgggattacaggcgtgagccactgtgcccagctgagatgtttcttattattttggaggtggagaggattttagacctctttgagcatctgaaaaaaggctatatatgtatggttttctcttcagaaaaatcttaagactcacaatacggggacttccttgttaccaggaagattttctggcaattcctagttaataaatcttattctaatggaacatacattgatcttgagttaatgcgtggttgaaaaaaaaagcgggggcaacttgaaatatatgcagtaaagtagtccatgcatacaagtccctaacatggtagatgatgttgcctcccggccctgctcagaaagaatacaaaaagtgtacattcctttttctataatttaagaagtctggaatacagagtgtaacactgtgtactgctagcacccaaagtggaaaatcttaagcattcagattgtttagtcaaagaagaaaaccagaagggcagttgcctattgaggtgattttaaacctgtttatttgtaaggattaagtaccctaataggcttaaactatgatagaggtttaatacagaaaaaattgacaggtattataaattgtggatccagttacttgcttatttaatttgtaaagaggtaaaattagctctggttgagatatcaagtatggcaggtatttgagaaggctataaatcataattttcatttagttaaaatatggacctgattctgggaaaccctatcattccatctcaatgttttacaataaaataaaaactaaagtgaaattcattagtcatt

SEQ ID NO: 387754 - DNA, 2052 bp, Homo sapiens
  misc_feature (2016)..(2016): n is a, c, g, or t
  misc_feature (2021)..(2022): n is a, c, g, or t
tgttgctggcgcgtgcgcgtatcagccttggctggccggtgtatgtccgctggattgtgaggcccgggatctgggctccgccgtggtgcagaaatgctgtgccggctcggcggtcggtggctgcggccgctccctgccctgcagctttgggctagggacctgccgcttgcgccggttcctacgagcggcgccaagcgccccactctcccagtgtgggcagtggcaccagtctctgcagtacatgcgaacggctggtacgaggccctggccgcgtcttcgccggtgcgggttgcggaggaagtactgctcggcgtgcacgccgccacgggcctgccctggtggggcagcattctgctctccaccgtggccttacggggtgctgtcacgctgcctttggcagcctaccagcactacatcctggccaagctaggtggaaaatttgcagccagaaataaaaactattgccaggcatcttaaccaagaagttgcagttcgtgcaaatcagttggggtggtccaaaagagatgccaggctcacttatctaaagaatatgaggaggctaatttcagagctatatgtgcgagataactgccaccctttcaaagccactgtgttggtttggattcagcttccaatgtggatcttcatgtcttttgctctccggaatttaagcacgggggcagcacattcagaaggtttttctgttcaggaacagttagctactggtggaattctgtggtttcctgacctcactgcacccgactccacttggattctgcctatctctgttggcgtcatcaatttgttaatagtggagatttgtgctctacaaaaaattggaatgtctcgttttcagacgtatattacgtactttgtccgtgcaatgtcggtgttgatgataccaattgctgcaacggtaccctcatcaattgttctctactggttatgctccagcttcgtgggcctttcacagaatttgctgctgcgttctcctggatttcgccaactttgccgaataccatcgaccaagtcagattcagaaactccttataaagacatatttgctgcctttaataccaagttcatttcaagaaaatgacatattttccaataattttgaaacagttgcaggagtcactatcatctaaatgtatttagacttagaaattcagatgttacttgatttccttttatttaaaatcattaacttcatgaaatattgtaggttaagatgtaatccactgtgcccagctgagatgtttcttattattttggaggtggagaggattttagacctctttgagcatctgaaaaaaggctatatatgtatggttttctcttcagaaaaatcttaagactcacaatacggggacttccttgttaccaggaagattttctggcaattcctagttaataaatcttattctaatggaacatacattgatcttgagttaatgcgtggttgaaaaaaaaagcgggggcaacttgaaatatatgcagtaaagtagtccatgcatacaagtccctaacatggtagatgatgttgcctcccggccctgctcagaaagaatacaaaaagtgtacattcctttttctataatttaagaagtctggaatacagagtgtaacactgtgtactgctagcacccaaagtggaaaatcttaagcattcagattgtttagtcaaagaagaaaaccagaagggcagttgcctattgaggtgattttaaacctgtttatttgtaaggattaagtaccctaataggcttaaactatgatagaggtttaatacagaaaaaattgacaggtattataaattgtggatccagttacttgcttatttaatttgtaaagaggtaaaattagctctggttgagatatcaagtatggcaggtatttgagaaggctataaatcataattttcatttagttaaaatatggacctgattctgggaaaccctatcattccatctcaatgttttacaataaaataaaaacgatgcgtccagattcctnttttnncccaccaatctcaccacctccttctcctcc

SEQ ID NO: 387755 - DNA, 1104 bp, Homo sapiens
gattacaggcatgagccacctcacccagcattttttttttttaatttttttaatgagacagagtctctctctgtcacctaggctggagtgcagtggcacgatctcggctcactgcaacctctgcctcccgtgttcaagcaattctcctacctcagcctactgggtagctgggactacaggggtgcaccaccatgcccagctaagttttgtatttttagtagagatgggatttcaccatgttggctaggctggtcttgaactcctggcctcaagtgatctgcccaccttggcctcccaaagtgctgggattacaggcgtgagccactgtgcccagctgagatgtttcttattattttggaggtggagaggattttagacctctttgagcatctgaaaaaaggctatatatgtatggttttctcttcagaaaaatcttaagactcacaatacggggacttccttgttaccaggaagattttctggcaattcctagttaataaatcttattctaatggaacatacattgatcttgagttaatgcgtggttgaaaaaaaaagcgggggcaacttgaaatatatgcagtaaagtagtccatgcatacaagtccctaacatggtagatgatgttgcctcccggccctgctcagaaagaatacaaaaagtgtacattcctttttctataatttaagaagtctggaatacagagtgtaacactgtgtactgctagcacccaaagtggaaaatcttaagcattcagattgtttagtcaaagaagaaaaccagaagggcagttgcctattgaggtgattttaaacctgtttatttgtaaggattaagtaccctaataggcttaaactatgatagaggtttaatacagaaaaaattgacaggtattataaattgtggatccagttacttgcttatttaatttgtaaagaggtaaaattagctctggttgagatatcaagtatggcaggtatttgagaaggctataaatcataattttcatttagttaaaatatggacctgattctgggaaaccctatcattccatctcaatgttttacaataaaataaaaactaaagtgaaattcattagtcatt

SEQ ID NO: 387756 - DNA, 1204 bp, Homo sapiens
atttgcctgttgtttaggcaactccttaacatgcctgtgacagctgaaacccttatacaaatcctttagctaataactacagcaggcgctatttgtgctatggaaataaagcacgattcttagatgacatttttttttttttaatttttttaatgagacagagtctctctctgtcacctaggctggagtgcagtggcacgatctcggctcactgcaacctctgcctcccgtgttcaagcaattctcctacctcagcctactgggtagctgggactacaggggtgcaccaccatgcccagctaagttttgtatttttagtagagatgggatttcaccatgttggctaggctggtcttgaactcctggcctcaagtgatctgcccaccttggcctcccaaagtgctgggattacaggcgtgagccactgtgcccagctgagatgtttcttattattttggaggtggagaggattttagacctctttgagcatctgaaaaaaggctatatatgtatggttttctcttcagaaaaatcttaagactcacaatacggggacttccttgttaccaggaagattttctggcaattcctagttaataaatcttattctaatggaacatacattgatcttgagttaatgcgtggttgaaaaaaaaagcgggggcaacttgaaatatatgcagtaaagtagtccatgcatacaagtccctaacatggtagatgatgttgcctcccggccctgctcagaaagaatacaaaaagtgtacattcctttttctataatttaagaagtctggaatacagagtgtaacactgtgtactgctagcacccaaagtggaaaatcttaagcattcagattgtttagtcaaagaagaaaaccagaagggcagttgcctattgaggtgattttaaacctgtttatttgtaaggattaagtaccctaataggcttaaactatgatagaggtttaatacagaaaaaattgacaggtattataaattgtggatccagttacttgcttatttaatttgtaaagaggtaaaattagctctggttgagatatcaagtatggcaggtatttgagaaggctataaatcataattttcatttagttaaaatatggacctgattctgggaaaccctatcattccatctcaatgttttacaataaaataaaaactaaagtgaaattcattagtcatt

SEQ ID NO: 387757 - DNA, 2105 bp, Homo sapiens
  misc_feature (2069)..(2069): n is a, c, g, or t
  misc_feature (2074)..(2075): n is a, c, g, or t
tgttgctggcgcgtgcgcgtatcagccttggctggccggtgtatgtccgctggattgtgaggcccgggatctgggctccgccgtggtgcagaaatgctgtgccggctcggcggtcggtggctgcggccgctccctgccctgcagctttgggctagggacctgccgcttgcgccggttcctacgagcggcgccaagcgccccactctcccagtgtgggcagtggcaccagtctctgcagtacatgcgaacggctggtacgaggccctggccgcgtcttcgccggtgcgggttgcggaggaagtactgctcggcgtgcacgccgccacgggcctgccctggtggggcagcattctgctctccaccgtggccttacggggtgctgtcacgctgcctttggcagcctaccagcactacatcctggccaagctaggtggaaaatttgcagccagaaataaaaactattgccaggcatcttaaccaagaagttgcagttcgtgcaaatcagttggggtggtccaaaagagatgccaggctcacttatctaaagaatatgaggaggctaatttcagagctatatgtgcgagataactgccaccctttcaaagccactgtgttggtttggattcagcttccaatgtggatcttcatgtcttttgctctccggaatttaagcacgggggcagcacattcagaaggtttttctgttcaggaacagttagctactggtggaattctgtggtttcctgacctcactgcacccgactccacttggattctgcctatctctgttggcgtcatcaatttgttaatagtggagatttgtgctctacaaaaaattggaatgtctcgttttcagacgtatattacgtactttgtccgtgcaatgtcggtgttgatgataccaattgctgcaacggtaccctcatcaattgttctctactggttatgctccagcttcgtgggcctttcacagaatttgctgctgcgttctcctggatttcgccaactttgccgaataccatcgaccaagtcagattcagaaactccttataaagacatatttgctgcctttaataccaagttcatttcaagaaaatgacatattttccaataattttgaaacagttgcaggagtcactatcatctaaatgtatttagacttagaaattcagatgttacttgatttccttttatttaaaatcattaacttcatgaaatattgtaggttaagatgtaatccagaccaggcacagtggctcatgccccaaagtgctgggattacaggcgtgagccactgtgcccagctgagatgtttcttattattttggaggtggagaggattttagacctctttgagcatctgaaaaaaggctatatatgtatggttttctcttcagaaaaatcttaagactcacaatacggggacttccttgttaccaggaagattttctggcaattcctagttaataaatcttattctaatggaacatacattgatcttgagttaatgcgtggttgaaaaaaaaagcgggggcaacttgaaatatatgcagtaaagtagtccatgcatacaagtccctaacatggtagatgatgttgcctcccggccctgctcagaaagaatacaaaaagtgtacattcctttttctataatttaagaagtctggaatacagagtgtaacactgtgtactgctagcacccaaagtggaaaatcttaagcattcagattgtttagtcaaagaagaaaaccagaagggcagttgcctattgaggtgattttaaacctgtttatttgtaaggattaagtaccctaataggcttaaactatgatagaggtttaatacagaaaaaattgacaggtattataaattgtggatccagttacttgcttatttaatttgtaaagaggtaaaattagctctggttgagatatcaagtatggcaggtatttgagaaggctataaatcataattttcatttagttaaaatatggacctgattctgggaaaccctatcattccatctcaatgttttacaataaaataaaaacgatgcgtccagattcctnttttnncccaccaatctcaccacctccttctcctcc

SEQ ID NO: 387758 - DNA, 2070 bp, Homo sapiens
  misc_feature (2018)..(2018): n is a, c, g, or t
  misc_feature (2021)..(2022): n is a, c, g, or t
  misc_feature (2031)..(2031): n is a, c, g, or t
tgttgctggcgcgtgcgcgtatcagccttggctggccggtgtatgtccgctggattgtgaggcccgggatctgggctccgccgtggtgcagaaatgctgtgccggctcggcggtcggtggctgcggccgctccctgccctgcagctttgggctagggacctgccgcttgcgccggttcctacgagcggcgccaagcgccccactctcccagtgtgggcagtggcaccagtctctgcagtacatgcgaacggctggtacgaggccctggccgcgtcttcgccggtgcgggttgcggaggaagtactgctcggcgtgcacgccgccacgggcctgccctggtggggcagcattctgctctccaccgtggccttacggggtgctgtcacgctgcctttggcagcctaccagcactacatcctggccaagctaggtggaaaatttgcagccagaaataaaaactattgccaggcatcttaaccaagaagttgcagttcgtgcaaatcagttggggtggtccaaaagagatgccaggctcacttatctaaagaatatgaggaggctaatttcagagctatatgtgcgagataactgccaccctttcaaagccactgtgttggtttggattcagcttccaatgtggatcttcatgtcttttgctctccggaatttaagcacgggggcagcacattcagaaggtttttctgttcaggaacagttagctactggtggaattctgtggtttcctgacctcactgcacccgactccacttggattctgcctatctctgttggcgtcatcaatttgttaatagtggagatttgtgctctacaaaaaattggaatgtctcgttttcagacgtatattacgtactttgtccgtgcaatgtcggtgttgatgataccaattgctgcaacggtaccctcatcaattgttctctactggttatgctccagcttcgtgggcctttcacagaatttgctgctgcgttctcctggatttcgccaactttgccgaataccatcgaccaagtcagattcagaaactccttataaagacatatttgctgcctttaataccaagttcatttcaagaaaatgacatattttccaataattttgaaacagttgcaggagtcactatcatctaaatgtatttagacttagaaattcagatgttacttgatttccttttatttaaaatcattaacttcatgaaatattgtaggttaagatgtaatccactgtgcccagctgagatgtttcttattattttggaggtggagaggattttagacctctttgagcatctgaaaaaaggctatatatgtatggttttctcttcagaaaaatcttaagactcacaatacggggacttccttgttaccaggaagattttctggcaattcctagttaataaatcttattctaatggaacatacattgatcttgagttaatgcgtggttgaaaaaaaaagcgggggcaacttgaaatatatgcagtaaagtagtccatgcatacaagtccctaacatggtagatgatgttgcctcccggccctgctcagaaagaatacaaaaagtgtacattcctttttctataatttaagaagtctggaatacagagtgtaacactgtgtactgctagcacccaaagtggaaaatcttaagcattcagattgtttagtcaaagaagaaaaccagaagggcagttgcctattgaggtgattttaaacctgtttatttgtaaggattaagtaccctaataggcttaaactatgatagaggtttaatacagaaaaaattgacaggtattataaattgtggatccagttacttgcttatttaatttgtaaagaggtaaaattagctctggttgagatatcaagtatggcaggtatttgagaaggctataaatcataattttcatttagttaaaatatggacctgattctgggaaaccctatcattccatctcaatgttttacaataaaataaaaacagtgttcgcgccggcaaggncgnngcttttctntgtgtctccgccgccgcacttccccccccgccgttgata

SEQ ID NO: 387759 - DNA, 1594 bp, Homo sapiens
tgttgctggcgcgtgcgcgtatcagccttggctggccggtgtatgtccgctggattgtgaggcccgggatctgggctccgccgtggtgcagaaatgctgtgccggctcggcggtcggtggctgcggccgctccctgccctgcagctttgggctagggacctgccgcttgcgccggttcctacgagcggcgccaagcgccccactctcccagtgtgggcagtggcaccagtctctgcagtacatgcgaacggctggtacgaggccctggccgcgtcttcgccggtgcgggttgcggaggaagtactgctcggcgtgcacgccgccacgggcctgccctggtggggcagcattctgctctccaccgtggccttacggggtgctgtcacgctgcctttggcagcctaccagcactacatcctggccaagctaggtggaaaatttgcagccagaaataaaaactattgccaggcatcttaaccaagaagttgcagttcgtgcaaatcagttggggtggtccaaaagagatgccaggctcacttatctaaagaatatgaggaggctaatttcagagctatatgtgcgagataactgccaccctttcaaagccactgtgttggtttggattcagcttccaatgtggatcttcatgtcttttgctctccggaatttaagcacgggggcagcacattcagaaggtttttctgttcaggaacagttagctactggtggaattctgtggtttcctgacctcactgcacccgactccacttggattctgcctatctctgttggcgtcatcaatttgttaatagtggagatttgtgctctacaaaaaattggaatgtctcgttttcagacgtatattacgtactttgtccgtgcaatgtcggtgttgatgataccaattgctgcaacggtaccctcatcaattgttctctactggttatgctccagcttcgtgggcctttcacagaatttgctgctgcgttctcctggatttcgccaactttgccgaataccatcgaccaagtcagattcagaaactccttataaagacatatttgctgcctttaataccaagttcatttcaagaaaatgacatattttccaataattttgaaacagttgcaggagtcactatcatctaaatgtatttagacttagaaattcagatgttacttgatttccttttatttaaaatcattaacttcatgaaatattgtaggttaagatgtaatccagaccaggcacagtggctcatgcctgtaatcccagcactttgggaggtcgaggtgggtggatcacctgaggtctggagtttgagaccagcctggccaacatggtgaaaccctgtctgtactaaaataacaaaaaaattagctgggcttagtggcaggtgcctgtaatcccagctacttgggaggctgaggcaggagaatcgcttgaacctggaatacagaggtttcagtgagctgagatcaccccattgcactccagcctggacaacaagagtgaaacgctatcaaagaaaaaaaaaagatgtaatccagatatatttgacagtaattaaaatcttttaaatgttataaatgca

SEQ ID NO: 387760 - DNA, 1918 bp, Homo sapiens
tgttgctggcgcgtgcgcgtatcagccttggctggccggtgtatgtccgctggattgtgaggcccgggatctgggctccgccgtggtgcagaaatgctgtgccggctcggcggtcggtggctgcggccgctccctgccctgcagctttgggctagggacctgccgcttgcgccggttcctacgagcggcgccaagcgccccactctcccagtgtgggcagtggcaccagtctctgcagtacatgcgaacggctggtacgaggccctggccgcgtcttcgccggtgcgggttgcggaggaagtactgctcggcgtgcacgccgccacgggcctgccctggtggggcagcattctgctctccaccgtggccttacggggtgctgtcacgctgcctttggcagcctaccagcactacatcctggccaagctaggtggaaaatttgcagccagaaataaaaactattgccaggcatcttaaccaagaagttgcagttcgtgcaaatcagttggggtggtccaaaagagatgccaggctcacttatctaaagaatatgaggaggctaatttcagagctatatgtgcgagataactgccaccctttcaaagccactgtgttggtttggattcagcttccaatgtggatcttcatgtcttttgctctccggaatttaagcacgggggcagcacattcagaaggtttttctgttcaggaacagttagctactggtggaattctgtggtttcctgacctcactgcacccgactccacttggattctgcctatctctgttggcgtcatcaatttgttaatagtggagatttgtgctctacaaaaaattggaatgtctcgttttcagacgtatattacgtactttgtccgtgcaatgtcggtgttgatgataccaattgctgcaacggtaccctcatcaattgttctctactggttatgctccagcttcgtgggcctttcacagaatttgctgctgcgttctcctggatttcgccaactttgccgaataccatcgaccaagtcagattcagaaactccttataaagacatatttgctgcctttaataccaagttcatttcaagaaaatgacatattttcccaaagtgctgggattacaggcgtgagccactgtgcccagctgagatgtttcttattattttggaggtggagaggattttagacctctttgagcatctgaaaaaaggctatatatgtatggttttctcttcagaaaaatcttaagactcacaatacggggacttccttgttaccaggaagattttctggcaattcctagttaataaatcttattctaatggaacatacattgatcttgagttaatgcgtggttgaaaaaaaaagcgggggcaacttgaaatatatgcagtaaagtagtccatgcatacaagtccctaacatggtagatgatgttgcctcccggccctgctcagaaagaatacaaaaagtgtacattcctttttctataatttaagaagtctggaatacagagtgtaacactgtgtactgctagcacccaaagtggaaaatcttaagcattcagattgtttagtcaaagaagaaaaccagaagggcagttgcctattgaggtgattttaaacctgtttatttgtaaggattaagtaccctaataggcttaaactatgatagaggtttaatacagaaaaaattgacaggtattataaattgtggatccagttacttgcttatttaatttgtaaagaggtaaaattagctctggttgagatatcaagtatggcaggtatttgagaaggctataaatcataattttcatttagttaaaatatggacctgattctgggaaaccctatcattccatctcaatgttttacaataaaataaaaactaaagtgaaattcattagtcatt

SEQ ID NO: 387761 - DNA, 1790 bp, Homo sapiens
tgttgctggcgcgtgcgcgtatcagccttggctggccggtgtatgtccgctggattgtgaggcccgggatctgggctccgccgtggtgcagaaatgctgtgccggctcggcggtcggtggctgcggccgctccctgccctgcagctttgggctagggacctgccgcttgcgccggttcctacgagcggcgccaagcgccccactctcccagtgtgggcagtggcaccagtctctgcagtacatgcgaacggctggtacgaggccctggccgcgtcttcgccggtgcgggttgcggaggaagtactgctcggcgtgcacgccgccacgggcctgccctggtggggcagcattctgctctccaccgtggccttacggggtgctgtcacgctgcctttggcagcctaccagcactacatcctggccaagctaggtggaaaatttgcagccagaaataaaaactattgccaggcatcttaaccaagaagttgcagttcgtgcaaatcagttggggtggtccaaaagagatgccaggctcacttatctaaagaatatgaggaggctaatttcagagctatatgtgcgagataactgccaccctttcaaagccactgtgttggtttggattcagcttccaatgtggatcttcatgtcttttgctctccggaatttaagcacgggggcagcacattcagaaggtttttctgttcaggaacagttagctactggtggaattctgtggtttcctgacctcactgcacccgactccacttggattctgcctatctctgttggcgtcatcaatttgttaatagtggagatttgtgctctacaaaaaattggaatgtctcgttttcagacgtatattacgtactttgtccgtgcaatgtcggtgttgatgataccaattgctgcaacggtaccctcatcaattgttctctactggttatgctccagcttcgtgggcctttcacagaatttgcccaaagtgctgggattacaggcgtgagccactgtgcccagctgagatgtttcttattattttggaggtggagaggattttagacctctttgagcatctgaaaaaaggctatatatgtatggttttctcttcagaaaaatcttaagactcacaatacggggacttccttgttaccaggaagattttctggcaattcctagttaataaatcttattctaatggaacatacattgatcttgagttaatgcgtggttgaaaaaaaaagcgggggcaacttgaaatatatgcagtaaagtagtccatgcatacaagtccctaacatggtagatgatgttgcctcccggccctgctcagaaagaatacaaaaagtgtacattcctttttctataatttaagaagtctggaatacagagtgtaacactgtgtactgctagcacccaaagtggaaaatcttaagcattcagattgtttagtcaaagaagaaaaccagaagggcagttgcctattgaggtgattttaaacctgtttatttgtaaggattaagtaccctaataggcttaaactatgatagaggtttaatacagaaaaaattgacaggtattataaattgtggatccagttacttgcttatttaatttgtaaagaggtaaaattagctctggttgagatatcaagtatggcaggtatttgagaaggctataaatcataattttcatttagttaaaatatggacctgattctgggaaaccctatcattccatctcaatgttttacaataaaataaaaactaaagtgaaattcattagtcatt

SEQ ID NO: 387762 - DNA, 1243 bp, Homo sapiens
ctagctggaacgactctcttaatttttccaccgctacagatttgtgctctacaaaaaattggaatgtctcgttttcagacgtatattacgtactttgtccgtgcaatgtcggtgttgatgataccaattgctgcaacggtaccctcatcaattgttctctactggttatgctccagcttcgtgggcctttcacagaatttgctgctgcgttctcctggatttcgccaactttgccgaataccatcgaccaagtcagattcagaaactccttataaagacatatttgctgcctttaataccaagttcatttcaagaaaatgacatattttccaataattttgaaacagttgcaggagtcactatcatctaaatgtatttagacttagaaattcagatgttacttgatttccttttatttaaaatcattaacttcatgaaatattgtaggttaagatgtaatccactgtgcccagctgagatgtttcttattattttggaggtggagaggattttagacctctttgagcatctgaaaaaaggctatatatgtatggttttctcttcagaaaaatcttaagactcacaatacggggacttccttgttaccaggaagattttctggcaattcctagttaataaatcttattctaatggaacatacattgatcttgagttaatgcgtggttgaaaaaaaaagcgggggcaacttgaaatatatgcagtaaagtagtccatgcatacaagtccctaacatggtagatgatgttgcctcccggccctgctcagaaagaatacaaaaagtgtacattcctttttctataatttaagaagtctggaatacagagtgtaacactgtgtactgctagcacccaaagtggaaaatcttaagcattcagattgtttagtcaaagaagaaaaccagaagggcagttgcctattgaggtgattttaaacctgtttatttgtaaggattaagtaccctaataggcttaaactatgatagaggtttaatacagaaaaaattgacaggtattataaattgtggatccagttacttgcttatttaatttgtaaagaggtaaaattagctctggttgagatatcaagtatggcaggtatttgagaaggctataaatcataattttcatttagttaaaatatggacctgattctgggaaaccctatcattccatctcaatgttttacaataaaataaaaactaaagtgaaattcattagtcatt

SEQ ID NO: 387763 - DNA, 301 bp, Homo sapiens
ctggcaaaggtggcagatggagatgcccagagtgctaccctcaactttctacaggccgcggctgcccactgcacgaactgggacctacagcagggcctgctgcgggtctgccgggcgctgctgcgggcaggggtgaggggcggcctggtcgacttgctgcaggtgctggccaggcagctggaggaccctgatgggcgtgaccacgcccgcctctactacatcctgctggcacacctggcagcacccaagttgggggtggccctgggcccctcgcttgccgcacctgcactggcctcttcac

SEQ ID NO: 387764 - DNA, 2684 bp, Homo sapiens
gctaggagagtcggtggtgaatcggccgaggggtggccgagaaccagggctttgtggcagcactgatggtgcaggaggcaccggccctggtacggctgagcctggggtcccatcgggtcaagggcccactcccagtgttgaagctccagccggaggcgctggagcccatctactctctggagctgcgcttccgtgtggaaggacagctgtatgcacccctggaggctgtccatgtgccctgcctgtgtcctggccgccctgcccgccctctgctcctgcctctgcagccccgatgcccggcccccgcacggctggatgtccatgccctttacaccacatccactggtctcacgtgccatgcccacttgccacccctgttcgtgaactttgccgacctctttctgcctttcccgcagcctccagagggggccgggctgggcttctttgaggagctctgggattcctgcctgccagagggtgctgagagtcgtgtgtggtgtccacttgggccacagggcctggagggcttggtgtcccgccacctggagccttttgtggtggtggcccagcctcctaccagctactgtgtagcaatccacctgcccccggactcaaagctgctgctgcggctggaggcggccctggcagatggagtgcctgtggccctgcggaccgatgactgggccgtgctgcccctggcgggggactacctccgtgggctggcggctgctgtctgagccccgggagaccaggtgggggcaggactgtggcccttgtgggggccaaggcacactcctgtagctctgtcgccaaaaccctgcattccgcagtgccctcgctggcttgttttcttttgggccccggttgggagcaggctcctgggggtgagggtctgtctgagtctgtttttgctgctctagcaagatccctgagacggggtaagttataataaacagaaatgtattggctcagagctctggaggctgggaagtccatagtggagggcccagagcccagtgaggacccttctgcatcttcccatgacagaggacagagtgacaggagtgaggggagagagcgaacccactcccaagataacggcctgagtccacgcaggagggcagagccctcgtggcctgaccacctcttagggtctaatcttatactgttacagtggcaatcgcatttcaacgtgagcgtgggaggggacaaacattcaaaccatagcagggtcataggccccaagaaggcttccagacagaacccggcactgtagagctacagagttccttctcacccagacacactagtgctctccagaatctctgcccaggaggcaggggaaaaatctcctttctgcttcccagagagggtctggccttgcccaaggccactcagtgatttaggaagaaggctgaagctagagtgtggacctgacctgttggacagtacttttctttctttttttttcggggaggggttaaagacaggatctcgctctggcgctctggagtgcagtggtgtgattagggatcattgcagactctgcctctcaggctcaggtgatcctcccatctcagcctgcctccgagtagctgggactacaggtgtgagtcaccactgtattttttgcagacaggatctccctgtttcctaggctggtctcgaactcctgggcttaaatgactcttctgcctcagcctcaccaaagtgttgggattactggtgtgagcccccacacctggccgagccagcgcttctcaactcccaaggtttgcaagctccctgccccagggagctcacgccaggcaggccagtgggcctaagccagaaacagaaagacagcagtggccaggtggagagcttcccaagctgtgccgattagagccagctctaggaagggcctgctaataaggtctagggtctgagaccaagttttttctaatctcagcccctaagaaacctaatttgtgcttaggaatcttcccaggtaagaagaactagttcctctagttgttgtttttttttcccaaacatgcaaacactgaggattgagctgtgtggggtcagctgtgctgccaggcacatgtacgttgcctcatttcatccttgcaacagctctgcagggccccgcagatgaggaaatccgtaggcaggagcggttgagtgattttcctaaggtcacccagctgtttggtaatagtgttttgtcatctggtagcaggtttccattaccatgccatcagagcagacctcagccagggccacagaggtcccaaccgtctctgccctcttctgctgcccctgcctcatgggctcccagccacaggttccccatgggccagctttacgcctcctgatccttccgattggggcagactaggagaggaaagacgggcctgggctgggtgcggtggctcatgcctgtaatcccagcactttgagaggctgaggcgggtggatcacctgaggccaggtgtttgagatcagcctggccagcatggcgaaaccctgtgtctaataaaaatacaaaaattagccgggcgtggtggcgggcgcctgtaatcccagctacttgggaggctgaggcaggagaattacttgaacctgggaggcagaagttgcagtgagccgagatcacgccactgcactccagcctgggcgacagagcaaggctctgtctc

SEQ ID NO: 387765 - DNA, 3342 bp, Homo sapiens
ggccacctccctgttggacaccttggtcctcctacccccgcgggtagcgatctggggcgaggctttgtccccgcctcggaacagcgccccttgcaggccacggcctgcgagtgcctgcgagagctagagagctgcaagcccgggctgctggggggctccctggggttgctgcggggcctgctggggcaggaaggccctgtccagccactcagcctgttgctggccctcgctttgcgcaacaccttggtgctccagtcccgggttggggctggcctggggggactgctcacggataaggtctccccaactgggggtggtccctgggattggacactagtggaggagggcgatggacgccttcagccccaggcacccagctggccggcagctgaggagggagagggggagcgtagccttacagcacgagagcacagccctgaggaggcgcgggagctgcgggctgcggtgatccagcttctggacacctcctatctgctcactcctgtggcccaggcccagctcctgtggctgctgggctgggccctgcggggtctgcagggacagccaccggcactcttcaagccgcagctggtacggctgctaggcacagcacagctgacactgttgcacgccatgcttgcgctcaaggcggcctttggtgaggccttgttcacagcccaggatgaagcgttgctgctccgccggctcaccttggctgcccagcaccctgctctgcctccgcccacccatctcttttaccttcactgcgtcctgagcttccctgagaactggccgctgggccctgaaggtgaggaggctgccccactgctgctagggccccagctatgccgtggtctcctgcccagtctcctgcatgacccaatggccctcctggcccgcctgcatttactgtgcctgctctgtgccgaggaggaagaagaggagaaaggccagcttccaagcccacggcactacctggaagagctgctggctggcttgcggcagcgggcagccctggatgggggcccccgggccttggccactctctgcttccaggcctcgtatctggtggcctgctgcctggctgggcaacctacggtgctgacccccttgatccacggactggcccagctgtaccaagcccggcccatgctggctccccactttgtggacctcttggatcaggtggactctgagctgagggagcccctgaaggtggtggcccagcctcctaccagctactgtgtagcaatccacctgcccccggactcaaagctgctgctgcggctggaggcggccctggcagatggagtgcctgtggccctgcggaccgatgactgggccgtgctgcccctggcgggggactacctccgtgggctggcggctgctgtctgagccccgggagaccaggtgggggcaggactgtggcccttgtgggggccaaggcacactcctgtagctctgtcgccaaaaccctgcattccgcagtgccctcgctggcttgttttcttttgggccccggttgggagcaggctcctgggggtgagggtctgtctgagtctgtttttgctgctctagcaagatccctgagacggggtaagttataataaacagaaatgtattggctcagagctctggaggctgggaagtccatagtggagggcccagagcccagtgaggacccttctgcatcttcccatgacagaggacagagtgacaggagtgaggggagagagcgaacccactcccaagataacggcctgagtccacgcaggagggcagagccctcgtggcctgaccacctcttagggtctaatcttatactgttacagtggcaatcgcatttcaacgtgagcgtgggaggggacaaacattcaaaccatagcagggtcataggccccaagaaggcttccagacagaacccggcactgtagagctacagagttccttctcacccagacacactagtgctctccagaatctctgcccaggaggcaggggaaaaatctcctttctgcttcccagagagggtctggccttgcccaaggccactcagtgatttaggaagaaggctgaagctagagtgtggacctgacctgttggacagtacttttctttctttttttttcggggaggggttaaagacaggatctcgctctggcgctctggagtgcagtggtgtgattagggatcattgcagactctgcctctcaggctcaggtgatcctcccatctcagcctgcctccgagtagctgggactacaggtgtgagtcaccactgtattttttgcagacaggatctccctgtttcctaggctggtctcgaactcctgggcttaaatgactcttctgcctcagcctcaccaaagtgttgggattactggtgtgagcccccacacctggccgagccagcgcttctcaactcccaaggtttgcaagctccctgccccagggagctcacgccaggcaggccagtgggcctaagccagaaacagaaagacagcagtggccaggtggagagcttcccaagctgtgccgattagagccagctctaggaagggcctgctaataaggtctagggtctgagaccaagttttttctaatctcagcccctaagaaacctaatttgtgcttaggaatcttcccaggtaagaagaactagttcctctagttgttgtttttttttcccaaacatgcaaacactgaggattgagctgtgtggggtcagctgtgctgccaggcacatgtacgttgcctcatttcatccttgcaacagctctgcagggccccgcagatgaggaaatccgtaggcaggagcggttgagtgattttcctaaggtcacccagctgtttggtaatagtgttttgtcatctggtagcaggtttccattaccatgccatcagagcagacctcagccagggccacagaggtcccaaccgtctctgccctcttctgctgcccctgcctcatgggctcccagccacaggttccccatgggccagctttacgcctcctgatccttccgattggggcagactaggagaggaaagacgggcctgggctgggtgcggtggctcatgcctgtaatcccagcactttgagaggctgaggcgggtggatcacctgaggccaggtgtttgagatcagcctggccagcatggcgaaaccctgtgtctaataaaaatacaaaaattagccgggcgtggtggcgggcgcctgtaatcccagctacttgggaggctgaggcaggagaattacttgaacctgggaggcagaagttgcagtgagccgagatcacgccactgcactccagcctgggcgacagagcaaggctctgtctc

SEQ ID NO: 387766 - DNA, 175 bp, Homo sapiens
ttctctgccctcaatacctgcagcacaaaaggtcataataaaagctcgttgtaaggatgactcctcagaggagtgtgctgagttgggggtaaatgtggggatggggacatgccatccctgcttctgtgtttcctccagttgtgtttctagggtgggcctgaggtgggtacagcag

SEQ ID NO: 387767 - DNA, 3611 bp, Homo sapiens
tatgcatggagtggacctgtaggcgacttgcatcgtcttcaacatgaagatagccacagtgtcagtgcttctgcccttggctctttgcctcatacaagatgctgccagtaagaatgaagatcaggaaatgtgccatgaatttcaggcatttatgaaaaatggaaaactgttctgtccccaggataagaaattttttcaaagtcttgatggaataatgttcatcaataaatgtgccacgtgcaaaatgatactggaaaaagaagcaaaatcacagaagagggccaggcatttagcaagagctcccaaggctactgccccaacagagctgaattgtgatgattttaaaaaaggagaaagagatggggattttatctgtcctgattattatgaagctgtttgtggcacagatgggaaaacatatgacaacagatgtgcactgtgtgctgagaatgcgaaaaccgggtcccaaattggtgtaaaaagtgaaggggaatgtaagagcagtaatccagagcaggatgtatgcagtgcttttcggccctttgttagagatggaagacttggatgcacaagggaaaatgatcctgttcttggtcctgatgggaagacgcatggcaataagtgtgcaatgtgtgctgagctgtttttaaaagaagctgaaaatgccaagcgagagggtgaaactagaattcgacgaaatgctgaaaaggatttttgcaaggaatatgaaaaacaagtgagaaatggaaggcttttttgtacacgggagagtgatccagtccgtggccctgacggcaggatgcatggcaacaaatgtgccctgtgtgctgaaattttcaagcggcgtttttcagaggaaaacagtaaaacagatcaaaatttgggaaaagctgaagaaaaaactaaagttaaaagagaaattgtgaaactctgcagtcaatatcaaaatcaggcaaagaatggaatacttttctgtaccagagaaaatgaccctattcgtggtccagatgggaaaatgcatggcaacttgtgttccatgtgtcaagcctacttccaagcagaaaatgaagaaaagaaaaaggctgaagcacgagctagaaacaaaagagaatctggaaaagcaacctcatatgcagagctttgcagtgaatatcgaaagcttgtgaggaacggaaaacttgcttgcaccagagagaacgatcctatccagggcccagatgggaaagtgcatggcaacacctgctccatgtgtgaggtcttcttccaagcagaagaagaagaaaagaaaaagaaggaaggtgaatcaagaaacaaaagacaatctaagagtacagcttcctttgaggagttgtgtagtgaataccgcaaatccaggaaaaacggacggcttttttgcaccagagagaatgaccccatccagggcccagatgggaaaatgcatggcaacacctgctccatgtgtgaggccttctttcaacaagaagaaagagcaagagcaaaggctaaaagagaagctgcaaaggaaatctgcagtgaatttcgggaccaagtgaggaatggaacacttatatgcaccagggagcataatcctgtccgtggcccagatggcaaaatgcatggaaacaagtgtgccatgtgtgccagtgtgttcaaacttgaagaagaagagaagaaaaatgataaagaagaaaaagggaaagtcgaggctgaaaaagttaagagagaagcagttcaggagctgtgcagtgaatatcgtcattatgtgaggaatggacgactcccctgtaccagagagaatgatcctattgagggtctagatgggaaaatccacggcaacacctgctccatgtgtgaagccttcttccagcaagaagcaaaagaaaaagaaagagctgaacccagagcaaaagtcaaaagagaagctgaaaaggagacatgcgatgaatttcggagacttttgcaaaatggaaaacttttctgcacaagagaaaatgatcctgtgcgtggcccagatggcaagacccatggcaacaagtgtgccatgtgtaaggcagtcttccagaaagaaaatgaggaaagaaagaggaaagaagaggaagatcagagaaatgctgcaggacatggttccagtggtggtggaggaggaaacactcaggacgaatgtgctgagtatcgggaacaaatgaaaaatggaagactcagctgtactcgggagagtgatcctgtacgtgatgctgatggcaaatcgtacaacaatcagtgtaccatgtgtaaagcaaaattggaaagagaagcagagagaaaaaatgagtattctcgctccagatcaaatgggactggatcagaatcagggaaggatacatgtgatgagtttagaagccaaatgaaaaatggaaaacttatctgcactcgagaaagtgaccctgtccggggtccagatggcaagacacatggtaataagtgtactatgtgtaaggaaaaactggaaagggaagcagctgaaaaaaaaaagaaagaggatgaagacaggagcaatacaggagaaaggagcaatacaggagaaaggagcaatgacaaagaggatctgtgtcgtgaatttcgaagcatgcagagaaatggaaagcttatctgcaccagagaaaataaccctgttcgaggcccatatggcaagatgcacatcaataaatgtgctatgtgtcagagcatctttgatcgagaagctaatgaaagaaaaaagaaagatgaagagaaatcaagtagcaagccctcaaataatgcaaaggatgagtgcagtgaatttcgaaactatataaggaacaatgaactcatctgccctagagagaatgacccagtgcacggtgctgatggaaagttctatacaaacaagtgctacatgtgcagagctgtctttctaacagaagctttggaaagggcaaagcttcaagaaaagccatcccatgttagagcttctcaagaggaagacagcccagactctttcagttctctggattctgagatgtgcaaagactaccgagtattgcccaggataggctatctttgtccaaaggatttaaagcctgtctgtggtgacgatggccaaacctacaacaatccttgcatgctctgtcatgaaaacctgatacgccaaacaaatacacacatccgcagtacagggaagtgtgaggagagcagcaccccaggaaccaccgcagccagcatgcccccgtctgacgaatgacaggaagattgttgaaagccatgagggaaaaaataaaccccagttctgaatcacctaccttcaccatctgtatatacaaagaattcttcggagcttgtcttatttgctatagaaaacaatacagagcttttgggaatggactcactgattttcagtcttttccatctctttcctcctagactctgtgatctgagggtataaagacatctccaccaagtctgagccctcaaaatgtcctgattacaatgctgtctgtccaactgcctgttcaataaaagtaaactcagcagaacacccaaactgggatttctttgtcactatctggataatagatatttgcttttaaagaaactgaaaaaaaactacccttttg

SEQ ID NO: 387768 - DNA, 562 bp, Homo sapiens
cccttgccatttactccatgggatgagtgcagtgaatttcgaaactatataaggaacaatgaactcatctgccctagagagaatgacccagtgcacggtgctgatggaaagttctatacaaacaagtgctacatgtgcagagctgtctttctaacagaagctttggaaagggcaaagcttcaagaaaagccatcccatgttagagcttctcaagaggaagacagcccagactctttcagttctctggattctgagatgtgcaaagactaccgagtattgcccaggataggctatctttgtccaaaggatttaaagcctgtctgtggtgacgatggccaaacctacaacaatccttgcatgctctgtcatgaaaacctgatacgccaaacaaatacacacatccgcagtacagggaagtgtgaggagagcagcaccccaggaaccaccgcagccagcatgcccccgtctgacgaatgacaggaagattgttgaaagccatggagtaaatggcatgccatttactccatggcgtagccggtaacatggaatactgatccaaaca

SEQ ID NO: 387769 - DNA, 3102 bp, Homo sapiens
tctagaggatccctgagagaccgtgttgcatgtgtgctgagctgtttttaaaagaagctgaaaatgccaagcgagagggtgaaactagaattcgacgaaatgctgaaaaggatttttgcaaggaatatgaaaaacaagtgagaaatggaaggcttttttgtacacgggagagtgatccagtccgtggccctgacggcaggatgcatggcaacaaatgtgccctgtgtgctgaaattttcaagcggcgtttttcagaggaaaacagtaaaacagatcaaaatttgggaaaagctgaagaaaaaactaaagttaaaagagaaattgtgaaactctgcagtcaatatcaaaatcaggcaaagaatggaatacttttctgtaccagagaaaatgaccctattcgtggtccagatgggaaaatgcatggcaacttgtgttccatgtgtcaagcctacttccaagcagaaaatgaagaaaagaaaaaggctgaagcacgagctagaaacaaaagagaatctggaaaagcaacctcatatgcagagctttgcagtgaatatcgaaagcttgtgaggaacggaaaacttgcttgcaccagagagaacgatcctatccagggcccagatgggaaagtgcatggcaacacctgctccatgtgtgaggtcttcttccaagcagaagaagaagaaaagaaaaagaaggaaggtgaatcaagaaacaaaagacaatctaagagtacagcttcctttgaggagttgtgtagtgaataccgcaaatccaggaaaaacggacggcttttttgcaccagagagaatgaccccatccagggcccagatgggaaaatgcatggcaacacctgctccatgtgtgaggccttctttcaacaagaagaaagagcaagagcaaaggctaaaagagaagctgcaaaggaaatctgcagtgaatttcgggaccaagtgaggaatggaacacttatatgcaccagggagcataatcctgtccgtggcccagatggcaaaatgcatggaaacaagtgtgccatgtgtgccagtgtgttcaaacttgaagaagaagagaagaaaaatgataaagaagaaaaagggaaagtcgaggctgaaaaagttaagagagaagcagttcaggagctgtgcagtgaatatcgtcattatgtgaggaatggacgactcccctgtaccagagagaatgatcctattgagggtctagatgggaaaatccacggcaacacctgctccatgtgtgaagccttcttccagcaagaagcaaaagaaaaagaaagagctgaacccagagcaaaagtcaaaagagaagctgaaaaggagacatgcgatgaatttcggagacttttgcaaaatggaaaacttttctgcacaagagaaaatgatcctgtgcgtggcccagatggcaagacccatggcaacaagtgtgccatgtgtaaggcagtcttccagaaagaaaatgaggaaagaaagaggaaagaagaggaagatcagagaaatgctgcaggacatggttccagtggtggtggaggaggaaacactcaggacgaatgtgctgagtatcgggaacaaatgaaaaatggaagactcagctgtactcgggagagtgatcctgtacgtgatgctgatggcaaatcgtacaacaatcagtgtaccatgtgtaaagcaaaattggaaagagaagcagagagaaaaaatgagtattctcgctccagatcaaatgggactggatcagaatcagggaaggatacatgtgatgagtttagaagccaaatgaaaaatggaaaacttatctgcactcgagaaagtgaccctgtccggggtccagatggcaagacacatggtaataagtgtactatgtgtaaggaaaaactggaaagggaagcagctgaaaaaaaaaagaaagaggatgaagacaggagcaatacaggagaaaggagcaatacaggagaaaggagcaatgacaaagaggatctgtgtcgtgaatttcgaagcatgcagagaaatggaaagcttatctgcaccagagaaaataaccctgttcgaggcccatatggcaagatgcacatcaataaatgtgctatgtgtcagagcatctttgatcgagaagctaatgaaagaaaaaagaaagatgaagagaaatcaagtagcaagccctcaaataatgcaaaggaccagtgcagacaggttcagaatgaagcagaggatgcaaaatttagacaacctgggcgttccttggcctctgttgccaggatgagtacagatgagtgcagtgaatttcgaaactatataaggaacaatgaactcatctgccctagagagaatgacccagtgcacggtgctgatggaaagttctatacaaacaagtgctacatgtgcagagctgtctttctaacagaagctttggaaagggcaaagcttcaagaaaagccatcccatgttagagcttctcaagaggaagacagcccagactctttcagttctctggattctgagatgtgcaaagactaccgagtattgcccaggataggctatctttgtccaaaggatttaaagcctgtctgtggtgacgatggccaaacctacaacaatccttgcatgctctgtcatgaaaacctgatacgccaaacaaatacacacatccgcagtacagggaagtgtgaggagagcagcaccccaggaaccaccgcagccagcatgcccccgtctgacgaatgacaggaagattgttgaaagccatgagggaaaaaataaaccccagttctgaatcacctaccttcaccatctgtatatacaaagaattcttcggagcttgtcttatttgctatagaaaacaatacagagcttttgggaatggactcactgattttcagtcttttccatctctttcctcctagactctgtgatctgagggtataaagacatctccaccaagtctgagccctcaaaatgtcctgattacaatgctgtctgtccaactgcctgttcaataaaagtaaactcagcagaacacccaaactgggatttctttgtcactatctggataatagatatttgcttttaaagaaactgaaaaaaaactacccttttg

SEQ ID NO: 387770 - DNA, 1718 bp, Homo sapiens
agtcaagtccttcttatgctttatcattctcacactgactgtcctgccgctgcctctctctttaatgagtaagaacctttgtgattacatgggccccacttggataatccagggtaacttccccattttaaattcaactgattagcaatcttaattccatattcaaccataattcctccttgccacgtaaagcaacatatttggaggttccaggaattagaacatagacgtctctctctgtgggacattattttgcctatcacagcaaggttacatggctgcctgactcttggaaagaaatcctctgattctcaaatccaatcaaatattatgtaaaaacagcacttccaatataatcttcccatcttttcaggatacatgtgatgagtttagaagccaaatgaaaaatggaaaacttatctgcactcgagaaagtgaccctgtccggggtccagatggcaagacacatggtaataagtgtactatgtgtaaggaaaaactggaaagggaagcagctgaaaaaaaaaagaaagaggatgaagacaggagcaatacaggagaaaggagcaatacaggagaaaggagcaatgacaaagaggatctgtgtcgtgaatttcgaagcatgcagagaaatggaaagcttatctgcaccagagaaaataaccctgttcgaggcccatatggcaagatgcacatcaataaatgtgctatgtgtcagagcatctttgatcgagaagctaatgaaagaaaaaagaaagatgaagagaaatcaagtagcaagccctcaaataatgcaaaggaccagtgcagacaggttcagaatgaagcagaggatgcaaaatttagacaacctgggcgttccttggcctctgttgccaggatgagtacagatgagtgcagtgaatttcgaaactatataaggaacaatgaactcatctgccctagagagaatgacccagtgcacggtgctgatggaaagttctatacaaacaagtgctacatgtgcagagctgtctttctaacagaagctttggaaagggcaaagcttcaagaaaagccatcccatgttagagcttctcaagaggaagacagcccagactctttcagttctctggattctgagatgtgcaaagactaccgagtattgcccaggataggctatctttgtccaaaggatttaaagcctgtctgtggtgacgatggccaaacctacaacaatccttgcatgctctgtcatgaaaacctgatacgccaaacaaatacacacatccgcagtacagggaagtgtgaggagagcagcaccccaggaaccaccgcagccagcatgcccccgtctgacgaatgacaggaagattgttgaaagccatgagggaaaaaataaaccccagttctgaatcacctaccttcaccatctgtatatacaaagaattcttcggagcttgtcttatttgctatagaaaacaatacagagcttttgggaatggactcactgattttcagtcttttccatctctttcctcctagactctgtgatctgagggtataaagacatctccaccaagtctgagccctcaaaatgtcctgattacaatgctgtctgtccaactgcctgttcaataaaagtaaactcagcagaacacccaaactgggatttctttgtcactatctggataatagatatttgcttttaaagaaactgaaaaaaaactacccttttg

SEQ ID NO: 387771 - DNA, 2978 bp, Homo sapiens
tatgcatggagtggacctgtaggcgacttgcatcgtcttcaacatgaagatagccacagtgtcagtgcttctgcccttggctctttgcctcatacaagatgctgccagtaagaatgaagatcaggaaatgtgccatgaatttcaggcatttatgaaaaatggaaaactgttctgtccccaggataagaaattttttcaaagtcttgatggaataatgttcatcaataaatgtgccacgtgcaaaatgatactggaaaaagaagcaaaatcacagaagagggccaggcatttagcaagagctcccaaggctactgccccaacagagctgaattgtgatgattttaaaaaaggagaaagagatggggattttatctgtcctgattattatgaagctgtttgtggcacagatgggaaaacatatgacaacagatgtgcactgtgtgctgagaatgcgaaaaccgggtcccaaattggtgtaaaaagtgaaggggaatgtaagagcagtaatccagagcaggatgtatgcagtgcttttcggccctttgttagagatggaagacttggatgcacaagggaaaatgatcctgttcttggtcctgatgggaagacgcatggcaataagtgtgcaatgtgtgctgagctgtttttaaaagaagctgaaaatgccaagcgagagggtgaaactagaattcgacgaaatgctgaaaaggatttttgcaaggaatatgaaaaacaagtgagaaatggaaggcttttttgtacacgggagagtgatccagtccgtggccctgacggcaggatgcatggcaacaaatgtgccctgtgtgctgaaattttcaagcggcgtttttcagaggaaaacagtaaaacagatcaaaatttgggaaaagctgaagaaaaaactaaagttaaaagagaaattgtgaaactctgcagtcaatatcaaaatcaggcaaagaatggaatacttttctgtaccagagaaaatgaccctattcgtggtccagatgggaaaatgcatggcaacttgtgttccatgtgtcaagcctacttccaagcagaaaatgaagaaaagaaaaaggctgaagcacgagctagaaacaaaagagaatctggaaaagcaacctcatatgcagagctttgcagtgaatatcgaaagcttgtgaggaacggaaaacttgcttgcaccagagagaacgatcctatccagggcccagatgggaaagtgcatggcaacacctgctccatgtgtgaggtcttcttccaagcagaagaagaagaaaagaaaaagaaggaaggtgaatcaagaaacaaaagacaatctaagagtacagcttcctttgaggagttgtgtagtgaataccgcaaatccaggaaaaacggacggcttttttgcaccagagagaatgaccccatccagggcccagatgggaaaatgcatggcaacacctgctccatgtgtgaggccttctttcaacaagaagaaagagcaagagcaaaggctaaaagagaagctgcaaaggaaatctgcagtgaatttcgggaccaagtgaggaatggaacacttatatgcaccagggagcataatcctgtccgtggcccagatggcaaaatgcatggaaacaagtgtgccatgtgtgccagtgtgttcaaacttgaagaagaagagaagaaaaatgataaagaagaaaaagggaaagtcgaggctgaaaaagttaagagagaagcagttcaggagctgtgcagtgaatatcgtcattatgtgaggaatggacgactcccctgtaccagagagaatgatcctattgagggtctagatgggaaaatccacggcaacacctgctccatgtgtgaagccttcttccagcaagaagcaaaagaaaaagaaagagctgaacccagagcaaaagtcaaaagagaagctgaaaaggagacatgcgatgaatttcggagacttttgcaaaatggaaaacttttctgcacaagagaaaatgatcctgtgcgtggcccagatggcaagacccatggcaacaagtgtgccatgtgtaaggcagtcttccagaaagaaaatgaggaaagaaagaggaaagaagaggaagatcagagaaatgctgcaggacatggttccagtggtggtggaggaggaaacactcaggacgaatgtgctgagtatcgggaacaaatgaaaaatggaagactcagctgtactcgggagagtgatcctgtacgtgatgctgatggcaaatcgtacaacaatcagtgtaccatgtgtaaagcaaaattggaaagagaagcagagagaaaaaatgagtattctcgctccagatcaaatgggactggatcagaatcagggaaggatacatgtgatgagtttagaagccaaatgaaaaatggaaaacttatctgcactcgagaaagtgaccctgtccggggtccagatggcaagacacatggtaataagtgtactatgtgtaaggaaaaactggaaagggaagcagctgaaaaaaaaaagaaagaggatgaagacaggagcaatacaggagaaaggagcaatacaggagaaaggagcaatgacaaagaggatctgtgtcgtgaatttcgaagcatgcagagaaatggaaagcttatctgcaccagagaaaataaccctgttcgaggcccatatggcaagatgcacatcaataaatgtgctatgtgtcagagcatctttgatcgagaagctaatgaaagaaaaaagaaagatgaagagaaatcaagtagcaagccctcaaataatgcaaagacacagtgcagacaggttcagaagaggaggaggaggaggaaggagagccagaagatacagagctgggggatgagatgactgaatgtctgacgatgcccgcccagaaacgggcctgccctagaccctgccagaaaagggggctcttcccccagagaagtggcgtggagggaacttcccactcccatccctttcgata

SEQ ID NO: 387772 - DNA, 1681 bp, Homo sapiens
tgaaagaaggcctcacacatggagcaggtgttgccatgcatttttccatctgggccctggatggggtcattctctctggtgcaaaaaagccgtccgtttttcctggatttgcggtattcactacacaactcctcaaaggaagctcgtactcttagattgtcttttgtttcttgatttaccttccttctttttcttttcttcttcttctgcttggaagaagacctcacacatggagcaggtgttgccatgtgtaaagcaaaattggaaagagaagcagagagaaaaaatgagtattctcgctccagatcaaatgggactggatcagaatcagggaaggatacatgtgatgagtttagaagccaaatgaaaaatggaaaacttatctgcactcgagaaagtgaccctgtccggggtccagatggcaagacacatggtaataagtgtactatgtgtaaggaaaaactggaaagggaagcagctgaaaaaaaaaagaaagaggatgaagacaggagcaatacaggagaaaggagcaatacaggagaaaggagcaatgacaaagaggatctgtgtcgtgaatttcgaagcatgcagagaaatggaaagcttatctgcaccagagaaaataaccctgttcgaggcccatatggcaagatgcacatcaataaatgtgctatgtgtcagagcatctttgatcgagaagctaatgaaagaaaaaagaaagatgaagagaaatcaagtagcaagccctcaaataatgcaaaggaccagtgcagacaggttcagaatgaagcagaggatgcaaaatttagacaacctgggcgttccttggcctctgttgccaggatgagtacagatgagtgcagtgaatttcgaaactatataaggaacaatgaactcatctgccctagagagaatgacccagtgcacggtgctgatggaaagttctatacaaacaagtgctacatgtgcagagctgtctttctaacagaagctttggaaagggcaaagcttcaagaaaagccatcccatgttagagcttctcaagaggaagacagcccagactctttcagttctctggattctgagatgtgcaaagactaccgagtattgcccaggataggctatctttgtccaaaggatttaaagcctgtctgtggtgacgatggccaaacctacaacaatccttgcatgctctgtcatgaaaacctgatacgccaaacaaatacacacatccgcagtacagggaagtgtgaggagagcagcaccccaggaaccaccgcagccagcatgcccccgtctgacgaatgacaggaagattgttgaaagccatgagggaaaaaataaaccccagttctgaatcacctaccttcaccatctgtatatacaaagaattcttcggagcttgtcttatttgctatagaaaacaatacagagcttttgggaatggactcactgattttcagtcttttccatctctttcctcctagactctgtgatctgagggtataaagacatctccaccaagtctgagccctcaaaatgtcctgattacaatgctgtctgtccaactgcctgttcaataaaagtaaactcagcagaacacccaaactgggatttctttgtcactatctggataatagatatttgcttttaaagaaactgaaaaaaaactacccttttg

SEQ ID NO: 387773 - DNA, 1225 bp, Homo sapiens
aaacatactaacaactaaaatttactgaacacttagtatgtgacagatactgcgttaagcatgaacttacatgcattatctgttttaatcccttcaagcagtaatataaagtaaggactactattatttatgattttctggtgagaaaattaaggctgagaaaagttagataagttacttctctagttagtggtagagctaggactcaaaaactcatgcaatttatgagtatttacctctgagtctttcctttctaggctgtatataaccaataccttcacttaaaaaggcgaatattatttctggcatgcctatcattctagatttcttcttatgggcaggtaattgtgtcacatattataaaggatatttgctttcttattgctttgctactccttgtttctttgtttacttaccttgtcaagttaaaaattgccaaatacaggaagttaaatccacctcatatggtgcaaaatcaatctttgagtttgaataacatatatcacactccttttacaaccatttattcaagttggattaaggaactcaagaggttttcttaagcccacccctcttcttgaatgccataaagtacgtctgctttattttttgcttcttcaggattctgagatgtgcaaagactaccgagtattgcccaggataggctatctttgtccaaaggatttaaagcctgtctgtggtgacgatggccaaacctacaacaatccttgcatgctctgtcatgaaaacctgatacgccaaacaaatacacacatccgcagtacagggaagtgtgaggagagcagcaccccaggaaccaccgcagccagcatgcccccgtctgacgaatgacaggaagattgttgaaagccatgagggaaaaaataaaccccagttctgaatcacctaccttcaccatctgtatatacaaagaattcttcggagcttgtcttatttgctatagaaaacaatacagagcttttgggaatggactcactgattttcagtcttttccatctctttcctcctagactctgtgatctgagggtataaagacatctccaccaagtctgagccctcaaaatgtcctgattacaatgctgtctgtccaactgcctgttcaataaaagtaaactcagcagaacacccaaactgggatttctttgtcactatctggataatagatatttgcttttaaagaaactgaaaaaaaactacccttttg

SEQ ID NO: 387774 - DNA, 276 bp, Homo sapiens
tcgcagaaatacttggttaaagacaattcagtaacaacccttgaaaaattaccctatctttttttttaattattctgcagtgatcgagaagctaatgaaagaaaaaagaaagatgaagagaaatcaagtagcaagccctcaaataatgcaaaggttatttattaaaggataccaaaataaccattttacttttcaccttcagaattttgcattcttctccagctttgggaataataaatatattaatatcttaacttcaaagaaaattgatttttc

SEQ ID NO: 387775 - DNA, 3701 bp, Homo sapiens
tatgcatggagtggacctgtaggcgacttgcatcgtcttcaacatgaagatagccacagtgtcagtgcttctgcccttggctctttgcctcatacaagatgctgccagtaagaatgaagatcaggaaatgtgccatgaatttcaggcatttatgaaaaatggaaaactgttctgtccccaggataagaaattttttcaaagtcttgatggaataatgttcatcaataaatgtgccacgtgcaaaatgatactggaaaaagaagcaaaatcacagaagagggccaggcatttagcaagagctcccaaggctactgccccaacagagctgaattgtgatgattttaaaaaaggagaaagagatggggattttatctgtcctgattattatgaagctgtttgtggcacagatgggaaaacatatgacaacagatgtgcactgtgtgctgagaatgcgaaaaccgggtcccaaattggtgtaaaaagtgaaggggaatgtaagagcagtaatccagagcaggatgtatgcagtgcttttcggccctttgttagagatggaagacttggatgcacaagggaaaatgatcctgttcttggtcctgatgggaagacgcatggcaataagtgtgcaatgtgtgctgagctgtttttaaaagaagctgaaaatgccaagcgagagggtgaaactagaattcgacgaaatgctgaaaaggatttttgcaaggaatatgaaaaacaagtgagaaatggaaggcttttttgtacacgggagagtgatccagtccgtggccctgacggcaggatgcatggcaacaaatgtgccctgtgtgctgaaattttcaagcggcgtttttcagaggaaaacagtaaaacagatcaaaatttgggaaaagctgaagaaaaaactaaagttaaaagagaaattgtgaaactctgcagtcaatatcaaaatcaggcaaagaatggaatacttttctgtaccagagaaaatgaccctattcgtggtccagatgggaaaatgcatggcaacttgtgttccatgtgtcaagcctacttccaagcagaaaatgaagaaaagaaaaaggctgaagcacgagctagaaacaaaagagaatctggaaaagcaacctcatatgcagagctttgcagtgaatatcgaaagcttgtgaggaacggaaaacttgcttgcaccagagagaacgatcctatccagggcccagatgggaaagtgcatggcaacacctgctccatgtgtgaggtcttcttccaagcagaagaagaagaaaagaaaaagaaggaaggtgaatcaagaaacaaaagacaatctaagagtacagcttcctttgaggagttgtgtagtgaataccgcaaatccaggaaaaacggacggcttttttgcaccagagagaatgaccccatccagggcccagatgggaaaatgcatggcaacacctgctccatgtgtgaggccttctttcaacaagaagaaagagcaagagcaaaggctaaaagagaagctgcaaaggaaatctgcagtgaatttcgggaccaagtgaggaatggaacacttatatgcaccagggagcataatcctgtccgtggcccagatggcaaaatgcatggaaacaagtgtgccatgtgtgccagtgtgttcaaacttgaagaagaagagaagaaaaatgataaagaagaaaaagggaaagtcgaggctgaaaaagttaagagagaagcagttcaggagctgtgcagtgaatatcgtcattatgtgaggaatggacgactcccctgtaccagagagaatgatcctattgagggtctagatgggaaaatccacggcaacacctgctccatgtgtgaagccttcttccagcaagaagcaaaagaaaaagaaagagctgaacccagagcaaaagtcaaaagagaagctgaaaaggagacatgcgatgaatttcggagacttttgcaaaatggaaaacttttctgcacaagagaaaatgatcctgtgcgtggcccagatggcaagacccatggcaacaagtgtgccatgtgtaaggcagtcttccagaaagaaaatgaggaaagaaagaggaaagaagaggaagatcagagaaatgctgcaggacatggttccagtggtggtggaggaggaaacactcaggacgaatgtgctgagtatcgggaacaaatgaaaaatggaagactcagctgtactcgggagagtgatcctgtacgtgatgctgatggcaaatcgtacaacaatcagtgtaccatgtgtaaagcaaaattggaaagagaagcagagagaaaaaatgagtattctcgctccagatcaaatgggactggatcagaatcagggaaggatacatgtgatgagtttagaagccaaatgaaaaatggaaaacttatctgcactcgagaaagtgaccctgtccggggtccagatggcaagacacatggtaataagtgtactatgtgtaaggaaaaactggaaagggaagcagctgaaaaaaaaaagaaagaggatgaagacaggagcaatacaggagaaaggagcaatacaggagaaaggagcaatgacaaagaggatctgtgtcgtgaatttcgaagcatgcagagaaatggaaagcttatctgcaccagagaaaataaccctgttcgaggcccatatggcaagatgcacatcaataaatgtgctatgtgtcagagcatctttgatcgagaagctaatgaaagaaaaaagaaagatgaagagaaatcaagtagcaagccctcaaataatgcaaaggaccagtgcagacaggttcagaatgaagcagaggatgcaaaatttagacaacctgggcgttccttggcctctgttgccaggatgagtacagatgagtgcagtgaatttcgaaactatataaggaacaatgaactcatctgccctagagagaatgacccagtgcacggtgctgatggaaagttctatacaaacaagtgctacatgtgcagagctgtctttctaacagaagctttggaaagggcaaagcttcaagaaaagccatcccatgttagagcttctcaagaggaagacagcccagactctttcagttctctggattctgagatgtgcaaagactaccgagtattgcccaggataggctatctttgtccaaaggatttaaagcctgtctgtggtgacgatggccaaacctacaacaatccttgcatgctctgtcatgaaaacctgatacgccaaacaaatacacacatccgcagtacagggaagtgtgaggagagcagcaccccaggaaccaccgcagccagcatgcccccgtctgacgaatgacaggaagattgttgaaagccatgagggaaaaaataaaccccagttctgaatcacctaccttcaccatctgtatatacaaagaattcttcggagcttgtcttatttgctatagaaaacaatacagagcttttgggaatggactcactgattttcagtcttttccatctctttcctcctagactctgtgatctgagggtataaagacatctccaccaagtctgagccctcaaaatgtcctgattacaatgctgtctgtccaactgcctgttcaataaaagtaaactcagcagaacacccaaactgggatttctttgtcactatctggataatagatatttgcttttaaagaaactgaaaaaaaactacccttttg

SEQ ID NO: 387776 - DNA, 3594 bp, Homo sapiens
tatgcatggagtggacctgtaggcgacttgcatcgtcttcaacatgaagatagccacagtgtcagtgcttctgcccttggctctttgcctcatacaagatgctgccagtaagaatgaagatcaggaaatgtgccatgaatttcaggcatttatgaaaaatggaaaactgttctgtccccaggataagaaattttttcaaagtcttgatggaataatgttcatcaataaatgtgccacgtgcaaaatgatactggaaaaagaagcaaaatcacagaagagggccaggcatttagcaagagctcccaaggctactgccccaacagagctgaattgtgatgattttaaaaaaggagaaagagatggggattttatctgtcctgattattatgaagctgtttgtggcacagatgggaaaacatatgacaacagatgtgcactgtgtgctgagaatgcgaaaaccgggtcccaaattggtgtaaaaagtgaaggggaatgtaagagcagtaatccagagcaggatgtatgcagtgcttttcggccctttgttagagatggaagacttggatgcacaagggaaaatgatcctgttcttggtcctgatgggaagacgcatggcaataagtgtgcaatgtgtgctgagctgtttttaaaagaagctgaaaatgccaagcgagagggtgaaactagaattcgacgaaatgctgaaaaggatttttgcaaggaatatgaaaaacaagtgagaaatggaaggcttttttgtacacgggagagtgatccagtccgtggccctgacggcaggatgcatggcaacaaatgtgccctgtgtgctgaaattttcaagcggcgtttttcagaggaaaacagtaaaacagatcaaaatttgggaaaagctgaagaaaaaactaaagttaaaagagaaattgtgaaactctgcagtcaatatcaaaatcaggcaaagaatggaatacttttctgtaccagagaaaatgaccctattcgtggtccagatgggaaaatgcatggcaacttgtgttccatgtgtcaagcctacttccaagcagaaaatgaagaaaagaaaaaggctgaagcacgagctagaaacaaaagagaatctggaaaagcaacctcatatgcagagctttgcagtgaatatcgaaagcttgtgaggaacggaaaacttgcttgcaccagagagaacgatcctatccagggcccagatgggaaagtgcatggcaacacctgctccatgtgtgaggtcttcttccaagcagaagaagaagaaaagaaaaagaaggaaggtgaatcaagaaacaaaagacaatctaagagtacagcttcctttgaggagttgtgtagtgaataccgcaaatccaggaaaaacggacggcttttttgcaccagagagaatgaccccatccagggcccagatgggaaaatgcatggcaacacctgctccatgtgtgaggccttctttcaacaagaagaaagagcaagagcaaaggctaaaagagaagctgcaaaggaaatctgcagtgaatttcgggaccaagtgaggaatggaacacttatatgcaccagggagcataatcctgtccgtggcccagatggcaaaatgcatggaaacaagtgtgccatgtgtgccagtgtgttcaaacttgaagaagaagagaagaaaaatgataaagaagaaaaagggaaagtcgaggctgaaaaagttaagagagaagcagttcaggagctgtgcagtgaatatcgtcattatgtgaggaatggacgactcccctgtaccagagagaatgatcctattgagggtctagatgggaaaatccacggcaacacctgctccatgtgtgaagccttcttccagcaagaagcaaaagaaaaagaaagagctgaacccagagcaaaagtcaaaagagaagctgaaaaggagacatgcgatgaatttcggagacttttgcaaaatggaaaacttttctgcacaagagaaaatgatcctgtgcgtggcccagatggcaagacccatggcaacaagtgtgccatgtgtaaggcagtcttccagaaagaaaatgaggaaagaaagaggaaagaagaggaagatcagagaaatgctgcaggacatggttccagtggtggtggaggaggaaacactcaggacgaatgtgctgagtatcgggaacaaatgaaaaatggaagactcagctgtactcgggagagtgatcctgtacgtgatgctgatggcaaatcgtacaacaatcagtgtaccatgtgtaaagcaaaattggaaagagaagcagagagaaaaaatgagtattctcgctccagatcaaatgggactggatcagaatcagggaaggatacatgtgatgagtttagaagccaaatgaaaaatggaaaacttatctgcactcgagaaagtgaccctgtccggggtccagatggcaagacacatggtaataagtgtactatgtgtaaggaaaaactggaaagggaagcagctgaaaaaaaaaagaaagaggatgaagacaggagcaatacaggagaaaggagcaatacaggagaaaggagcaatgacaaagaggatctgtgtcgtgaatttcgaagcatgcagagaaatggaaagcttatctgcaccagagaaaataaccctgttcgaggcccatatggcaagatgcacatcaataaatgtgctatgtgtcagagcatctttgatcgagaagctaatgaaagaaaaaagaaagatgaagagaaatcaagtagcaagccctcaaataatgcaaaggaccagtgcagacaggttcagaatgaagcagaggatgcaaaatttagacaacctgggcgttccttggcctctgttgccaggatgagtacagatgagtgcagtgaatttcgaaactatataaggaacaatgaactcatctgccctagagagaatgacccagtgcacggtgctgatggaaagttctatacaaacaagtgctacatgtgcagagctgtctttctaacagaagctttggaaagggcaaagcttcaagaaaagccatcccatgttagagcttctcaagaggaagacagcccagactctttcagttctctggattctgagatgtgcaaagactaccgagtattgcccaggataggctatctttgtccaaaggatttaaagcctgtctgtggtgacgatggccaaacctacaacaatccttgcatgctctgtcatgaaaacctgatacgccaaacaaatacacacatccgcagtacagggaagtgtgaggagagcagcaccccaggaaccaccgcagccagcatgcccccgtctgacgaatgacaggaagattgttgaaagccatgagggaaaaaataaaccccagttctgaatcacctaccttcaccatctgtatatacaaagaattcttcggagcttgtcttatttgctatagaaaacaatacagagcttttgggaatggactcactgattttcagtcttttccatctctttcctcctagactctgtgatctgagggtataaagacatctccaccaagtctgagccctcaaaatgtccttgttagcgcgtgctgtccgaagtcctct

SEQ ID NO: 387777 - DNA, 3623 bp, Homo sapiens
  misc_feature (3573)..(3573): n is a, c, g, or t
  misc_feature (3580)..(3580): n is a, c, g, or t
  misc_feature (3595)..(3595): n is a, c, g, or t
  misc_feature (3597)..(3597): n is a, c, g, or t
  misc_feature (3602)..(3602): n is a, c, g, or t
tatgcatggagtggacctgtaggcgacttgcatcgtcttcaacatgaagatagccacagtgtcagtgcttctgcccttggctctttgcctcatacaagatgctgccagtaagaatgaagatcaggaaatgtgccatgaatttcaggcatttatgaaaaatggaaaactgttctgtccccaggataagaaattttttcaaagtcttgatggaataatgttcatcaataaatgtgccacgtgcaaaatgatactggaaaaagaagcaaaatcacagaagagggccaggcatttagcaagagctcccaaggctactgccccaacagagctgaattgtgatgattttaaaaaaggagaaagagatggggattttatctgtcctgattattatgaagctgtttgtggcacagatgggaaaacatatgacaacagatgtgcactgtgtgctgagaatgcgaaaaccgggtcccaaattggtgtaaaaagtgaaggggaatgtaagagcagtaatccagagcaggatgtatgcagtgcttttcggccctttgttagagatggaagacttggatgcacaagggaaaatgatcctgttcttggtcctgatgggaagacgcatggcaataagtgtgcaatgtgtgctgagctgtttttaaaagaagctgaaaatgccaagcgagagggtgaaactagaattcgacgaaatgctgaaaaggatttttgcaaggaatatgaaaaacaagtgagaaatggaaggcttttttgtacacgggagagtgatccagtccgtggccctgacggcaggatgcatggcaacaaatgtgccctgtgtgctgaaattttcaagcggcgtttttcagaggaaaacagtaaaacagatcaaaatttgggaaaagctgaagaaaaaactaaagttaaaagagaaattgtgaaactctgcagtcaatatcaaaatcaggcaaagaatggaatacttttctgtaccagagaaaatgaccctattcgtggtccagatgggaaaatgcatggcaacttgtgttccatgtgtcaagcctacttccaagcagaaaatgaagaaaagaaaaaggctgaagcacgagctagaaacaaaagagaatctggaaaagcaacctcatatgcagagctttgcagtgaatatcgaaagcttgtgaggaacggaaaacttgcttgcaccagagagaacgatcctatccagggcccagatgggaaagtgcatggcaacacctgctccatgtgtgaggtcttcttccaagcagaagaagaagaaaagaaaaagaaggaaggtgaatcaagaaacaaaagacaatctaagagtacagcttcctttgaggagttgtgtagtgaataccgcaaatccaggaaaaacggacggcttttttgcaccagagagaatgaccccatccagggcccagatgggaaaatgcatggcaacacctgctccatgtgtgaggccttctttcaacaagaagaaagagcaagagcaaaggctaaaagagaagctgcaaaggaaatctgcagtgaatttcgggaccaagtgaggaatggaacacttatatgcaccagggagcataatcctgtccgtggcccagatggcaaaatgcatggaaacaagtgtgccatgtgtgccagtgtgttcaaacttgaagaagaagagaagaaaaatgataaagaagaaaaagggaaagtcgaggctgaaaaagttaagagagaagcagttcaggagctgtgcagtgaatatcgtcattatgtgaggaatggacgactcccctgtaccagagagaatgatcctattgagggtctagatgggaaaatccacggcaacacctgctccatgtgtgaagccttcttccagcaagaagcaaaagaaaaagaaagagctgaacccagagcaaaagtcaaaagagaagctgaaaaggagacatgcgatgaatttcggagacttttgcaaaatggaaaacttttctgcacaagagaaaatgatcctgtgcgtggcccagatggcaagacccatggcaacaagtgtgccatgtgtaaggcagtcttccagaaagaaaatgaggaaagaaagaggaaagaagaggaagatcagagaaatgctgcaggacatggttccagtggtggtggaggaggaaacactcaggacgaatgtgctgagtatcgggaacaaatgaaaaatggaagactcagctgtactcgggagagtgatcctgtacgtgatgctgatggcaaatcgtacaacaatcagtgtaccatgtgtaaagcaaaattggaaagagaagcagagagaaaaaatgagtattctcgctccagatcaaatgggactggatcagaatcagggaaggatacatgtgatgagtttagaagccaaatgaaaaatggaaaacttatctgcactcgagaaagtgaccctgtccggggtccagatggcaagacacatggtaataagtgtactatgtgtaaggaaaaactggaaagggaagcagctgaaaaaaaaaagaaagaggatgaagacaggagcaatacaggagaaaggagcaatacaggagaaaggagcaatgacaaagaggatctgtgtcgtgaatttcgaagcatgcagagaaatggaaagcttatctgcaccagagaaaataaccctgttcgaggcccatatggcaagatgcacatcaataaatgtgctatgtgtcagagcatctttgatcgagaagctaatgaaagaaaaaagaaagatgaagagaaatcaagtagcaagccctcaaataatgcaaaggaccagtgcagacaggttcagaatgaagcagaggatgcaaaatttagacaacctgggcgttccttggcctctgttgccaggatgagtacagatgagtgcagtgaatttcgaaactatataaggaacaatgaactcatctgccctagagagaatgacccagtgcacggtgctgatggaaagttctatacaaacaagtgctacatgtgcagagctgtctttctaacagaagctttggaaagggcaaagcttcaagaaaagccatcccatgttagagcttctcaagaggaagacagcccagactctttcagttctctggattctgagatgtgcaaagactaccgagtattgcccaggataggctatctttgtccaaaggatttaaagcctgtctgtggtgacgatggccaaacctacaacaatccttgcatgctctgtcatgaaaacctgatacgccaaacaaatacacacatccgcagtacagggaagtgtgaggagagcagcaccccaggaaccaccgcagccagcatgcccccgtctgacgaatgacaggaagattgttgaaagccatgagggaaaaaataaaccccagttctgaatcacctaccttcaccatctgtatatacaaagaattcttcggagcttgtcttatttgctatagaaaacaatacagagcttttgggaatggactcactgattttcagtcttttccatctctttcctcctagactctgtgatctgagggtataaagacatctccaccaagtctgagccctcaaaatgtcctgattacnatggggncgttttccccaaaancntgggngggtttcaaaaggggttcaaa

SEQ ID NO: 387778 - DNA, 2882 bp, Homo sapiens
tatgcatggagtggacctgtaggcgacttgcatcgtcttcaacatgaagatagccacagtgtcagtgcttctgcccttggctctttgcctcatacaagatgctgccagtaagaatgaagatcaggaaatgtgccatgaatttcaggcatttatgaaaaatggaaaactgttctgtccccaggataagaaattttttcaaagtcttgatggaataatgttcatcaataaatgtgccacgtgcaaaatgatactggaaaaagaagcaaaatcacagaagagggccaggcatttagcaagagctcccaaggctactgccccaacagagctgaattgtgatgattttaaaaaaggagaaagagatggggattttatctgtcctgattattatgaagctgtttgtggcacagatgggaaaacatatgacaacagatgtgcactgtgtgctgagaatgcgaaaaccgggtcccaaattggtgtaaaaagtgaaggggaatgtaagagcagtaatccagagcaggatgtatgcagtgcttttcggccctttgttagagatggaagacttggatgcacaagggaaaatgatcctgttcttggtcctgatgggaagacgcatggcaataagtgtgcaatgtgtgctgagctgtttttaaaagaagctgaaaatgccaagcgagagggtgaaactagaattcgacgaaatgctgaaaaggatttttgcaaggaatatgaaaaacaagtgagaaatggaaggcttttttgtacacgggagagtgatccagtccgtggccctgacggcaggatgcatggcaacaaatgtgccctgtgtgctgaaattttcaagcggcgtttttcagaggaaaacagtaaaacagatcaaaatttgggaaaagctgaagaaaaaactaaagttaaaagagaaattgtgaaactctgcagtcaatatcaaaatcaggcaaagaatggaatacttttctgtaccagagaaaatgaccctattcgtggtccagatgggaaaatgcatggcaacttgtgttccatgtgtcaagcctacttccaagcagaaaatgaagaaaagaaaaaggctgaagcacgagctagaaacaaaagagaatctggaaaagcaacctcatatgcagagctttgcagtgaatatcgaaagcttgtgaggaacggaaaacttgcttgcaccagagagaacgatcctatccagggcccagatgggaaagtgcatggcaacacctgctccatgtgtgaggtcttcttccaagcagaagaagaagaaaagaaaaagaaggaaggtgaatcaagaaacaaaagacaatctaagagtacagcttcctttgaggagttgtgtagtgaataccgcaaatccaggaaaaacggacggcttttttgcaccagagagaatgaccccatccagggcccagatgggaaaatgcatggcaacacctgctccatgtgtgaggccttctttcaacaagaagaaagagcaagagcaaaggctaaaagagaagctgcaaaggaaatctgcagtgaatttcgggaccaagtgaggaatggaacacttatatgcaccagggagcataatcctgtccgtggcccagatggcaaaatgcatggaaacaagtgtgccatgtgtgccagtgtgttcaaacttgaagaagaagagaagaaaaatgataaagaagaaaaagggaaagtcgaggctgaaaaagttaagagagaagcagttcaggagctgtgcagtgaatatcgtcattatgtgaggaatggacgactcccctgtaccagagagaatgatcctattgagggtctagatgggaaaatccacggcaacacctgctccatgtgtgaagccttcttccagcaagaagcaaaagaaaaagaaagagctgaacccagagcaaaagtcaaaagagaagctgaaaaggagacatgcgatgaatttcggagacttttgcaaaatggaaaacttttctgcacaagagaaaatgatcctgtgcgtggcccagatggcaagacccatggcaacaagtgtgccatgtgtaaggcagtcttccagaaagaaaatgaggaaagaaagaggaaagaagaggaagatcagagaaatgctgcaggacatggttccagtggtggtggaggaggaaacactcaggacgaatgtgctgagtatcgggaacaaatgaaaaatggaagactcagctgtactcgggagagtgatcctgtacgtgatgctgatggcaaatcgtacaacaatcagtgtaccatgtgtaaagcaaaattggaaagagaagcagagagaaaaaatgagtattctcgctccagatcaaatgggactggatcagaatcagggaaggatacatgtgatgagtttagaagccaaatgaaaaatggaaaacttatctgcactcgagaaagtgaccctgtccggggtccagatggcaagacacatggtaataagtgtactatgtgtaaggaaaaactggaaagggaagcagctgaaaaaaaaaagaaagaggatgaagacaggagcaatacaggagaaaggagcaatacaggagaaaggagcaatgacaaagaggatctgtgtcgtgaatttcgaagcatgcagagaaatggaaagcttatctgcaccagagaaaataaccctgttcgaggcccatatggcaagatgcacatcaataaatgtgctatgtgtcagagcatctttgatcgagaagctaatgaaagaaaaaagaaagatgaagagaaatcaagtagcaagccctcaaataatgcaaaggttatttattaaaggataccaaaataaccattttacttttcaccttcagaattttgcattcttctccagctttgggaataataaatatattaatatctta

SEQ ID NO: 387779 - DNA, 850 bp, Homo sapiens
cccttgccatttactccatgggatgagtgcagtgaatttcgaaactatataaggaacaatgaactcatctgccctagagagaatgacccagtgcacggtgctgatggaaagttctatacaaacaagtgctacatgtgcagagctgtctttctaacagaagctttggaaagggcaaagcttcaagaaaagccatcccatgttagagcttctcaagaggaagacagcccagactctttcagttctctggattctgagatgtgcaaagactaccgagtattgcccaggataggctatctttgtccaaaggatttaaagcctgtctgtggtgacgatggccaaacctacaacaatccttgcatgctctgtcatgaaaacctgatacgccaaacaaatacacacatccgcagtacagggaagtgtgaggagagcagcaccccaggaaccaccgcagccagcatgcccccgtctgacgaatgacaggaagattgttgaaagccatgagggaaaaaataaaccccagttctgaatcacctaccttcaccatctgtatatacaaagaattcttcggagcttgtcttatttgctatagaaaacaatacagagcttttgggaatggactcactgattttcagtcttttccatctctttcctcctagactctgtgatctgagggtataaagacatctccaccaagtctgagccctcaaaatgtcctgattacaatgctgtctgtccaactgcctgttcaataaaagtaaactcagcagaacacccaaactgggatttctttgtcactatctggataatagatatttgcttttaaagaaactgaaaaaaaactacccttttg

SEQ ID NO: 387780 - DNA, 1274 bp, Homo sapiens
tatgcatggagtggacctgtaggcgacttgcatcgtcttcaacatgaagatagccacagtgtcagtgcttctgcccttggctctttgcctcatacaagatgctgccagtaagaatgaagatcaggaaatgtgccatgaatttcaggcatttatgaaaaatggaaaactgttctgtccccaggataagaaattttttcaaagtcttgatggaataatgttcatcaataaatgtgccacgtgcaaaatgatactggaaaaagaagcaaaatcacagaagagggccaggcatttagcaagagctcccaaggctactgccccaacagagctgaattgtgatgattttaaaaaaggagaaagagatggggattttatctgtcctgattattatgaagctgtttgtggcacagatgggaaaacatatgacaacagatgtgcactgtgtgctgagaatgcgaaaaccgggtcccaaattggtgtaaaaagtgaaggggaatgtaagagcagtaatccagagcaggatgtatgcagtgcttttcggccctttgttagagatggaagacttggatgcacaagggaaaatgatcctgttcttggtcctgatgggaagacgcatggcaataagtgtgcaatgtgtgctgagctgtttttaaaagaagctgaaaatgccaagcgagagggtgaaactagaattcgacgaaatgctgaaaaggatttttgcaaggaatatgaaaaacaagtgagaaatggaaggcttttttgtacacgggagagtgatccagtccgtggccctgacggcaggatgcatggcaacaaatgtgccctgtgtgctgaaattttcaagcggcgtttttcagaggaaaacagtaaaacagatcaaaatttgggaaaagctgaagaaaaaactaaagttaaaagagaaattgtgaaactctgcagtcaatatcaaaatcaggcaaagaatggaatacttttctgtaccagagaaaatgaccctattcgtggtccagatgggaaaatgcatggcaacttgtgttccatgtgtcaagcctacttccaagcagaaaatgaagaaaagaaaaaggctgaagcacgagctagaaacaaaagagaatctggaaaagcaacctcatatgcagagctttgcagtgaatatcgaaagcttgtgaggaacggaaaacttgcttgcaccagagagaacgatcctatccagggcccagatgggaaagtgatcacacaccgtctctcagggatcctctagatcagcctcggcacac

SEQ ID NO: 387781 - DNA, 81 bp, Homo sapiens
gggggaaagcattggccccaggccaaaatcataaacgctttcaattaactaataataattgctggcatgttgccattaaat

SEQ ID NO: 387782 - DNA, 321 bp, Homo sapiens
tctacataatcctttgtttaagtaatagattcaaaataaacaatagcacagttattgtaaaggcaaagaaatagaaattaaattactttaattctgctattctttgtgaccactttgaatctttgtgtttaaaactttaaaacaatgaaatagtgcaaactttaaggtataatacatgtttgatctaaaatttattcacaaaatatcttactgaatttttattttagtagaaatacattcttattcattaactattacttttttaagctaaagaacaaatttaaaaacaatttattacagagggcaaaaagcactaaccct

SEQ ID NO: 387783 - DNA, 1070 bp, Homo sapiens
acttgagttgaatcttaaaagatgtgtaggttgggggtgagatagagggaaatgggaagaacattctagaaagaggtatcggcaagaatagccaagccttggaggagacaaatagtaggaaatgttatagaaagggaagagggtgttgcctagatggagcaaaggggtgaggtgaggccatttgaacaaggctggagaagtaacggaaatcaagccagtcgagacagggattcatcactgaaaatccacttccaggacctgcacccaacacaggacctgtatatggttacataatttgaacattcccagcagtttgtcatctagtatctgagattcagggcttcagggatgctggatacttttactaacatattctatggtgttttatataggtcctggcaagattaacattattattttctatgatgacaaataactaatacgaaatgaggatccgtttgatctttcatataaggtctagagaatgtttcttcacagttaccccagacctttggtatagcatctgtttttcagttctaatgcaaaagtatgttactgagattgaatattaactactggtaatattcattccaaatacctgtcctcatgtcaccttccacctattgcgggaggttagcccattgagggtcctctcacagtgtctcgtcctgtcgttcctgtcgtggatgtcggagtcgtcgtgggactgcgactcgtttcgtctgatgctctttgtgtttcagatgcggacgcttcagtgggtagtcccggactcgagcgggcagtgtttctcgaagttgtcccctctcacaatctccctcttcacgggggtggacgaggagtcaaggtcggactgggggagggtaggaaaccggagactgggaaaaaggtgtcccctggatggggataacgccaggaggtcgagtagaaggtggagtggggggaggaggagggaccgaaattaatacgattacaacctcctcttacttatttatttcacttagaaatttttttttttttttttttttcgaacaattttcatcaaatttcttttttttatcttttaagtt

SEQ ID NO: 387784 - DNA, 368 bp, Homo sapiens
tacttcgtctccatgaatttgcccattctagacacctcgtacaggtagagtcatacctccttccatagctgaagcattgcacttagcataatgtcctcaagttcatccatgttgtagcatgggtcagattttattttattttatttatttatgagacggaggcaacaaagcccaggctggagtgcagtggcgcgatcttggctcactgcaacttccgcccccctgggcgtggtggcaagtgcctgtagtcccagctactcaggaggctgaggcacgagaatcatttgaacccaggaggcagagattgcagcaagctgagatcacgccactgtactccagcctgggtgactgagcaagaccccatctca

SEQ ID NO: 387785 - DNA, 306 bp, Homo sapiens
ttttctgttgctaatgtaaattatacttctctatccatttttaaaaagcttttatttttgcattttataactggtcaccttcctaaacctttattatttctaataacttctcaattaactgagttttctcattaattttatttccacgtattgataattttgtccctgttttgtcattctttctatatctcctttgtatcaactgtattgactagcatattggtaaaatcttaaataggcaccctaattatctcaatgtttcaccactgctgatgctttatgtttttcatgttaaggaagcatcct

SEQ ID NO: 387786 - DNA, 372 bp, Homo sapiens
gaaatgtttaacttacatagcaatggaaatatattttcattggctgtggtaataaacaacattttccatattgtttaattgcacaaattttcacagaaatatatgaatgtatactcactcaatattaccagtattgtcttgtgtttctaggaattttagagtttccttttaaaaatggacactacacccatgaatgaatgtttattgagttcaacaaattttctaaagaacaatattcttaacttttcctctctattatcttagttttgtcttctttaaccaggaaaccctgagaagattataattcactgaagcagtaaaatatcagattatgtgtatttgatggagttgctgtgactgaaaattgccttt

SEQ ID NO: 387787 - DNA, 414 bp, Homo sapiens
tgttttttaaacggtatgcatatcagtgtatctgaaaaccgccaccttctaacatttaaggtagtagacagtatatacagatttgaaccttgctttttcacataatagatagttgaggtcattccatagcagtacacagaaactcatctttggtcttaaaactgcataggtactttagtcctctgttgacaaatgttgggttgtttcagtcttctgctatcacaaataatgctgcaaagaatacatttgttcatatgtcatttcatccttggcaattttgcctctggaaagttcctagaagtcagattcccaggtcaaaggttaaatgcgcatgtaattttgctggatattgttaaatccccctacagagcatgcaccactcagcattcccctcagcgttgtatgagagggacc

SEQ ID NO: 387788 - DNA, 216 bp, Homo sapiens
agctgactcttttgtaataaagagctggaacaaattgatggttctttatgactagatgtgccacatactctgtaactaagttaaattgcatgcggtttcttctcttggaactaggaaacctgtctcacatctcctcattacttttattaacagctgactttagtctcaaagcttctttgcttactgagaaaagactgcatgcaccaaaattaataa

SEQ ID NO: 387789 - DNA, 490 bp, Homo sapiens
cagggtttcattctgtcaccaaggctggagtgcagtggcgtgatcttggttcactgcaacctctccctcccggactcaagccatccccctgcctctgtctcctgagtagctggaattatagatgtacaccaccacacctgactagttttttaattttttgtgaagacggagttttgcagtgttgcctgggctggtctcaactcctgggctcaagaaatccacctgcctctgcctcccaaagtgctgggattacagatgtgagccaccgtgccagccttagttaataattctttactctgttcaaagaactggtgtgggtattgtctccttattgaacctgactgataatggacaggccttgagcccccaagttgctgaggcccttatggtaaccacatgtgttattttgttttagttaacagtgtacacagagacatgaggaaattgtaaagttgattttaaatcaactttaaatcaataaagttgattt

SEQ ID NO: 387790 - DNA, 115 bp, Homo sapiens
agcgagactctatctaaaaagaaaaaaaaagtaactttggaaaataggattttgatggataccgtaagtaagtttaaagacaaaaagaactggacagaatactggagatcaagct

SEQ ID NO: 387791 - DNA, 396 bp, Homo sapiens
tggccggtgagaacggcagcattccctgatccgtcttgttttcttttgttcctagtgcctgctgtgtggacagctacactcagcaaagtcttagggagacttagaggagtcaccatgaagaatcagtgtcagacgtttcatcaggaatccctgtcaaggccgggtgtggtggctcacacccgtaatcccaagactttaggaggctgaggtgggtggattgtttgaggccaggagtttgagagcagcctgggcagcacagggagactccatctccacaaaaaaatagtgaagaacccctgtcgtgtgtaaaacacgagtatcaaaaaacaaactcaacctagcatgaagtatttaacattctctctccatcccctttctctctccactcccgggtac

SEQ ID NO: 387792 - DNA, 376 bp, Homo sapiens
gtgacagagagagaccctgtctctcccaccaccacaaaaaaacaaaacaaaacaaaaataggcatttttctgtaactttaatcagcatctttgcttgctaaaattgccattcttatttagaaaccttatgcattcatgatcccactaactttactaaaacttacttttactgaaacatctagtaaactctcaagaatctatgcaacttagtaagggaaaaaaaaaccacctttgaaaagttctagatcagtataggccaatggaagaaatattgagtagtggccaggcgcagtggctcacacatgtaaccctagcactttgggaggaccaggcaggtggatcacctgaggtcaggagtttgagaccagcctggcca

SEQ ID NO: 387793 - DNA, 295 bp, Homo sapiens
aatctatatgtgtcctgttcctcccatctaccatatttatgacccaagaagttttggtaccatttaaaattgtatcttcatcctagtctaagacaaaaatctggataagatagagccaaggatagattatttatgataatcttagaaagtcatctctagagtgaaataaaatttaatcaccactggaaaaagttataaaattaattatgaatactgataatcataatgccaccccgcctatatttttctacttgttcacaaagagattatgggagagcagaccaaaaattttgct

SEQ ID NO: 387794 - DNA, 426 bp, Homo sapiens
gcacctgtcctgttcttgataccttaacctatgacatgatccggacttcagccctaagagatctgggtccatggccttcatgtccttctaagactagggtgctgcattcattcatttaccttcaattgttggcaagggagtaccaacaagtagccaagtagttcacctctgtgccaaacatattgacaactatgatttgtttctacccatagaacacttcttttttagacatgagatctcccaggctgaagttcgaatgcagtgatgcgatcacagctccctgcggccttgaactcctggcctcaagctgtcctcccacctcagcctcctgagtagacaggataacaagttcatgccaccatgcccagctaactaaaaaaatacattttttagagacagggtcctgctatactacccaggcttttc

SEQ ID NO: 387795 - DNA, 227 bp, Homo sapiens
ttggccagactggtctcgaactcctggcctcaagcaatcctcccacctcggcctcccaaagtgctgggattacaggcgtgaccttcatgcccagcccaattttaaaaattggattgagactattgttttgcagtaagacctgaagttaacaaatctttactgagcatctactcaatgaaaaaccatgataattctttgtatataaaataaacatttgaaaaaacaaa

SEQ ID NO: 387796 - DNA, 113 bp, Homo sapiens
tcagcacctgccatggagtagatgttcgataaataggactgacctgagaccttctaattgaatggcattcattcgactgttctttactgaagccgcgtaccccagtcactgtg

SEQ ID NO: 387797 - DNA, 239 bp, Homo sapiens
ctgaaacagaaaaattttatttgcctacattgtaccaaaccttagaattttctccaacttcttcaaagagcccaaaagaacaaagacaaccatacacgcatgcacatgtaaacacacaatgaaagagaaagaaacataagtcaaaatatagcaggattccttaagaagtttttgtttttatctttttctttttaattatgaaatattccttaaaagaaaacaattttttcaagttactt

SEQ ID NO: 387798 - DNA, 740 bp, Homo sapiens
cactgaggcatatgttatcccactttaaatatttagtgcctactgaatcagaaaatataatataaaggatgtctcacttacttgagtagatatgtttccaggtggctataatattaatacattgcagaagcaagaggtgaaaccctagaataatttgaattaagggcaaacaagaaagaccggatccccaacaaatacacctactttaaatgttgagtgcattgagcacacatatgtctttggtaaatgtgtttctactagacatctagaacaatgaattgggaaaaccttggcagatcactcttctctgaaatcatacctgtgataacaactcatgttttccttcttttctagagtgaccgtctccttatcaagggaggcagaatcgtcaatgatgatcagtccttttatgctgatatttacatggaagatggcttaataaagtatgtatatggaattcttctctttattgttttgcacttcctccttcattaatggctcataaaggaggttgaattacatgaatgtagtgaaaaaaatcttaatttaatcaacagaatgaagtgagatactgagggcaaatttgggcagaaagtattgatgagcattctacgggtcatggaaaagtggaagatgtggccatcatccttaaggatactggaaaatgtgcacaaattacagcaccctaaaaatataaggctttgtgcaataggtatcaaaggagttgaagtcgggataag

SEQ ID NO: 387799 - DNA, 5708 bp, Homo sapiens
cgtttgattttagcaggtagctaaaggacaatgtattccatcgccgaagggccatggttttgcttgtaataacatataaaccttcgtctgtcagccctgcctaaagtaaactcgggattgtgagcagtgcacgtggttcattactgatggggagcaatagcagttctactccaaatccatggctgcgcaccaggaacgtgtctgggctactgccttcccactccacaggtgttttctactttttactcacagagcagcattcatgttctttctttgattctgagactcagtcaggcagtggagtttctttaacaagatactacttggatattttttaaatacagggaatggttgagtccactgctaccgtgccccttgcagcctctgagagcgagtcacggctttccattttctaatgtgtatgttccgggtctggggaccccagcaggcccgccaggttgcagagtcggaccagtctccggcgtctgaaggggctgcgccgctgtttaccaccccgcgagcagcagaggcggcgcccagccctcctctcgaacaaaggcgcggccgccgcattcgacccgcgccatggcagaggagagcgggtgccgggagggaagccgggaaccgtctccattctgaaactagggcggggaagccgccgcgggagcccgggaggggggcggaggcgggcggaggcggcggcgcggccagcgcaccattcactccacctgatctcggggcgctgtgcgctgaggaaggcgcgggcgagccggagcagaagaaggagggagggagccagccgctgcagccaccaccgccaccatgtcctaccaaggcaagaagaacatcccgcggatcacgagtgaccgtctccttatcaagggaggcagaatcgtcaatgatgatcagtccttttatgctgatatttacatggaagatggcttaataaaacaaattggagacaatctgattgttcctggaggagtgaagaccattgaagccaatgggaagatggtgatccctggaggcatcgatgtccatactcacttccagatgccatataagggaatgaccacagtagatgacttcttccaagggacaaaggcggccttagcaggtggcaccaccatgatcattgaccatgtggtgcctgagcctgagtccagcctgactgaggcctatgagaaatggagagagtgggctgatgggaagagttgctgtgactatgccctgcatgtggacatcacccactggaatgacagcgtcaagcaggaagtgcagaacctcatcaaggacaaaggggttaactccttcatggtttatatggcttataaggatttgtatcaagtatctaacacagagctctatgagatcttcacctgcctgggagagctgggggccattgctcaagttcatgctgagaatggggatatcattgcccaggagcaaacccgcatgttggaaatggggataactggcccagaaggccatgtactgagcaggccagaagagctggaagctgaggctgtgttccgtgccatcaccattgccagccaaaccaattgccctctctacgtcacaaaggtcatgagcaagagtgcagctgacctcatctcacaagccaggaaaaaaggaaatgtagtctttggtgagcccatcactgccagcctcggcatagatggaacccattattggagcaagaactgggccaaggcggctgcatttgtgacatccccacccctgagccctgacccaactactccggactacatcaactccttgctggccagcggggatctgcagctatctgggagtgcccactgcaccttcagcactgcccagaaagcaattgggaaggacaacttcacagccattcctgagggcaccaatggtgtggaggagcggatgtctgtcatctgggacaaggctgtggccacagggaaaatggacgaaaaccagttcgtggctgtgacaagcacaaacgctgccaagatcttcaacctgtatccccgcaagggaagaatatctgtgggttctgacagcgacctcgtcatctgggatccagatgctgtgaagatcgtctctgccaagaaccaccagtctgcggcagagtacaacatctttgaagggatggagctgcgcggggctcctctggttgtcatctgccagggcaagatcatgctggaagatggcaacctgcacgtgacccagggggctggccgcttcataccctgcagcccgttctccgactatgtctacaagcgcattaaagcacggaggaagatggcagacctgcatgccgtcccaaggggcatgtacgatgggcctgtgtttgacctgaccaccacccccaaaggtggcacccccgcaggctctgctcggggctctcctactcggccgaacccacctgtgaggaatcttcatcagtcgggatttagcctgtcaggcacccaagtggatgagggggttcgctcagccagcaagcgcatcgtggcgcccccaggcggccgttctaatatcacatctctgagttaagcaagccttcctcaaagagaggggcagaagcaagaagagattgttttgaagccaaaatggtacaccgatatttaagaaggaaagcgaatccaaacggttgtgatctaaagaatcaataagcctcaagccttatgtttctccaatgttacgctcgcttgcctagctttacgaatattgctttgttttctgtttatgcatagccttgatttgtttgactcccctccccccatttacatgcatgcaatcagacaggccactaaggtaaaagagtctgctctatcatagtgttgagagcgtgtgtagtgctgcatcttatgacaaggggacagacaagctgggacgtcagggaaatgaacaaaagggacgcaggttatttggggtgagtgggtggtgggagcctggagcaaggtggagggtgcagaggggctggggtagggcatgtaggagggaggtgggtgggtcaggtgagtggaaggggtgttgtatattgtgttgatgacgtacgttatttccatggaagatagccgctgtggcagctgtcacatcaccacagctccctagggtctgccgagaaggcaggcagtctttgggttctgttctttgtcacgtcccctacaagtaaattttgtttctttgaacgtttattaaaatgccaagacccaaccatttcttccacctgcttgattgtgccagtgtttgctcaggcctctttcttagtgttgctttcaaatccttctctttcctgggttgggaaggccaggcagggacagagcaaatgacacttctcttcctcttgccctccctgcctctttggtgctcttaaaagccagcagctgagaacatagcacaggcccacgtggtgagggcacccacagcttaaagacgcttccttctaaacacggcgaggtcacctctcactcttctgtctttgcaaaccgagaagagtggcatgcttctggcatcccaagtcaggattttagctcagatgaggcagaatgaagggcctctcttacaggcagtttgtgtttgattctctcgatcctggcacatccatgataaataggagtttttgaaagttggttttattaggtgttccctaatttttaccgtaataggtcatctcagcttatatgaaagtcaagtggggaactgggaaagccaaagtcagtcttgagcagagggagcacattttgtggacctggttccacctttccattccaaaccacctgtttccccttccattagcagaaactctgggggaactttgtgtctcagtcctagaatctccccaagtgagtggaagtgacatgatgcagtcttcctcatggggcacctgaaagaaattagtgtgggtgcttcgatctaccttgtctgtcagagttgaatatctctttccctatcatgctgcttcaagatgctcattttcagaagaaatatgttcaacctgggatcagacttccatgctctggggaatccaagtggtagcacctgtaaccctgtgtactaagtgctttgaagagaagagcaggcctcagacaccttttaattgcttaggagaaaccattgtctctgactgcaggtttgaataagttgaagaccagagaaaagtacacactgggctacaaaggaatttggagatagccaaggaacaggatttcccctagcaagctaccttctgttcaaatcatgaaaaaagactatttccccttagaatagggaagcttgctattttaaagctcttgtagtgcttttcttttaagggagatgtagtaaaagggaaaatgtagctcttagtttacacttcaaagatgtgggggtctttcagagaactaagaataacagttttatgtgcagagagagtttgccagatctgaagcatatacctcattgactaggctgttactttgggataggttgcagtaccagccacagccagcagatagaggaaaagacacacataaactcgcttctgagcgtccacttctgcactctctgctctgctgttactcagcccctgagtctgactcatctctgcacaacctctctgtgccatgaagataagtcttccatggccaaatcggtcatccgcactgcccttgggacttccgaagtgaaccattccaccagaacctttgattctgcacaagatttccttgctctgggaacaacccccaaatgcccttgggaggaacaacatgagctcaggaagcctctctttcttcacttaccattactaactctccaagcatagaaatccctgggaattgcgagaataactcccactattttaaaatttatattcagatttgtttcgtttcataagacacatcaaacaggcctatacaaaaggtttaggaaaagaaaacaatggtgagtcccggccctcttcgaattcactggcacctcatgcaagtgtaggaaggcacgctggatcgtctatctgattccaaagctgtcctttgccatctcatcccttggcctgccccccaaccctgaggatgcccctgccatccccccaacctcctcatattgcctctgaacccagatggcaatccatcccggttctctctgagggccacgggcttgggtagtggaaagggtgtttgggaaattgttaaatcagttacccgtagtagagctatttcttgtacttctaagttttctagaagtggaaggattgtagtcatcctgaaaatgggtttacttcaaaatccctcagccttgttcttcacgactgtctatactgagagtgtcatgtttccacaaagggctgacacctgagcctggattttcactcatccctgagaagccctttccagtagggtgggcaattcccaacttccttgccacaagcttcccaggctttctcccctggaaaactccagcttgagtcccagatacactcatgggctgccctgggcagccagcattcattgtaagttccctctttgaaaactggtgtgtgggtgttcagttctgtgtctggtgggtatggacagacagtaatctcctgtgatctgtgctagctgtgaggcagctctggaacgtgaagagctgtttggtttgaaccgtgaacaaaactgtgttttgagtttagctgacattaaagaaaaaagttcatcacgtgactgttaatgtaaacctggttattaaaataactatgaaattaccaa

SEQ ID NO: 387800 - DNA, 5255 bp, Homo sapiens
cactgaggcatatgttatcccactttaaatatttagtgcctactgaatcagaaaatataatataaaggatgtctcacttacttgagtagatatgtttccaggtggctataatattaatacattgcagaagcaagaggtgaaaccctagaataatttgaattaagggcaaacaagaaagaccggatccccaacaaatacacctactttaaatgttgagtgcattgagcacacatatgtctttggtaaatgtgtttctactagacatctagaacaatgaattgggaaaaccttggcagatcactcttctctgaaatcatacctgtgataacaactcatgttttccttcttttctagagtgaccgtctccttatcaagggaggcagaatcgtcaatgatgatcagtccttttatgctgatatttacatggaagatggcttaataaaacaaattggagacaatctgattgttcctggaggagtgaagaccattgaagccaatgggaagatggtgatccctggaggcatcgatgtccatactcacttccagatgccatataagggaatgaccacagtagatgacttcttccaagggacaaaggcggccttagcaggtggcaccaccatgatcattgaccatgtggtgcctgagcctgagtccagcctgactgaggcctatgagaaatggagagagtgggctgatgggaagagttgctgtgactatgccctgcatgtggacatcacccactggaatgacagcgtcaagcaggaagtgcagaacctcatcaaggacaaaggggttaactccttcatggtttatatggcttataaggatttgtatcaagtatctaacacagagctctatgagatcttcacctgcctgggagagctgggggccattgctcaagttcatgctgagaatggggatatcattgcccaggagcaaacccgcatgttggaaatggggataactggcccagaaggccatgtactgagcaggccagaagagctggaagctgaggctgtgttccgtgccatcaccattgccagccaaaccaattgccctctctacgtcacaaaggtcatgagcaagagtgcagctgacctcatctcacaagccaggaaaaaaggaaatgtagtctttggtgagcccatcactgccagcctcggcatagatggaacccattattggagcaagaactgggccaaggcggctgcatttgtgacatccccacccctgagccctgacccaactactccggactacatcaactccttgctggccagcggggatctgcagctatctgggagtgcccactgcaccttcagcactgcccagaaagcaattgggaaggacaacttcacagccattcctgagggcaccaatggtgtggaggagcggatgtctgtcatctgggacaaggctgtggccacagggaaaatggacgaaaaccagttcgtggctgtgacaagcacaaacgctgccaagatcttcaacctgtatccccgcaagggaagaatatctgtgggttctgacagcgacctcgtcatctgggatccagatgctgtgaagatcgtctctgccaagaaccaccagtctgcggcagagtacaacatctttgaagggatggagctgcgcggggctcctctggttgtcatctgccagggcaagatcatgctggaagatggcaacctgcacgtgacccagggggctggccgcttcataccctgcagcccgttctccgactatgtctacaagcgcattaaagcacggaggaagatggcagacctgcatgccgtcccaaggggcatgtacgatgggcctgtgtttgacctgaccaccacccccaaaggtggcacccccgcaggctctgctcggggctctcctactcggccgaacccacctgtgaggaatcttcatcagtcgggatttagcctgtcaggcacccaagtggatgagggggttcgctcagccagcaagcgcatcgtggcgcccccaggcggccgttctaatatcacatctctgagttaagcaagccttcctcaaagagaggggcagaagcaagaagagattgttttgaagccaaaatggtacaccgatatttaagaaggaaagcgaatccaaacggttgtgatctaaagaatcaataagcctcaagccttatgtttctccaatgttacgctcgcttgcctagctttacgaatattgctttgttttctgtttatgcatagccttgatttgtttgactcccctccccccatttacatgcatgcaatcagacaggccactaaggtaaaagagtctgctctatcatagtgttgagagcgtgtgtagtgctgcatcttatgacaaggggacagacaagctgggacgtcagggaaatgaacaaaagggacgcaggttatttggggtgagtgggtggtgggagcctggagcaaggtggagggtgcagaggggctggggtagggcatgtaggagggaggtgggtgggtcaggtgagtggaaggggtgttgtatattgtgttgatgacgtacgttatttccatggaagatagccgctgtggcagctgtcacatcaccacagctccctagggtctgccgagaaggcaggcagtctttgggttctgttctttgtcacgtcccctacaagtaaattttgtttctttgaacgtttattaaaatgccaagacccaaccatttcttccacctgcttgattgtgccagtgtttgctcaggcctctttcttagtgttgctttcaaatccttctctttcctgggttgggaaggccaggcagggacagagcaaatgacacttctcttcctcttgccctccctgcctctttggtgctcttaaaagccagcagctgagaacatagcacaggcccacgtggtgagggcacccacagcttaaagacgcttccttctaaacacggcgaggtcacctctcactcttctgtctttgcaaaccgagaagagtggcatgcttctggcatcccaagtcaggattttagctcagatgaggcagaatgaagggcctctcttacaggcagtttgtgtttgattctctcgatcctggcacatccatgataaataggagtttttgaaagttggttttattaggtgttccctaatttttaccgtaataggtcatctcagcttatatgaaagtcaagtggggaactgggaaagccaaagtcagtcttgagcagagggagcacattttgtggacctggttccacctttccattccaaaccacctgtttccccttccattagcagaaactctgggggaactttgtgtctcagtcctagaatctccccaagtgagtggaagtgacatgatgcagtcttcctcatggggcacctgaaagaaattagtgtgggtgcttcgatctaccttgtctgtcagagttgaatatctctttccctatcatgctgcttctgaaaattcagttttggagcaagtcctgtgagcaagataagaatctatagaaccaagatgctcattttcagaagaaatatgttcaacctgggatcagacttccatgctctggggaatccaagtggtagcacctgtaaccctgtgtactaagtgctttgaagagaagagcaggcctcagacaccttttaattgcttaggagaaaccattgtctctgactgcaggtttgaataagttgaagaccagagaaaagtacacactgggctacaaaggaatttggagatagccaaggaacaggatttcccctagcaagctaccttctgttcaaatcatgaaaaaagactatttccccttagaatagggaagcttgctattttaaagctcttgtagtgcttttcttttaagggagatgtagtaaaagggaaaatgtagctcttagtttacacttcaaagatgtgggggtctttcagagaactaagaataacagttttatgtgcagagagagtttgccagatctgaagcatatacctcattgactaggctgttactttgggataggttgcagtaccagccacagccagcagatagaggaaaagacacacataaactcgcttctgagcgtccacttctgcactctctgctctgctgttactcagcccctgagtctgactcatctctgcacaacctctctgtgccatgaagataagtcttccatggccaaatcggtcatccgcactgcccttgggacttccgaagtgaaccattccaccagaacctttgattctgcacaagatttccttgctctgggaacaacccccaaatgcccttgggaggaacaacatgagctcaggaagcctctctttcttcacttaccattactaactctccaagcatagaaatccctgggaattgcgagaataactcccactattttaaaatttatattcagatttgtttcgtttcataagacacatcaaacaggcctatacaaaaggtttaggaaaagaaaacaatggtgagtcccggccctcttcgaattcactggcacctcatgcaagtgtaggaaggcacgctggatcgtctatctgattccaaagctgtcctttgccatctcatcccttggcctgccccccaaccctgaggatgcccctgccatccccccaacctcctcatattgcctctgaacccagatggcaatccatcccggttctctctgagggccacgggcttgggtagtggaaagggtgtttgggaaattgttaaatcagttacccgtagtagagctatttcttgtacttctaagttttctagaagtggaaggattgtagtcatcctgaaaatgggtttacttcaaaatccctcagccttgttcttcacgactgtctatactgagagtgtcatgtttccacaaagggctgacacctgagcctggattttcactcatccctgagaagccctttccagtagggtgggcaattcccaacttccttgccacaagcttcccaggctttctcccctggaaaactccagcttgagtcccagatacactcatgggctgccctgggcagccagcattcattgtaagttccctctttgaaaactggtgtgtgggtgttcagttctgtgtctggtgggtatggacagacagtaatctcctgtgatctgtgctagctgtgaggcagctctggaacgtgaagagctgtttggtttgaaccgtgaacaaaactgtgttttgagtttagctgacattaaagaaaaaagttcatcacgtgactgttaatgtaaacctggttattaaaataactatgaaattaccaa

SEQ ID NO: 387801 - DNA, 4718 bp, Homo sapiens
aaattaaccctttgctgaccacttactgctgcaggaaaggatttgaggaaccatgatgcctaactgccttggctggttattttagacataatggtttgctattgtgtttgcccagagattctgtcctgagaagattgaggagcaaaggctttcattcagatgtcacctttgtgataaccacagaggctaaggaaaaagtacttaccctctgccagacattgctctcagatgacaatgctgtgctatactattttactagtgagggatagaggcactgggaagctgagtaaagtgacacagttaggaagtggtagatctgagatgtggatataggctatctaattccagatcctgccaaaattatccataacctttgtgcagcactgcatcctcacagttcgtggaggtgggagccaccagtttgagaggttcatgtttctattgactcctggagactttttcttgcagctggaagctgaggctgtgttccgtgccatcaccattgccagccaaaccaattgccctctctacgtcacaaaggtcatgagcaagagtgcagctgacctcatctcacaagccaggaaaaaaggaaatgtagtctttggtgagcccatcactgccagcctcggcatagatggaacccattattggagcaagaactgggccaaggcggctgcatttgtgacatccccacccctgagccctgacccaactactccggactacatcaactccttgctggccagcggggatctgcagctatctgggagtgcccactgcaccttcagcactgcccagaaagcaattgggaaggacaacttcacagccattcctgagggcaccaatggtgtggaggagcggatgtctgtcatctgggacaaggctgtggccacagggaaaatggacgaaaaccagttcgtggctgtgacaagcacaaacgctgccaagatcttcaacctgtatccccgcaagggaagaatatctgtgggttctgacagcgacctcgtcatctgggatccagatgctgtgaagatcgtctctgccaagaaccaccagtctgcggcagagtacaacatctttgaagggatggagctgcgcggggctcctctggttgtcatctgccagggcaagatcatgctggaagatggcaacctgcacgtgacccagggggctggccgcttcataccctgcagcccgttctccgactatgtctacaagcgcattaaagcacggaggaagatggcagacctgcatgccgtcccaaggggcatgtacgatgggcctgtgtttgacctgaccaccacccccaaaggtggcacccccgcaggctctgctcggggctctcctactcggccgaacccacctgtgaggaatcttcatcagtcgggatttagcctgtcaggcacccaagtggatgagggggttcgctcagccagcaagcgcatcgtggcgcccccaggcggccgttctaatatcacatctctgagttaagcaagccttcctcaaagagaggggcagaagcaagaagagattgttttgaagccaaaatggtacaccgatatttaagaaggaaagcgaatccaaacggttgtgatctaaagaatcaataagcctcaagccttatgtttctccaatgttacgctcgcttgcctagctttacgaatattgctttgttttctgtttatgcatagccttgatttgtttgactcccctccccccatttacatgcatgcaatcagacaggccactaaggtaaaagagtctgctctatcatagtgttgagagcgtgtgtagtgctgcatcttatgacaaggggacagacaagctgggacgtcagggaaatgaacaaaagggacgcaggttatttggggtgagtgggtggtgggagcctggagcaaggtggagggtgcagaggggctggggtagggcatgtaggagggaggtgggtgggtcaggtgagtggaaggggtgttgtatattgtgttgatgacgtacgttatttccatggaagatagccgctgtggcagctgtcacatcaccacagctccctagggtctgccgagaaggcaggcagtctttgggttctgttctttgtcacgtcccctacaagtaaattttgtttctttgaacgtttattaaaatgccaagacccaaccatttcttccacctgcttgattgtgccagtgtttgctcaggcctctttcttagtgttgctttcaaatccttctctttcctgggttgggaaggccaggcagggacagagcaaatgacacttctcttcctcttgccctccctgcctctttggtgctcttaaaagccagcagctgagaacatagcacaggcccacgtggtgagggcacccacagcttaaagacgcttccttctaaacacggcgaggtcacctctcactcttctgtctttgcaaaccgagaagagtggcatgcttctggcatcccaagtcaggattttagctcagatgaggcagaatgaagggcctctcttacaggcagtttgtgtttgattctctcgatcctggcacatccatgataaataggagtttttgaaagttggttttattaggtgttccctaatttttaccgtaataggtcatctcagcttatatgaaagtcaagtggggaactgggaaagccaaagtcagtcttgagcagagggagcacattttgtggacctggttccacctttccattccaaaccacctgtttccccttccattagcagaaactctgggggaactttgtgtctcagtcctagaatctccccaagtgagtggaagtgacatgatgcagtcttcctcatggggcacctgaaagaaattagtgtgggtgcttcgatctaccttgtctgtcagagttgaatatctctttccctatcatgctgcttctgaaaattcagttttggagcaagtcctgtgagcaagataagaatctatagaaccaagatgctcattttcagaagaaatatgttcaacctgggatcagacttccatgctctggggaatccaagtggtagcacctgtaaccctgtgtactaagtgctttgaagagaagagcaggcctcagacaccttttaattgcttaggagaaaccattgtctctgactgcaggtttgaataagttgaagaccagagaaaagtacacactgggctacaaaggaatttggagatagccaaggaacaggatttcccctagcaagctaccttctgttcaaatcatgaaaaaagactatttccccttagaatagggaagcttgctattttaaagctcttgtagtgcttttcttttaagggagatgtagtaaaagggaaaatgtagctcttagtttacacttcaaagatgtgggggtctttcagagaactaagaataacagttttatgtgcagagagagtttgccagatctgaagcatatacctcattgactaggctgttactttgggataggttgcagtaccagccacagccagcagatagaggaaaagacacacataaactcgcttctgagcgtccacttctgcactctctgctctgctgttactcagcccctgagtctgactcatctctgcacaacctctctgtgccatgaagataagtcttccatggccaaatcggtcatccgcactgcccttgggacttccgaagtgaaccattccaccagaacctttgattctgcacaagatttccttgctctgggaacaacccccaaatgcccttgggaggaacaacatgagctcaggaagcctctctttcttcacttaccattactaactctccaagcatagaaatccctgggaattgcgagaataactcccactattttaaaatttatattcagatttgtttcgtttcataagacacatcaaacaggcctatacaaaaggtttaggaaaagaaaacaatggtgagtcccggccctcttcgaattcactggcacctcatgcaagtgtaggaaggcacgctggatcgtctatctgattccaaagctgtcctttgccatctcatcccttggcctgccccccaaccctgaggatgcccctgccatccccccaacctcctcatattgcctctgaacccagatggcaatccatcccggttctctctgagggccacgggcttgggtagtggaaagggtgtttgggaaattgttaaatcagttacccgtagtagagctatttcttgtacttctaagttttctagaagtggaaggattgtagtcatcctgaaaatgggtttacttcaaaatccctcagccttgttcttcacgactgtctatactgagagtgtcatgtttccacaaagggctgacacctgagcctggattttcactcatccctgagaagccctttccagtagggtgggcaattcccaacttccttgccacaagcttcccaggctttctcccctggaaaactccagcttgagtcccagatacactcatgggctgccctgggcagccagcattcattgtaagttccctctttgaaaactggtgtgtgggtgttcagttctgtgtctggtgggtatggacagacagtaatctcctgtgatctgtgctagctgtgaggcagctctggaacgtgaagagctgtttggtttgaaccgtgaacaaaactgtgttttgagtttagctgacattaaagaaaaaagttcatcacgtgactgttaatgtaaacctggttattaaaataactatgaaattaccaa

SEQ ID NO: 387802 - DNA, 5582 bp, Homo sapiens
cgtttgattttagcaggtagctaaaggacaatgtattccatcgccgaagggccatggttttgcttgtaataacatataaaccttcgtctgtcagccctgcctaaagtaaactcgggattgtgagcagtgcacgtggttcattactgatggggagcaatagcagttctactccaaatccatggctgcgcaccaggaacgtgtctgggctactgccttcccactccacaggtgttttctactttttactcacagagcagcattcatgttctttctttgattctgagactcagtcaggcagtggagtttctttaacaagatactacttggatattttttaaatacagggaatggttgagtccactgctaccgtgccccttgcagcctctgagagcgagtcacggctttccattttctaatgtgtatgttccgggtctggggaccccagcaggcccgccaggttgcagagtcggaccagtctccggcgtctgaaggggctgcgccgctgtttaccaccccgcgagcagcagaggcggcgcccagccctcctctcgaacaaaggcgcggccgccgcattcgacccgcgccatggcagaggagagcgggtgccgggagggaagccgggaaccgtctccattctgaaactagggcggggaagccgccgcgggagcccgggaggggggcggaggcgggcggaggcggcggcgcggccagcgcaccattcactccacctgatctcggggcgctgtgcgctgaggaaggcgcgggcgagccggagcagaagaaggagggagggagccagccgctgcagccaccaccgccaccatgtcctaccaaggcaagaagaacatcccgcggatcacgagtgaccgtctccttatcaagggaggcagaatcgtcaatgatgatcagtccttttatgctgatatttacatggaagatggcttaataaaacaaattggagacaatctgattgttcctggaggagtgaagaccattgaagccaatgggaagatggtgatccctggaggcatcgatgtccatactcacttccagatgccatataagggaatgaccacagtagatgacttcttccaagggacaaaggcggccttagcaggtggcaccaccatgatcattgaccatgtggtgcctgagcctgagtccagcctgactgaggcctatgagaaatggagagagtgggctgatgggaagagttgctgtgactatgccctgcatgtggacatcacccactggaatgacagcgtcaagcaggaagtgcagaacctcatcaaggacaaaggggttaactccttcatggtttatatggcttataaggatttgtatcaagtatctaacacagagctctatgagatcttcacctgcctgggagagctgggggccattgctcaagttcatgctgagaatggggatatcattgcccaggagcaaacccgcatgttggaaatggggataactggcccagaaggccatgtactgagcaggccagaagagctggaagctgaggctgtgttccgtgccatcaccattgccagccaaaccaattgccctctctacgtcacaaaggtcatgagcaagagtgcagctgacctcatctcacaagccaggaaaaaaggaaatgtagtctttggtgagcccatcactgccagcctcggcatagatggaacccattattggagcaagaactgggccaaggcggctgcatttgtgacatccccacccctgagccctgacccaactactccggactacatcaactccttgctggccagcggggatctgcagctatctgggagtgcccactgcaccttcagcactgcccagaaagcaattgggaaggacaacttcacagccattcctgagggcaccaatggtgtggaggagcggatgtctgtcatctgggacaaggctgtggccacagggaaaatggacgaaaaccagttcgtggctgtgacaagcacaaacgctgccaagatcttcaacctgtatccccgcaagggaagaatatctgtgggttctgacagcgacctcgtcatctgggatccagatgctgtgaagatcgtctctgccaagaaccaccagtctatggcagacctgcatgccgtcccaaggggcatgtacgatgggcctgtgtttgacctgaccaccacccccaaaggtggcacccccgcaggctctgctcggggctctcctactcggccgaacccacctgtgaggaatcttcatcagtcgggatttagcctgtcaggcacccaagtggatgagggggttcgctcagccagcaagcgcatcgtggcgcccccaggcggccgttctaatatcacatctctgagttaagcaagccttcctcaaagagaggggcagaagcaagaagagattgttttgaagccaaaatggtacaccgatatttaagaaggaaagcgaatccaaacggttgtgatctaaagaatcaataagcctcaagccttatgtttctccaatgttacgctcgcttgcctagctttacgaatattgctttgttttctgtttatgcatagccttgatttgtttgactcccctccccccatttacatgcatgcaatcagacaggccactaaggtaaaagagtctgctctatcatagtgttgagagcgtgtgtagtgctgcatcttatgacaaggggacagacaagctgggacgtcagggaaatgaacaaaagggacgcaggttatttggggtgagtgggtggtgggagcctggagcaaggtggagggtgcagaggggctggggtagggcatgtaggagggaggtgggtgggtcaggtgagtggaaggggtgttgtatattgtgttgatgacgtacgttatttccatggaagatagccgctgtggcagctgtcacatcaccacagctccctagggtctgccgagaaggcaggcagtctttgggttctgttctttgtcacgtcccctacaagtaaattttgtttctttgaacgtttattaaaatgccaagacccaaccatttcttccacctgcttgattgtgccagtgtttgctcaggcctctttcttagtgttgctttcaaatccttctctttcctgggttgggaaggccaggcagggacagagcaaatgacacttctcttcctcttgccctccctgcctctttggtgctcttaaaagccagcagctgagaacatagcacaggcccacgtggtgagggcacccacagcttaaagacgcttccttctaaacacggcgaggtcacctctcactcttctgtctttgcaaaccgagaagagtggcatgcttctggcatcccaagtcaggattttagctcagatgaggcagaatgaagggcctctcttacaggcagtttgtgtttgattctctcgatcctggcacatccatgataaataggagtttttgaaagttggttttattaggtgttccctaatttttaccgtaataggtcatctcagcttatatgaaagtcaagtggggaactgggaaagccaaagtcagtcttgagcagagggagcacattttgtggacctggttccacctttccattccaaaccacctgtttccccttccattagcagaaactctgggggaactttgtgtctcagtcctagaatctccccaagtgagtggaagtgacatgatgcagtcttcctcatggggcacctgaaagaaattagtgtgggtgcttcgatctaccttgtctgtcagagttgaatatctctttccctatcatgctgcttctgaaaattcagttttggagcaagtcctgtgagcaagataagaatctatagaaccaagatgctcattttcagaagaaatatgttcaacctgggatcagacttccatgctctggggaatccaagtggtagcacctgtaaccctgtgtactaagtgctttgaagagaagagcaggcctcagacaccttttaattgcttaggagaaaccattgtctctgactgcaggtttgaataagttgaagaccagagaaaagtacacactgggctacaaaggaatttggagatagccaaggaacaggatttcccctagcaagctaccttctgttcaaatcatgaaaaaagactatttccccttagaatagggaagcttgctattttaaagctcttgtagtgcttttcttttaagggagatgtagtaaaagggaaaatgtagctcttagtttacacttcaaagatgtgggggtctttcagagaactaagaataacagttttatgtgcagagagagtttgccagatctgaagcatatacctcattgactaggctgttactttgggataggttgcagtaccagccacagccagcagatagaggaaaagacacacataaactcgcttctgagcgtccacttctgcactctctgctctgctgttactcagcccctgagtctgactcatctctgcacaacctctctgtgccatgaagataagtcttccatggccaaatcggtcatccgcactgcccttgggacttccgaagtgaaccattccaccagaacctttgattctgcacaagatttccttgctctgggaacaacccccaaatgcccttgggaggaacaacatgagctcaggaagcctctctttcttcacttaccattactaactctccaagcatagaaatccctgggaattgcgagaataactcccactattttaaaatttatattcagatttgtttcgtttcataagacacatcaaacaggcctatacaaaaggtttaggaaaagaaaacaatggtgagtcccggccctcttcgaattcactggcacctcatgcaagtgtaggaaggcacgctggatcgtctatctgattccaaagctgtcctttgccatctcatcccttggcctgccccccaaccctgaggatgcccctgccatccccccaacctcctcatattgcctctgaacccagatggcaatccatcccggttctctctgagggccacgggcttgggtagtggaaagggtgtttgggaaattgttaaatcagttacccgtagtagagctatttcttgtacttctaagttttctagaagtggaaggattgtagtcatcctgaaaatgggtttacttcaaaatccctcagccttgttcttcacgactgtctatactgagagtgtcatgtttccacaaagggctgacacctgagcctggattttcactcatccctgagaagccctttccagtagggtgggcaattcccaacttccttgccacaagcttcccaggctttctcccctggaaaactccagcttgagtcccagatacactcatgggctgccctgggcagccagcattcattgtaagttccctctttgaaaactggtgtgtgggtgttcagttctgtgtctggtgggtatggacagacagtaatctcctgtgatctgtgctagctgtgaggcagctctggaacgtgaagagctgtttggtttgaaccgtgaacaaaactgtgttttgagtttagctgacattaaagaaaaaagttcatcacgtgactgttaatgtaaacctggttattaaaataactatgaaattaccaa

SEQ ID NO: 387803 - DNA, 3684 bp, Homo sapiens
ctttgcttctcacccctgcctctaggcggcagagtacaacatctttgaagggatggagctgcgcggggctcctctggttgtcatctgccagggcaagatcatgctggaagatggcaacctgcacgtgacccagggggctggccgcttcataccctgcagcccgttctccgactatgtctacaagcgcattaaagcacggaggaagatggcagacctgcatgccgtcccaaggggcatgtacgatgggcctgtgtttgacctgaccaccacccccaaaggtggcacccccgcaggctctgctcggggctctcctactcggccgaacccacctgtgaggaatcttcatcagtcgggatttagcctgtcaggcacccaagtggatgagggggttcgctcagccagcaagcgcatcgtggcgcccccaggcggccgttctaatatcacatctctgagttaagcaagccttcctcaaagagaggggcagaagcaagaagagattgttttgaagccaaaatggtacaccgatatttaagaaggaaagcgaatccaaacggttgtgatctaaagaatcaataagcctcaagccttatgtttctccaatgttacgctcgcttgcctagctttacgaatattgctttgttttctgtttatgcatagccttgatttgtttgactcccctccccccatttacatgcatgcaatcagacaggccactaaggtaaaagagtctgctctatcatagtgttgagagcgtgtgtagtgctgcatcttatgacaaggggacagacaagctgggacgtcagggaaatgaacaaaagggacgcaggttatttggggtgagtgggtggtgggagcctggagcaaggtggagggtgcagaggggctggggtagggcatgtaggagggaggtgggtgggtcaggtgagtggaaggggtgttgtatattgtgttgatgacgtacgttatttccatggaagatagccgctgtggcagctgtcacatcaccacagctccctagggtctgccgagaaggcaggcagtctttgggttctgttctttgtcacgtcccctacaagtaaattttgtttctttgaacgtttattaaaatgccaagacccaaccatttcttccacctgcttgattgtgccagtgtttgctcaggcctctttcttagtgttgctttcaaatccttctctttcctgggttgggaaggccaggcagggacagagcaaatgacacttctcttcctcttgccctccctgcctctttggtgctcttaaaagccagcagctgagaacatagcacaggcccacgtggtgagggcacccacagcttaaagacgcttccttctaaacacggcgaggtcacctctcactcttctgtctttgcaaaccgagaagagtggcatgcttctggcatcccaagtcaggattttagctcagatgaggcagaatgaagggcctctcttacaggcagtttgtgtttgattctctcgatcctggcacatccatgataaataggagtttttgaaagttggttttattaggtgttccctaatttttaccgtaataggtcatctcagcttatatgaaagtcaagtggggaactgggaaagccaaagtcagtcttgagcagagggagcacattttgtggacctggttccacctttccattccaaaccacctgtttccccttccattagcagaaactctgggggaactttgtgtctcagtcctagaatctccccaagtgagtggaagtgacatgatgcagtcttcctcatggggcacctgaaagaaattagtgtgggtgcttcgatctaccttgtctgtcagagttgaatatctctttccctatcatgctgcttctgaaaattcagttttggagcaagtcctgtgagcaagataagaatctatagaaccaagatgctcattttcagaagaaatatgttcaacctgggatcagacttccatgctctggggaatccaagtggtagcacctgtaaccctgtgtactaagtgctttgaagagaagagcaggcctcagacaccttttaattgcttaggagaaaccattgtctctgactgcaggtttgaataagttgaagaccagagaaaagtacacactgggctacaaaggaatttggagatagccaaggaacaggatttcccctagcaagctaccttctgttcaaatcatgaaaaaagactatttccccttagaatagggaagcttgctattttaaagctcttgtagtgcttttcttttaagggagatgtagtaaaagggaaaatgtagctcttagtttacacttcaaagatgtgggggtctttcagagaactaagaataacagttttatgtgcagagagagtttgccagatctgaagcatatacctcattgactaggctgttactttgggataggttgcagtaccagccacagccagcagatagaggaaaagacacacataaactcgcttctgagcgtccacttctgcactctctgctctgctgttactcagcccctgagtctgactcatctctgcacaacctctctgtgccatgaagataagtcttccatggccaaatcggtcatccgcactgcccttgggacttccgaagtgaaccattccaccagaacctttgattctgcacaagatttccttgctctgggaacaacccccaaatgcccttgggaggaacaacatgagctcaggaagcctctctttcttcacttaccattactaactctccaagcatagaaatccctgggaattgcgagaataactcccactattttaaaatttatattcagatttgtttcgtttcataagacacatcaaacaggcctatacaaaaggtttaggaaaagaaaacaatggtgagtcccggccctcttcgaattcactggcacctcatgcaagtgtaggaaggcacgctggatcgtctatctgattccaaagctgtcctttgccatctcatcccttggcctgccccccaaccctgaggatgcccctgccatccccccaacctcctcatattgcctctgaacccagatggcaatccatcccggttctctctgagggccacgggcttgggtagtggaaagggtgtttgggaaattgttaaatcagttacccgtagtagagctatttcttgtacttctaagttttctagaagtggaaggattgtagtcatcctgaaaatgggtttacttcaaaatccctcagccttgttcttcacgactgtctatactgagagtgtcatgtttccacaaagggctgacacctgagcctggattttcactcatccctgagaagccctttccagtagggtgggcaattcccaacttccttgccacaagcttcccaggctttctcccctggaaaactccagcttgagtcccagatacactcatgggctgccctgggcagccagcattcattgtaagttccctctttgaaaactggtgtgtgggtgttcagttctgtgtctggtgggtatggacagacagtaatctcctgtgatctgtgctagctgtgaggcagctctggaacgtgaagagctgtttggtttgaaccgtgaacaaaactgtgttttgagtttagctgacattaaagaaaaaagttcatcacgtgactgttaatgtaaacctggttattaaaataactatgaaattaccaa

SEQ ID NO: 387804 - DNA, 3758 bp, Homo sapiens
ctgctttgcactgtgggatcttgggcaagtgacctaacctttcagaacctcagttatctcctctgtaaaacagataagggcacctctctcaaaccatggtggtgaggattaaaggagataatggttaagcacggaaaacattgcctgccacaatgagtgtcacgtctttgtcattgttcttcttcccagtattattatcatgctctgggtcagatgaaatctagataagaacttggcttttcctaccagaggctagttttcggggccataagaaaagtctagaagacctgatagactggaatggaagtttcttgggaggtgaggccagcaaggcacttcatatcttgcactcttaaaattaacccagtttctctcttgcccacatccccctacccgccactctgttttttttttccccctgggaatttatttccaactgtaggcacccaagtggatgagggggttcgctcagccagcaagcgcatcgtggcgcccccaggcggccgttctaatatcacatctctgagttaagcaagccttcctcaaagagaggggcagaagcaagaagagattgttttgaagccaaaatggtacaccgatatttaagaaggaaagcgaatccaaacggttgtgatctaaagaatcaataagcctcaagccttatgtttctccaatgttacgctcgcttgcctagctttacgaatattgctttgttttctgtttatgcatagccttgatttgtttgactcccctccccccatttacatgcatgcaatcagacaggccactaaggtaaaagagtctgctctatcatagtgttgagagcgtgtgtagtgctgcatcttatgacaaggggacagacaagctgggacgtcagggaaatgaacaaaagggacgcaggttatttggggtgagtgggtggtgggagcctggagcaaggtggagggtgcagaggggctggggtagggcatgtaggagggaggtgggtgggtcaggtgagtggaaggggtgttgtatattgtgttgatgacgtacgttatttccatggaagatagccgctgtggcagctgtcacatcaccacagctccctagggtctgccgagaaggcaggcagtctttgggttctgttctttgtcacgtcccctacaagtaaattttgtttctttgaacgtttattaaaatgccaagacccaaccatttcttccacctgcttgattgtgccagtgtttgctcaggcctctttcttagtgttgctttcaaatccttctctttcctgggttgggaaggccaggcagggacagagcaaatgacacttctcttcctcttgccctccctgcctctttggtgctcttaaaagccagcagctgagaacatagcacaggcccacgtggtgagggcacccacagcttaaagacgcttccttctaaacacggcgaggtcacctctcactcttctgtctttgcaaaccgagaagagtggcatgcttctggcatcccaagtcaggattttagctcagatgaggcagaatgaagggcctctcttacaggcagtttgtgtttgattctctcgatcctggcacatccatgataaataggagtttttgaaagttggttttattaggtgttccctaatttttaccgtaataggtcatctcagcttatatgaaagtcaagtggggaactgggaaagccaaagtcagtcttgagcagagggagcacattttgtggacctggttccacctttccattccaaaccacctgtttccccttccattagcagaaactctgggggaactttgtgtctcagtcctagaatctccccaagtgagtggaagtgacatgatgcagtcttcctcatggggcacctgaaagaaattagtgtgggtgcttcgatctaccttgtctgtcagagttgaatatctctttccctatcatgctgcttctgaaaattcagttttggagcaagtcctgtgagcaagataagaatctatagaaccaagatgctcattttcagaagaaatatgttcaacctgggatcagacttccatgctctggggaatccaagtggtagcacctgtaaccctgtgtactaagtgctttgaagagaagagcaggcctcagacaccttttaattgcttaggagaaaccattgtctctgactgcaggtttgaataagttgaagaccagagaaaagtacacactgggctacaaaggaatttggagatagccaaggaacaggatttcccctagcaagctaccttctgttcaaatcatgaaaaaagactatttccccttagaatagggaagcttgctattttaaagctcttgtagtgcttttcttttaagggagatgtagtaaaagggaaaatgtagctcttagtttacacttcaaagatgtgggggtctttcagagaactaagaataacagttttatgtgcagagagagtttgccagatctgaagcatatacctcattgactaggctgttactttgggataggttgcagtaccagccacagccagcagatagaggaaaagacacacataaactcgcttctgagcgtccacttctgcactctctgctctgctgttactcagcccctgagtctgactcatctctgcacaacctctctgtgccatgaagataagtcttccatggccaaatcggtcatccgcactgcccttgggacttccgaagtgaaccattccaccagaacctttgattctgcacaagatttccttgctctgggaacaacccccaaatgcccttgggaggaacaacatgagctcaggaagcctctctttcttcacttaccattactaactctccaagcatagaaatccctgggaattgcgagaataactcccactattttaaaatttatattcagatttgtttcgtttcataagacacatcaaacaggcctatacaaaaggtttaggaaaagaaaacaatggtgagtcccggccctcttcgaattcactggcacctcatgcaagtgtaggaaggcacgctggatcgtctatctgattccaaagctgtcctttgccatctcatcccttggcctgccccccaaccctgaggatgcccctgccatccccccaacctcctcatattgcctctgaacccagatggcaatccatcccggttctctctgagggccacgggcttgggtagtggaaagggtgtttgggaaattgttaaatcagttacccgtagtagagctatttcttgtacttctaagttttctagaagtggaaggattgtagtcatcctgaaaatgggtttacttcaaaatccctcagccttgttcttcacgactgtctatactgagagtgtcatgtttccacaaagggctgacacctgagcctggattttcactcatccctgagaagccctttccagtagggtgggcaattcccaacttccttgccacaagcttcccaggctttctcccctggaaaactccagcttgagtcccagatacactcatgggctgccctgggcagccagcattcattgtaagttccctctttgaaaactggtgtgtgggtgttcagttctgtgtctggtgggtatggacagacagtaatctcctgtgatctgtgctagctgtgaggcagctctggaacgtgaagagctgtttggtttgaaccgtgaacaaaactgtgttttgagtttagctgacattaaagaaaaaagttcatcacgtgactgttaatgtaaacctggttattaaaataactatgaaattaccaa

SEQ ID NO: 387805 - DNA, 2567 bp, Homo sapiens
ggcaggtacgaggccgggtggtgaatcggccgatgtttgctcaggcctctttcttagtgttgctttcaaatccttctctttcctgggttgggaaggccaggcagggacagagcaaatgacacttctcttcctcttgccctccctgcctctttggtgctcttaaaagccagcagctgagaacatagcacaggcccacgtggtgagggcacccacagcttaaagacgcttccttctaaacacggcgaggtcacctctcactcttctgtctttgcaaaccgagaagagtggcatgcttctggcatcccaagtcaggattttagctcagatgaggcagaatgaagggcctctcttacaggcagtttgtgtttgattctctcgatcctggcacatccatgataaataggagtttttgaaagttggttttattaggtgttccctaatttttaccgtaataggtcatctcagcttatatgaaagtcaagtggggaactgggaaagccaaagtcagtcttgagcagagggagcacattttgtggacctggttccacctttccattccaaaccacctgtttccccttccattagcagaaactctgggggaactttgtgtctcagtcctagaatctccccaagtgagtggaagtgacatgatgcagtcttcctcatggggcacctgaaagaaattagtgtgggtgcttcgatctaccttgtctgtcagagttgaatatctctttccctatcatgctgcttctgaaaattcagttttggagcaagtcctgtgagcaagataagaatctatagaaccaagatgctcattttcagaagaaatatgttcaacctgggatcagacttccatgctctggggaatccaagtggtagcacctgtaaccctgtgtactaagtgctttgaagagaagagcaggcctcagacaccttttaattgcttaggagaaaccattgtctctgactgcaggtttgaataagttgaagaccagagaaaagtacacactgggctacaaaggaatttggagatagccaaggaacaggatttcccctagcaagctaccttctgttcaaatcatgaaaaaagactatttccccttagaatagggaagcttgctattttaaagctcttgtagtgcttttcttttaagggagatgtagtaaaagggaaaatgtagctcttagtttacacttcaaagatgtgggggtctttcagagaactaagaataacagttttatgtgcagagagagtttgccagatctgaagcatatacctcattgactaggctgttactttgggataggttgcagtaccagccacagccagcagatagaggaaaagacacacataaactcgcttctgagcgtccacttctgcactctctgctctgctgttactcagcccctgagtctgactcatctctgcacaacctctctgtgccatgaagataagtcttccatggccaaatcggtcatccgcactgcccttgggacttccgaagtgaaccattccaccagaacctttgattctgcacaagatttccttgctctgggaacaacccccaaatgcccttgggaggaacaacatgagctcaggaagcctctctttcttcacttaccattactaactctccaagcatagaaatccctgggaattgcgagaataactcccactattttaaaatttatattcagatttgtttcgtttcataagacacatcaaacaggcctatacaaaaggtttaggaaaagaaaacaatggtgagtcccggccctcttcgaattcactggcacctcatgcaagtgtaggaaggcacgctggatcgtctatctgattccaaagctgtcctttgccatctcatcccttggcctgccccccaaccctgaggatgcccctgccatccccccaacctcctcatattgcctctgaacccagatggcaatccatcccggttctctctgagggccacgggcttgggtagtggaaagggtgtttgggaaattgttaaatcagttacccgtagtagagctatttcttgtacttctaagttttctagaagtggaaggattgtagtcatcctgaaaatgggtttacttcaaaatccctcagccttgttcttcacgactgtctatactgagagtgtcatgtttccacaaagggctgacacctgagcctggattttcactcatccctgagaagccctttccagtagggtgggcaattcccaacttccttgccacaagcttcccaggctttctcccctggaaaactccagcttgagtcccagatacactcatgggctgccctgggcagccagcattcattgtaagttccctctttgaaaactggtgtgtgggtgttcagttctgtgtctggtgggtatggacagacagtaatctcctgtgatctgtgctagctgtgaggcagctctggaacgtgaagagctgtttggtttgaaccgtgaacaaaactgtgttttgagtttagctgacattaaagaaaaaagttcatcacgtgactgttaatgtaaacctggttattaaaataactatgaaattaccaa

SEQ ID NO: 387806 - DNA, 6138 bp, Homo sapiens
cgtttgattttagcaggtagctaaaggacaatgtattccatcgccgaagggccatggttttgcttgtaataacatataaaccttcgtctgtcagccctgcctaaagtaaactcgggattgtgagcagtgcacgtggttcattactgatggggagcaatagcagttctactccaaatccatggctgcgcaccaggaacgtgtctgggctactgccttcccactccacaggtgttttctactttttactcacagagcagcattcatgttctttctttgattctgagactcagtcaggcagtggagtttctttaacaagatactacttggatattttttaaatacagggaatggttgagtccactgctaccgtgccccttgcagcctctgagagcgagtcacggctttccattttctaatgtgtatgttccgggtctggggaccccagcaggcccgccaggttgcagagtcggaccagtctccggcgtctgaaggggctgcgccgctgtttaccaccccgcgagcagcagaggcggcgcccagccctcctctcgaacaaaggcgcggccgccgcattcgacccgcgccatggcagaggagagcgggtgccgggagggaagccgggaaccgtctccattctgaaactagggcggggaagccgccgcgggagcccgggaggggggcggaggcgggcggaggcggcggcgcggccagcgcaccattcactccacctgatctcggggcgctgtgcgctgaggaaggcgcgggcgagccggagcagaagaaggagggagggagccagccgctgcagccaccaccgccaccatgtcctaccaaggcaagaagaacatcccgcggatcacgagtgaccgtctccttatcaagggaggcagaatcgtcaatgatgatcagtccttttatgctgatatttacatggaagatggcttaataaaacaaattggagacaatctgattgttcctggaggagtgaagaccattgaagccaatgggaagatggtgatccctggaggcatcgatgtccatactcacttccagatgccatataagggaatgaccacagtagatgacttcttccaagggacaaaggcggccttagcaggtggcaccaccatgatcattgaccatgtggtgcctgagcctgagtccagcctgactgaggcctatgagaaatggagagagtgggctgatgggaagagttgctgtgactatgccctgcatgtggacatcacccactggaatgacagcgtcaagcaggaagtgcagaacctcatcaaggacaaaggggttaactccttcatggtttatatggcttataaggatttgtatcaagtatctaacacagagctctatgagatcttcacctgcctgggagagctgggggccattgctcaagttcatgctgagaatggggatatcattgcccaggagcaaacccgcatgttggaaatggggataactggcccagaaggccatgtactgagcaggccagaagagctggaagctgaggctgtgttccgtgccatcaccattgccagccaaaccaattgccctctctacgtcacaaaggtcatgagcaagagtgcagctgacctcatctcacaagccaggaaaaaaggaaatgtagtctttggtgagcccatcactgccagcctcggcatagatggaacccattattggagcaagaactgggccaaggcggctgcatttgtgacatccccacccctgagccctgacccaactactccggactacatcaactccttgctggccagcggggatctgcagctatctgggagtgcccactgcaccttcagcactgcccagaaagcaattgggaaggacaacttcacagccattcctgagggcaccaatggtgtggaggagcggatgtctgtcatctgggacaaggctgtggccacagggaaaatggacgaaaaccagttcgtggctgtgacaagcacaaacgctgccaagatcttcaacctgtatccccgcaagggaagaatatctgtgggttctgacagcgacctcgtcatctgggatccagatgctgtgaagatcgtctctgccaagaaccaccagtctgcggcagagtacaacatctttgaagggatggagctgcgcggggctcctctggttgtcatctgccagggcaagatcatgctggaagatggcaacctgcacgtgacccagggggctggccgcttcataccctgcagcccgttctccgactatgtctacaagcgcattaaagcacggaggaagatggcagacctgcatgccgtcccaaggggcatgtacgatgggcctgtgtttgacctgaccaccacccccaaaggtggcacccccgcaggctctgctcggggctctcctactcggccgaacccacctgtgaggaatcttcatcagtcgggatttagcctgtcaggcacccaagtggatgagggggttcgctcagccagcaagcgcatcgtggcgcccccaggcggccgttctaatatcacatctctgagttaagcaagccttcctcaaagagaggggcagaagcaagaagagattgttttgaagccaaaatggtacaccgatatttaagaaggaaagcgaatccaaacggttgtgatctaaagaatcaataagcctcaagccttatgtttctccaatgttacgctcgcttgcctagctttacgaatattgctttgttttctgtttatgcatagccttgatttgtttgactcccctccccccatttacatgcatgcaatcagacaggccactaaggtaaaagagtctgctctatcatagtgttgagagcgtgtgtagtgctgcatcttatgacaaggggacagacaagctgggacgtcagggaaatgaacaaaagggacgcaggttatttggggtgagtgggtggtgggagcctggagcaaggtggagggtgcagaggggctggggtagggcatgtaggagggaggtgggtgggtcaggtgagtggaaggggtgttgtatattgtgttgatgacgtacgttatttccatggaagatagccgctgtggcagctgtcacatcaccacagctccctagggtctgccgagaaggcaggcagtctttgggttctgttctttgtcacgtcccctacaagtaaattttgtttctttgaacgtttattaaaatgccaagacccaaccatttcttccacctgcttgattgtgccagtgtttgctcaggcctctttcttagtgttgctttcaaatccttctctttcctgggttgggaaggccaggcagggacagagcaaatgacacttctcttcctcttgccctccctgcctctttggtgctcttaaaagccagcagctgagaacatagcacaggcccacgtggtgagggcacccacagcttaaagacgcttccttctaaacacggcgaggtcacctctcactcttctgtctttgcaaaccgagaagagtggcatgcttctggcatcccaagtcaggattttagctcagatgaggcagaatgaagggcctctcttacaggcagtttgtgtttgattctctcgatcctggcacatccatgataaataggagtttttgaaagttggttttattaggtgttccctaatttttaccgtaataggtcatctcagcttatatgaaagtcaagtggggaactgggaaagccaaagtcagtcttgagcagagggagcacattttgtggacctggttccacctttccattccaaaccacctgtttccccttccattagcagaaactctgggggaactttgtgtctcagtcctagaatctccccaagtgagtggaagtgacatgatgcagtcttcctcatggggcacctgaaagaaattagtgtgggtgcttcgatctaccttgtctgtcagagttgaatatctctttccctatcatgctgcttctgaaaattcagttttggagcaagtcctgtgagcaagataagaatctatagaaccaagatgctcattttcagaagaaatatgttcaacctgggatcagacttccatgctctggggaatccaagtggtagcacctgtaaccctgtgtactaagtgctttgaagagaagagcaggcctcagacaccttttaattgcttaggagaaaccattgtctctgactgcaggtttgaataagttgaagaccagagaaaagtacacactgggctacaaaggaatttggagatagccaaggaacaggatttcccctagcaagctaccttctgttcaaatcatgaaaaaagactatttccccttagaatagggaagcttgctattttaaagctcttgtagtgcttttcttttaagggagatgtagtaaaagggaaaatgtagctcttagtttacacttcaaagatgtgggggtctttcagagaactaagaataacagttttatgtgcagagagagtttgccagatctgaagcatatacctcattgactaggctgttactttgggataggttgcagtaccagccacagccagcagatagaggaaaagacacacataaactcgcttctgagcgtccacttctgcactctctgctctgctgttactcagcccctgagtctgactcatctctgcacaacctctctgtgccatgaagataagtcttccatggccaaatcggtcatccgcactgcccttgggacttccgaagtgaaccattccaccagaacctttgattctgcacaagatttccttgctctgggaacaacccccaaatgcccttgggaggaacaacatgagctcaggaagcctctctttcttcacttaccattactaactctccaagcatagaaatccctgggaattgcgagaataactcccactattttaaaatttatattcagatttgtttcgtttcataagacacatcaaacaggcctatacaaaaggtttaggaaaagaaaacaatggtgagtcccggccctcttcgaattcactggcacctcatgcaagtgtaggaaggcacgctggatcgtctatctgattccaaagctgtcctttgccatctcatcccttggcctgccccccaaccctgaggatgcccctgccatccccccaacctcctcatattgcctctgaacccagatggcaatccatcccggttctctctgagggccacgggcttgggtagtggaaagggtgtttgggaaattgttaaatcagttacccgtagtagagctatttcttgtacttctaagttttctagaagtggaaggattgtagtcatcctgaaaatgggtttacttcaaaatccctcagccttgttcttcacgactgtctatactgagagtgtcatgtttccacaaagggctgacacctgagcctggattttcactcatccctgagaagccctttccagtagggtgggcaattcccaacttccttgccacaagcttcccaggctttctcccctggaaaactccagcttgagtcccagatacactcatgggctgccctgggcagccagcattcattgtaagttccctctttgaaaactggtgtgtgggtgttcagttctgtgtctggtgggtatggacagacagtaatctcctgtgatctgtgctagctgtgaggcagctctggaacgtgaagagctgtttggtttgaaccgtgaacaaaactgtgttttgagtttagctgacattaaagaaaaaagttcatcacgtgactgttaatgtaaacctggttattaaaataactatgaaattaccaaaaaaaaaaaaaaaaaaaacggggggaatatattgggggggggaaaaagggttataaaggggacccaagggtccaatggtgttccccggccccacgtttcgttgacaaaggggggaaaaagtgcgcgggaccccccaatagagagagcgaataatccggaaaaccccaggctaaccggttagacgcctctcaacgaacagaccatagacaaacaaagaacaagcgcaacagacagcggaggcagcagacataaaacagaagaagacaacaacgcactacaagcagcagagagccgcagagacaagcaagcgaagaaaacgaacacaacacagtagaacaaacgaacacaacaaacaagacacaacagacgacggaca

SEQ ID NO: 387807 - DNA, 5787 bp, Homo sapiens
cgtttgattttagcaggtagctaaaggacaatgtattccatcgccgaagggccatggttttgcttgtaataacatataaaccttcgtctgtcagccctgcctaaagtaaactcgggattgtgagcagtgcacgtggttcattactgatggggagcaatagcagttctactccaaatccatggctgcgcaccaggaacgtgtctgggctactgccttcccactccacaggtgttttctactttttactcacagagcagcattcatgttctttctttgattctgagactcagtcaggcagtggagtttctttaacaagatactacttggatattttttaaatacagggaatggttgagtccactgctaccgtgccccttgcagcctctgagagcgagtcacggctttccattttctaatgtgtatgttccgggtctggggaccccagcaggcccgccaggttgcagagtcggaccagtctccggcgtctgaaggggctgcgccgctgtttaccaccccgcgagcagcagaggcggcgcccagccctcctctcgaacaaaggcgcggccgccgcattcgacccgcgccatggcagaggagagcgggtgccgggagggaagccgggaaccgtctccattctgaaactagggcggggaagccgccgcgggagcccgggaggggggcggaggcgggcggaggcggcggcgcggccagcgcaccattcactccacctgatctcggggcgctgtgcgctgaggaaggcgcgggcgagccggagcagaagaaggagggagggagccagccgctgcagccaccaccgccaccatgtcctaccaaggcaagaagaacatcccgcggatcacgagtgaccgtctccttatcaagggaggcagaatcgtcaatgatgatcagtccttttatgctgatatttacatggaagatggcttaataaaacaaattggagacaatctgattgttcctggaggagtgaagaccattgaagccaatgggaagatggtgatccctggaggcatcgatgtccatactcacttccagatgccatataagggaatgaccacagtagatgacttcttccaagggacaaaggcggccttagcaggtggcaccaccatgatcattgaccatgtggtgcctgagcctgagtccagcctgactgaggcctatgagaaatggagagagtgggctgatgggaagagttgctgtgactatgccctgcatgtggacatcacccactggaatgacagcgtcaagcaggaagtgcagaacctcatcaaggacaaaggggttaactccttcatggtttatatggcttataaggatttgtatcaagtatctaacacagagctctatgagatcttcacctgcctgggagagctgggggccattgctcaagttcatgctgagaatggggatatcattgcccaggagcaaacccgcatgttggaaatggggataactggcccagaaggccatgtactgagcaggccagaagagctggaagctgaggctgtgttccgtgccatcaccattgccagccaaaccaattgccctctctacgtcacaaaggtcatgagcaagagtgcagctgacctcatctcacaagccaggaaaaaaggaaatgtagtctttggtgagcccatcactgccagcctcggcatagatggaacccattattggagcaagaactgggccaaggcggctgcatttgtgacatccccacccctgagccctgacccaactactccggactacatcaactccttgctggccagcggggatctgcagctatctgggagtgcccactgcaccttcagcactgcccagaaagcaattgggaaggacaacttcacagccattcctgagggcaccaatggtgtggaggagcggatgtctgtcatctgggacaaggctgtggccacagggaaaatggacgaaaaccagttcgtggctgtgacaagcacaaacgctgccaagatcttcaacctgtatccccgcaagggaagaatatctgtgggttctgacagcgacctcgtcatctgggatccagatgctgtgaagatcgtctctgccaagaaccaccagtctgcggcagagtacaacatctttgaagggatggagctgcgcggggctcctctggttgtcatctgccagggcaagatcatgctggaagatggcaacctgcacgtgacccagggggctggccgcttcataccctgcagcccgttctccgactatgtctacaagcgcattaaagcacggaggaagatggcagacctgcatgccgtcccaaggggcatgtacgatgggcctgtgtttgacctgaccaccacccccaaaggtggcacccccgcaggctctgctcggggctctcctactcggccgaacccacctgtgaggaatcttcatcagtcgggatttagcctgtcaggcacccaagtggatgagggggttcgctcagccagcaagcgcatcgtggcgcccccaggcggccgttctaatatcacatctctgagttaagcaagccttcctcaaagagaggggcagaagcaagaagagattgttttgaagccaaaatggtacaccgatatttaagaaggaaagcgaatccaaacggttgtgatctaaagaatcaataagcctcaagccttatgtttctccaatgttacgctcgcttgcctagctttacgaatattgctttgttttctgtttatgcatagccttgatttgtttgactcccctccccccatttacatgcatgcaatcagacaggccactaaggtaaaagagtctgctctatcatagtgttgagagcgtgtgtagtgctgcatcttatgacaaggggacagacaagctgggacgtcagggaaatgaacaaaagggacgcaggttatttggggtgagtgggtggtgggagcctggagcaaggtggagggtgcagaggggctggggtagggcatgtaggagggaggtgggtgggtcaggtgagtggaaggggtgttgtatattgtgttgatgacgtacgttatttccatggaagatagccgctgtggcagctgtcacatcaccacagctccctagggtctgccgagaaggcaggcagtctttgggttctgttctttgtcacgtcccctacaagtaaattttgtttctttgaacgtttattaaaatgccaagacccaaccatttcttccacctgcttgattgtgccagtgtttgctcaggcctctttcttagtgttgctttcaaatccttctctttcctgggttgggaaggccaggcagggacagagcaaatgacacttctcttcctcttgccctccctgcctctttggtgctcttaaaagccagcagctgagaacatagcacaggcccacgtggtgagggcacccacagcttaaagacgcttccttctaaacacggcgaggtcacctctcactcttctgtctttgcaaaccgagaagagtggcatgcttctggcatcccaagtcaggattttagctcagatgaggcagaatgaagggcctctcttacaggcagtttgtgtttgattctctcgatcctggcacatccatgataaataggagtttttgaaagttggttttattaggtgttccctaatttttaccgtaataggtcatctcagcttatatgaaagtcaagtggggaactgggaaagccaaagtcagtcttgagcagagggagcacattttgtggacctggttccacctttccattccaaaccacctgtttccccttccattagcagaaactctgggggaactttgtgtctcagtcctagaatctccccaagtgagtggaagtgacatgatgcagtcttcctcatggggcacctgaaagaaattagtgtgggtgcttcgatctaccttgtctgtcagagttgaatatctctttccctatcatgctgcttctgaaaattcagttttggagcaagtcctgtgagcaagataagaatctatagaaccaagatgctcattttcagaagaaatatgttcaacctgggatcagacttccatgctctggggaatccaagtggtagcacctgtaaccctgtgtactaagtgctttgaagagaagagcaggcctcagacaccttttaattgcttaggagaaaccattgtctctgactgcaggtttgaataagttgaagaccagagaaaagtacacactgggctacaaaggaatttggagatagccaaggaacaggatttcccctagcaagctaccttctgttcaaatcatgaaaaaagactatttccccttagaatagggaagcttgctattttaaagctcttgtagtgcttttcttttaagggagatgtagtaaaagggaaaatgtagctcttagtttacacttcaaagatgtgggggtctttcagagaactaagaataacagttttatgtgcagagagagtttgccagatctgaagcatatacctcattgactaggctgttactttgggataggttgcagtaccagccacagccagcagatagaggaaaagacacacataaactcgcttctgagcgtccacttctgcactctctgctctgctgttactcagcccctgagtctgactcatctctgcacaacctctctgtgccatgaagataagtcttccatggccaaatcggtcatccgcactgcccttgggacttccgaagtgaaccattccaccagaacctttgattctgcacaagatttccttgctctgggaacaacccccaaatgcccttgggaggaacaacatgagctcaggaagcctctctttcttcacttaccattactaactctccaagcatagaaatccctgggaattgcgagaataactcccactattttaaaatttatattcagatttgtttcgtttcataagacacatcaaacaggcctatacaaaaggtttaggaaaagaaaacaatggtgagtcccggccctcttcgaattcactggcacctcatgcaagtgtaggaaggcacgctggatcgtctatctgattccaaagctgtcctttgccatctcatcccttggcctgccccccaaccctgaggatgcccctgccatccccccaacctcctcatattgcctctgaacccagatggcaatccatcccggttctctctgagggccacgggcttgggtagtggaaagggtgtttgggaaattgttaaatcagttacccgtagtagagctatttcttgtacttctaagttttctagaagtggaaggattgtagtcatcctgaaaatgggtttacttcaaaatccctcagccttgttcttcacgactgtctatactgagagtgtcatgtttccacaaagggctgacacctgagcctggattttcactcatccctgagaagccctttccagtagggtgggcaattcccaacttccttgccacaagcttcccaggctttctcccctggaaaactccagcttgagtcccagatacactcatgggctgccctgggcagccagcattcattgtaagttccctctttgaaaactggtgtgtgggtgttcagttctgtgtctggtgggtatggacagacagtaatctcctgtgatctgtgctagctgtgaggcagctctggaacgtgaagagctgtttggtttgaaccgtgaacaaaactgtgttttgagtttagctgacattaaagaaaaaagttcatcacgtgactgttaatgtaaacctggttattaaaataactatgaaattaccaataccaacattgttctccagtcttct

SEQ ID NO: 387808 - DNA, 1394 bp, Homo sapiens
tgtcccatggtggacggcccctccgcagcgtctgggggtctttcagagaactaagaataacagttttatgtgcagagagagtttgccagatctgaagcatatacctcattgactaggctgttactttgggataggttgcagtaccagccacagccagcagatagaggaaaagacacacataaactcgcttctgagcgtccacttctgcactctctgctctgctgttactcagcccctgagtctgactcatctctgcacaacctctctgtgccatgaagataagtcttccatggccaaatcggtcatccgcactgcccttgggacttccgaagtgaaccattccaccagaacctttgattctgcacaagatttccttgctctgggaacaacccccaaatgcccttgggaggaacaacatgagctcaggaagcctctctttcttcacttaccattactaactctccaagcatagaaatccctgggaattgcgagaataactcccactattttaaaatttatattcagatttgtttcgtttcataagacacatcaaacaggcctatacaaaaggtttaggaaaagaaaacaatggtgagtcccggccctcttcgaattcactggcacctcatgcaagtgtaggaaggcacgctggatcgtctatctgattccaaagctgtcctttgccatctcatcccttggcctgccccccaaccctgaggatgcccctgccatccccccaacctcctcatattgcctctgaacccagatggcaatccatcccggttctctctgagggccacgggcttgggtagtggaaagggtgtttgggaaattgttaaatcagttacccgtagtagagctatttcttgtacttctaagttttctagaagtggaaggattgtagtcatcctgaaaatgggtttacttcaaaatccctcagccttgttcttcacgactgtctatactgagagtgtcatgtttccacaaagggctgacacctgagcctggattttcactcatccctgagaagccctttccagtagggtgggcaattcccaacttccttgccacaagcttcccaggctttctcccctggaaaactccagcttgagtcccagatacactcatgggctgccctgggcagccagcattcattgtaagttccctctttgaaaactggtgtgtgggtgttcagttctgtgtctggtgggtatggacagacagtaatctcctgtgatctgtgctagctgtgaggcagctctggaacgtgaagagctgtttggtttgaaccgtgaacaaaactgtgttttgagtttagctgacattaaagaaaaaagttcatcacgtgactgttaatgtaaacctggttattaaaataactatgaaattaccaa

SEQ ID NO: 387809 - DNA, 1397 bp, Homo sapiens
tctctagaggcacccctccccgtacgcccaaaaagtgggggtctttcagagaactaagaataacagttttatgtgcagagagagtttgccagatctgaagcatatacctcattgactaggctgttactttgggataggttgcagtaccagccacagccagcagatagaggaaaagacacacataaactcgcttctgagcgtccacttctgcactctctgctctgctgttactcagcccctgagtctgactcatctctgcacaacctctctgtgccatgaagataagtcttccatggccaaatcggtcatccgcactgcccttgggacttccgaagtgaaccattccaccagaacctttgattctgcacaagatttccttgctctgggaacaacccccaaatgcccttgggaggaacaacatgagctcaggaagcctctctttcttcacttaccattactaactctccaagcatagaaatccctgggaattgcgagaataactcccactattttaaaatttatattcagatttgtttcgtttcataagacacatcaaacaggcctatacaaaaggtttaggaaaagaaaacaatggtgagtcccggccctcttcgaattcactggcacctcatgcaagtgtaggaaggcacgctggatcgtctatctgattccaaagctgtcctttgccatctcatcccttggcctgccccccaaccctgaggatgcccctgccatccccccaacctcctcatattgcctctgaacccagatggcaatccatcccggttctctctgagggccacgggcttgggtagtggaaagggtgtttgggaaattgttaaatcagttacccgtagtagagctatttcttgtacttctaagttttctagaagtggaaggattgtagtcatcctgaaaatgggtttacttcaaaatccctcagccttgttcttcacgactgtctatactgagagtgtcatgtttccacaaagggctgacacctgagcctggattttcactcatccctgagaagccctttccagtagggtgggcaattcccaacttccttgccacaagcttcccaggctttctcccctggaaaactccagcttgagtcccagatacactcatgggctgccctgggcagccagcattcattgtaagttccctctttgaaaactggtgtgtgggtgttcagttctgtgtctggtgggtatggacagacagtaatctcctgtgatctgtgctagctgtgaggcagctctggaacgtgaagagctgtttggtttgaaccgtgaacaaaactgtgttttgagtttagctgacattaaagaaaaaagttcatcacgtgactgttaatgtaaacctggttattaaaataactatgaaattaccaa

SEQ ID NO: 387810 - DNA, 1321 bp, Homo sapiens
ggttgcagtaccagccacagccagcatatacctcattgactaggctgttactttgggataggttgcagtaccagccacagccagcagatagaggaaaagacacacataaactcgcttctgagcgtccacttctgcactctctgctctgctgttactcagcccctgagtctgactcatctctgcacaacctctctgtgccatgaagataagtcttccatggccaaatcggtcatccgcactgcccttgggacttccgaagtgaaccattccaccagaacctttgattctgcacaagatttccttgctctgggaacaacccccaaatgcccttgggaggaacaacatgagctcaggaagcctctctttcttcacttaccattactaactctccaagcatagaaatccctgggaattgcgagaataactcccactattttaaaatttatattcagatttgtttcgtttcataagacacatcaaacaggcctatacaaaaggtttaggaaaagaaaacaatggtgagtcccggccctcttcgaattcactggcacctcatgcaagtgtaggaaggcacgctggatcgtctatctgattccaaagctgtcctttgccatctcatcccttggcctgccccccaaccctgaggatgcccctgccatccccccaacctcctcatattgcctctgaacccagatggcaatccatcccggttctctctgagggccacgggcttgggtagtggaaagggtgtttgggaaattgttaaatcagttacccgtagtagagctatttcttgtacttctaagttttctagaagtggaaggattgtagtcatcctgaaaatgggtttacttcaaaatccctcagccttgttcttcacgactgtctatactgagagtgtcatgtttccacaaagggctgacacctgagcctggattttcactcatccctgagaagccctttccagtagggtgggcaattcccaacttccttgccacaagcttcccaggctttctcccctggaaaactccagcttgagtcccagatacactcatgggctgccctgggcagccagcattcattgtaagttccctctttgaaaactggtgtgtgggtgttcagttctgtgtctggtgggtatggacagacagtaatctcctgtgatctgtgctagctgtgaggcagctctggaacgtgaagagctgtttggtttgaaccgtgaacaaaactgtgttttgagtttagctgacattaaagaaaaaagttcatcacgtgactgttaatgtaaacctggttattaaaataactatgaaattaccaa

SEQ ID NO: 387811 - DNA, 1051 bp, Homo sapiens
gcggaggtcgatctagaggtccccgtctggagcaatctgggaacaacccccaaatgcccttgggaggaacaacatgagctcaggaagcctctctttcttcacttaccattactaactctccaagcatagaaatccctgggaattgcgagaataactcccactattttaaaatttatattcagatttgtttcgtttcataagacacatcaaacaggcctatacaaaaggtttaggaaaagaaaacaatggtgagtcccggccctcttcgaattcactggcacctcatgcaagtgtaggaaggcacgctggatcgtctatctgattccaaagctgtcctttgccatctcatcccttggcctgccccccaaccctgaggatgcccctgccatccccccaacctcctcatattgcctctgaacccagatggcaatccatcccggttctctctgagggccacgggcttgggtagtggaaagggtgtttgggaaattgttaaatcagttacccgtagtagagctatttcttgtacttctaagttttctagaagtggaaggattgtagtcatcctgaaaatgggtttacttcaaaatccctcagccttgttcttcacgactgtctatactgagagtgtcatgtttccacaaagggctgacacctgagcctggattttcactcatccctgagaagccctttccagtagggtgggcaattcccaacttccttgccacaagcttcccaggctttctcccctggaaaactccagcttgagtcccagatacactcatgggctgccctgggcagccagcattcattgtaagttccctctttgaaaactggtgtgtgggtgttcagttctgtgtctggtgggtatggacagacagtaatctcctgtgatctgtgctagctgtgaggcagctctggaacgtgaagagctgtttggtttgaaccgtgaacaaaactgtgttttgagtttagctgacattaaagaaaaaagttcatcacgtgactgttaatgtaaacctggttattaaaataactatgaaattaccaa

SEQ ID NO: 387812 - DNA, 4992 bp, Homo sapiens
cgtttgattttagcaggtagctaaaggacaatgtattccatcgccgaagggccatggttttgcttgtaataacatataaaccttcgtctgtcagccctgcctaaagtaaactcgggattgtgagcagtgcacgtggttcattactgatggggagcaatagcagttctactccaaatccatggctgcgcaccaggaacgtgtctgggctactgccttcccactccacaggtgttttctactttttactcacagagcagcattcatgttctttctttgattctgagactcagtcaggcagtggagtttctttaacaagatactacttggatattttttaaatacagggaatggttgagtccactgctaccgtgccccttgcagcctctgagagcgagtcacggctttccattttctaatgtgtatgttccgggtctggggaccccagcaggcccgccaggttgcagagtcggaccagtctccggcgtctgaaggggctgcgccgctgtttaccaccccgcgagcagcagaggcggcgcccagccctcctctcgaacaaaggcgcggccgccgcattcgacccgcgccatggcagaggagagcgggtgccgggagggaagccgggaaccgtctccattctgaaactagggcggggaagccgccgcgggagcccgggaggggggcggaggcgggcggaggcggcggcgcggccagcgcaccattcactccacctgatctcggggcgctgtgcgctgaggaaggcgcgggcgagccggagcagaagaaggagggagggagccagccgctgcagccaccaccgccaccatgtcctaccaaggcaagaagaacatcccgcggatcacgagtgaccgtctccttatcaagggaggcagaatcgtcaatgatgatcagtccttttatgctgatatttacatggaagatggcttaataaaacaaattggagacaatctgattgttcctggaggagtgaagaccattgaagccaatgggaagatggtgatccctggaggcatcgatgtccatactcacttccagatgccatataagggaatgaccacagtagatgacttcttccaagggacaaaggcggccttagcaggtggcaccaccatgatcattgaccatgtggtgcctgagcctgagtccagcctgactgaggcctatgagaaatggagagagtgggctgatgggaagagttgctgtgactatgccctgcatgtggacatcacccactggaatgacagcgtcaagcaggaagtgcagaacctcatcaaggacaaaggggttaactccttcatggtttatatggcttataaggatttgtatcaagtatctaacacagagctctatgagatcttcacctgcctgggagagctgggggccattgctcaagttcatgctgagaatggggatatcattgcccaggagcaaacccgcatgttggaaatggggataactggcccagaaggccatgtactgagcaggccagaagagctggaagctgaggctgtgttccgtgccatcaccattgccagccaaaccaattgccctctctacgtcacaaaggtcatgagcaagagtgcagctgacctcatctcacaagccaggaaaaaaggaaatgtagtctttggtgagcccatcactgccagcctcggcatagatggaacccattattggagcaagaactgggccaaggcggctgcatttgtgacatccccacccctgagccctgacccaactactccggactacatcaactccttgctggccagcggggatctgcagctatctgggagtgcccactgcaccttcagcactgcccagaaagcaattgggaaggacaacttcacagccattcctgagggcaccaatggtgtggaggagcggatgtctgtcatctgggacaaggctgtggccacagggaaaatggacgaaaaccagttcgtggctgtgacaagcacaaacgctgccaagatcttcaacctgtatccccgcaagggaagaatatctgtgggttctgacagcgacctcgtcatctgggatccagatgctgtgaagatcgtctctgccaagaaccaccagtctgcggcagagtacaacatctttgaagggatggagctgcgcggggctcctctggttgtcatctgccagggcaagatcatgctggaagatggcaacctgcacgtgacccagggggctggccgcttcataccctgcagcccgttctccgactatgtctacaagcgcattaaagcacggaggaagatggcagacctgcatgccgtcccaaggggcatgtacgatgggcctgtgtttgacctgaccaccacccccaaaggtggcacccccgcaggctctgctcggggctctcctactcggccgaacccacctgtgaggaatcttcatcagtcgggatttagcctgtcaggcacccaagtggatgagggggttcgctcagccagcaagcgcatcgtggcgcccccaggcggccgttctaatatcacatctctgagttaagcaagccttcctcaaagagaggggcagaagcaagaagagattgttttgaagccaaaatggtacaccgatatttaagaaggaaagcgaatccaaacggttgtgatctaaagaatcaataagcctcaagccttatgtttctccaatgttacgctcgcttgcctagctttacgaatattgctttgttttctgtttatgcatagccttgatttgtttgactcccctccccccatttacatgcatgcaatcagacaggccactaaggtaaaagagtctgctctatcatagtgttgagagcgtgtgtagtgctgcatcttatgacaaggggacagacaagctgggacgtcagggaaatgaacaaaagggacgcaggttatttggggtgagtgggtggtgggagcctggagcaaggtggagggtgcagaggggctggggtagggcatgtaggagggaggtgggtgggtcaggtgagtggaaggggtgttgtatattgtgttgatgacgtacgttatttccatggaagatagccgctgtggcagctgtcacatcaccacagctccctagggtctgccgagaaggcaggcagtctttgggttctgttctttgtcacgtcccctacaagtaaattttgtttctttgaacgtttattaaaatgccaagacccaaccatttcttccacctgcttgattgtgccagtgtttgctcaggcctctttcttagtgttgctttcaaatccttctctttcctgggttgggaaggccaggcagggacagagcaaatgacacttctcttcctcttgccctccctgcctctttggtgctcttaaaagccagcagctgagaacatagcacaggcccacgtggtgagggcacccacagcttaaagacgcttccttctaaacacggcgaggtcacctctcactcttctgtctttgcaaaccgagaagagtggcatgcttctggcatcccaagtcaggattttagctcagatgaggcagaatgaagggcctctcttacaggcagtttgtgtttgattctctcgatcctggcacatccatgataaataggagtttttgaaagttggttttattaggtgttccctaatttttaccgtaataggtcatctcagcttatatgaaagtcaagtggggaactgggaaagccaaagtcagtcttgagcagagggagcacattttgtggacctggttccacctttccattccaaaccacctgtttccccttccattagcagaaactctgggggaactttgtgtctcagtcctagaatctccccaagtgagtggaagtgacatgatgcagtcttcctcatggggcacctgaaagaaattagtgtgggtgcttcgatctaccttgtctgtcagagttgaatatctctttccctatcatgctgcttctgaaaattcagttttggagcaagtcctgtgagcaagataagaatctatagaaccaagatgctcattttcagaagaaatatgttcaacctgggatcagacttccatgctctggggaatccaagtggtagcacctgtaaccctgtgtactaagtgctttgaagagaagagcaggcctcagacaccttttaattgcttaggagaaaccattgtctctgactgcaggtttgaataagttgaagaccagagaaaagtacacactgggctacaaaggaatttggagatagccaaggaacaggatttcccctagcaagctaccttctgttcaaatcatgaaaaaagactatttccccttagaatagggaagcttgctattttaaagctcttgtagtgcttttcttttaagggagatgtagtaaaagggaaaatgtagctcttagtttacacttcaaagatgtgggggtctttcagagaactaagaataacagttttatgtgcagagagagtttgccagatctgaagcatatacctcattgactaggctgttactttgggataggttgcagtaccagccacagccagcagatagaggaaaagacacacataaactcgcttctgagcgtccacttctgcactctctgctctgctgttactcagcccctgagtctgactcatctctgcacaacctctctgtgccatgaagataagtcttccatggccaaatcggtcatccgcactgcccttgggacttccgaagtgaaccattccaccagatacactcatgggctgccctgggcagccagcattcattgtaagttccctctttgaaaactggtgtgtgggtgttcagttctgtgtctggtgggtatggacagacagtaatctcctgtgatctgtgctagctgtgaggcagctctggaacgtgaagagctgtttggtttgaaccgtgaacaaaactgtgttttgagtttagctgacattaaagaaaaaagttcatcacgtgactgttaatgtaaacctggttattaaaataactatgaaattaccaa

SEQ ID NO: 387813 - DNA, 1828 bp, Homo sapiens
cgtttgattttagcaggtagctaaaggacaatgtattccatcgccgaagggccatggttttgcttgtaataacatataaaccttcgtctgtcagccctgcctaaagtaaactcgggattgtgagcagtgcacgtggttcattactgatggggagcaatagcagttctactccaaatccatggctgcgcaccaggaacgtgtctgggctactgccttcccactccacaggtgttttctactttttactcacagagcagcattcatgttctttctttgattctgagactcagtcaggcagtggagtttctttaacaagatactacttggatattttttaaatacagggaatggttgagtccactgctaccgtgccccttgcagcctctgagagcgagtcacggctttccattttctaatgtgtatgttccgggtctggggaccccagcaggcccgccaggttgcagagtcggaccagtctccggcgtctgaaggggctgcgccgctgtttaccaccccgcgagcagcagaggcggcgcccagccctcctctcgaacaaaggcgcggccgccgcattcgacccgcgccatggcagaggagagcgggtgccgggagggaagccgggaaccgtctccattctgaaactagggcggggaagccgccgcgggagcccgggaggggggcggaggcgggcggaggcggcggcgcggccagcgcaccattcactccacctgatctcggggcgctgtgcgctgaggaaggcgcgggcgagccggagcagaagaaggagggagggagccagccgctgcagccaccaccgccaccatgtcctaccaaggcaagaagaacatcccgcggatcacgagtgaccgtctccttatcaagggaggcagaatcgtcaatgatgatcagtccttttatgctgatatttacatggaagatggcttaataaaacaaattggagacaatctgattgttcctggaggagtgaagaccattgaagccaatgggaagatggtgatccctggaggcatcgatgtccatactcacttccagatgccatataagggaatgaccacagtagatgacttcttccaagggacaaaggcggccttagcaggtggcaccaccatgatcattgaccatgtggtgcctgagcctgagtccagcctgactgaggcctcatattgcctctgaacccagatggcaatccatcccggttctctctgagggccacgggcttgggtagtggaaagggtgtttgggaaattgttaaatcagttacccgtagtagagctatttcttgtacttctaagttttctagaagtggaaggattgtagtcatcctgaaaatgggtttacttcaaaatccctcagccttgttcttcacgactgtctatactgagagtgtcatgtttccacaaagggctgacacctgagcctggattttcactcatccctgagaagccctttccagtagggtgggcaattcccaacttccttgccacaagcttcccaggctttctcccctggaaaactccagcttgagtcccagatacactcatgggctgccctgggcagccagcattcattgtaagttccctctttgaaaactggtgtgtgggtgttcagttctgtgtctggtgggtatggacagacagtaatctcctgtgatctgtgctagctgtgaggcagctctggaacgtgaagagctgtttggtttgaaccgtgaacaaaactgtgttttgagtttagctgacattaaagaaaaaagttcatcacgtgactgttaatgtaaacctggttattaaaataactatgaaattaccaa

SEQ ID NO: 387814 - DNA, 566 bp, Homo sapiens
cattcagctcggacccactttcagagtagagctatttcttgtacttctaagttttctagaagtggaaggattgtagtcatcctgaaaatgggtttacttcaaaatccctcagccttgttcttcacgactgtctatactgagagtgtcatgtttccacaaagggctgacacctgagcctggattttcactcatccctgagaagccctttccagtagggtgggcaattcccaacttccttgccacaagcttcccaggctttctcccctggaaaactccagcttgagtcccagatacactcatgggctgccctgggcagccagcattcattgtaagttccctctttgaaaactggtgtgtgggtgttcagttctgtgtctggtgggtatggacagacagtaatctcctgtgatctgtgctagctgtgaggcagctctggaacgtgaagagctgtttggtttgaaccgtgaacaaaactgtgttttgagtttagctgacattaaagaaaaaagttcatcacgtgactgttaatgtaaacctggttattaaaataactatgaaattaccaa

SEQ ID NO: 387815 - DNA, 3781 bp, Homo sapiens
cgtttgattttagcaggtagctaaaggacaatgtattccatcgccgaagggccatggttttgcttgtaataacatataaaccttcgtctgtcagccctgcctaaagtaaactcgggattgtgagcagtgcacgtggttcattactgatggggagcaatagcagttctactccaaatccatggctgcgcaccaggaacgtgtctgggctactgccttcccactccacaggtgttttctactttttactcacagagcagcattcatgttctttctttgattctgagactcagtcaggcagtggagtttctttaacaagatactacttggatattttttaaatacagggaatggttgagtccactgctaccgtgccccttgcagcctctgagagcgagtcacggctttccattttctaatgtgtatgttccgggtctggggaccccagcaggcccgccaggttgcagagtcggaccagtctccggcgtctgaaggggctgcgccgctgtttaccaccccgcgagcagcagaggcggcgcccagccctcctctcgaacaaaggcgcggccgccgcattcgacccgcgccatggcagaggagagcgggtgccgggagggaagccgggaaccgtctccattctgaaactagggcggggaagccgccgcgggagcccgggaggggggcggaggcgggcggaggcggcggcgcggccagcgcaccattcactccacctgatctcggggcgctgtgcgctgaggaaggcgcgggcgagccggagcagaagaaggagggagggagccagccgctgcagccaccaccgccaccatgtcctaccaaggcaagaagaacatcccgcggatcacgagtgaccgtctccttatcaagggaggcagaatcgtcaatgatgatcagtccttttatgctgatatttacatggaagatggcttaataaaacaaattggagacaatctgattgttcctggaggagtgaagaccattgaagccaatgggaagatggtgatccctggaggcatcgatgtccatactcacttccagatgccatataagggaatgaccacagtagatgacttcttccaagggacaaaggcggccttagcaggtggcaccaccatgatcattgaccatgtggtgcctgagcctgagtccagcctgactgaggcctatgagaaatggagagagtgggctgatgggaagagttgctgtgactatgccctgcatgtggacatcacccactggaatgacagcgtcaagcaggaagtgcagaacctcatcaaggacaaaggggttaactccttcatggtttatatggcttataaggatttgtatcaagtatctaacacagagctctatgagatcttcacctgcctgggagagctgggggccattgctcaagttcatgctgagaatggggatatcattgcccaggagcaaacccgcatgttggaaatggggataactggcccagaaggccatgtactgagcaggccagaagagctggaagctgaggctgtgttccgtgccatcaccattgccagccaaaccaattgccctctctacgtcacaaaggtcatgagcaagagtgcagctgacctcatctcacaagccaggaaaaaaggaaatgtagtctttggtgagcccatcactgccagcctcggcatagatggaacccattattggagcaagaactgggccaaggcggctgcatttgtgacatccccacccctgagccctgacccaactactccggactacatcaactccttgctggccagcggggatctgcagctatctgggagtgcccactgcaccttcagcactgcccagaaagcaattgggaaggacaacttcacagccattcctgagggcaccaatggtgtggaggagcggatgtctgtcatctgggacaaggctgtggccacagggaaaatggacgaaaaccagttcgtggctgtgacaagcacaaacgctgccaagatcttcaacctgtatccccgcaagggaagaatatctgtgggttctgacagcgacctcgtcatctgggatccagatgctgtgaagatcgtctctgccaagaaccaccagtctgcggcagagtacaacatctttgaagggatggagctgcgcggggctcctctggttgtcatctgccagggcaagatcatgctggaagatggcaacctgcacgtgacccagggggctggccgcttcataccctgcagcccgttctccgactatgtctacaagcgcattaaagcacggaggaagatggcagacctgcatgccgtcccaaggggcatgtacgatgggcctgtgtttgacctgaccaccacccccaaaggtggcacccccgcaggctctgctcggggctctcctactcggccgaacccacctgtgaggaatcttcatcagtcgggatttagcctgtcaggcacccaagtggatgagggggttcgctcagccagcaagcgcatcgtggcgcccccaggcggccgttctaatatcacatctctgagttaagcaagccttcctcaaagagaggggcagaagcaagaagagattgttttgaagccaaaatggtacaccgatatttaagaaggaaagcgaatccaaacggttgtgatctaaagaatcaataagcctcaagccttatgtttctccaatgttacgctcgcttgcctagctttacgaatattgctttgttttctgtttatgcatagccttgatttgtttgactcccctccccccatttacatgcatgcaatcagacaggccactaaggtaaaagagtctgctctatcatagtgttgagagcgtgtgtagtgctgcatcttatgacaaggggacagacaagctgggacgtcagggaaatgaacaaaagggacgcaggttatttggggtgagtgggtggtgggagcctggagcaaggtggagggtgcagaggggctggggtagggcatgtaggagggaggtgggtgggtcaggtgagtggaaggggtgttgtatattgtgttgatgacgtacgttatttccatggaagatagccgctgtggcagctgtcacatcaccacagctccctagggtctgccgagaaggcaggcagtctttgggttctgttctttgtcacgtcccctacaagtaaattttgtttctttgaacgtttattaaaatgccaagacccaaccatttcttccacctgcttgattgtgccagtgtttgctcaggcctctttcttagtgttgctttcaaatccttctctttcctgggttgggaaggccaggcagggacagagcaaatgacacttctcttcctcttgccctccctgcctctttggtgctcttaaaagccagcagctgagaacatagcacaggcccacgtggtgagggcacccacagcttaaagacgcttccagtagggtgggcaattcccaacttccttgccacaagcttcccaggctttctcccctggaaaactccagcttgagtcccagatacactcatgggctgccctgggcagccagcattcattgtaagttccctctttgaaaactggtgtgtgggtgttcagttctgtgtctggtgggtatggacagacagtaatctcctgtgatctgtgctagctgtgaggcagctctggaacgtgaagagctgtttggtttgaaccgtgaacaaaactgtgttttgagtttagctgacattaaagaaaaaagttcatcacgtgactgttaatgtaaacctggttattaaaataactatgaaattaccaa

SEQ ID NO: 387816 - DNA, 3878 bp, Homo sapiens
cgtttgattttagcaggtagctaaaggacaatgtattccatcgccgaagggccatggttttgcttgtaataacatataaaccttcgtctgtcagccctgcctaaagtaaactcgggattgtgagcagtgcacgtggttcattactgatggggagcaatagcagttctactccaaatccatggctgcgcaccaggaacgtgtctgggctactgccttcccactccacaggtgttttctactttttactcacagagcagcattcatgttctttctttgattctgagactcagtcaggcagtggagtttctttaacaagatactacttggatattttttaaatacagggaatggttgagtccactgctaccgtgccccttgcagcctctgagagcgagtcacggctttccattttctaatgtgtatgttccgggtctggggaccccagcaggcccgccaggttgcagagtcggaccagtctccggcgtctgaaggggctgcgccgctgtttaccaccccgcgagcagcagaggcggcgcccagccctcctctcgaacaaaggcgcggccgccgcattcgacccgcgccatggcagaggagagcgggtgccgggagggaagccgggaaccgtctccattctgaaactagggcggggaagccgccgcgggagcccgggaggggggcggaggcgggcggaggcggcggcgcggccagcgcaccattcactccacctgatctcggggcgctgtgcgctgaggaaggcgcgggcgagccggagcagaagaaggagggagggagccagccgctgcagccaccaccgccaccatgtcctaccaaggcaagaagaacatcccgcggatcacgagtgaccgtctccttatcaagggaggcagaatcgtcaatgatgatcagtccttttatgctgatatttacatggaagatggcttaataaaacaaattggagacaatctgattgttcctggaggagtgaagaccattgaagccaatgggaagatggtgatccctggaggcatcgatgtccatactcacttccagatgccatataagggaatgaccacagtagatgacttcttccaagggacaaaggcggccttagcaggtggcaccaccatgatcattgaccatgtggtgcctgagcctgagtccagcctgactgaggcctatgagaaatggagagagtgggctgatgggaagagttgctgtgactatgccctgcatgtggacatcacccactggaatgacagcgtcaagcaggaagtgcagaacctcatcaaggacaaaggggttaactccttcatggtttatatggcttataaggatttgtatcaagtatctaacacagagctctatgagatcttcacctgcctgggagagctgggggccattgctcaagttcatgctgagaatggggatatcattgcccaggagcaaacccgcatgttggaaatggggataactggcccagaaggccatgtactgagcaggccagaagagctggaagctgaggctgtgttccgtgccatcaccattgccagccaaaccaattgccctctctacgtcacaaaggtcatgagcaagagtgcagctgacctcatctcacaagccaggaaaaaaggaaatgtagtctttggtgagcccatcactgccagcctcggcatagatggaacccattattggagcaagaactgggccaaggcggctgcatttgtgacatccccacccctgagccctgacccaactactccggactacatcaactccttgctggccagcggggatctgcagctatctgggagtgcccactgcaccttcagcactgcccagaaagcaattgggaaggacaacttcacagccattcctgagggcaccaatggtgtggaggagcggatgtctgtcatctgggacaaggctgtggccacagggaaaatggacgaaaaccagttcgtggctgtgacaagcacaaacgctgccaagatcttcaacctgtatccccgcaagggaagaatatctgtgggttctgacagcgacctcgtcatctgggatccagatgctgtgaagatcgtctctgccaagaaccaccagtctgcggcagagtacaacatctttgaagggatggagctgcgcggggctcctctggttgtcatctgccagggcaagatcatgctggaagatggcaacctgcacgtgacccagggggctggccgcttcataccctgcagcccgttctccgactatgtctacaagcgcattaaagcacggaggaagatggcagacctgcatgccgtcccaaggggcatgtacgatgggcctgtgtttgacctgaccaccacccccaaaggtggcacccccgcaggctctgctcggggctctcctactcggccgaacccacctgtgaggaatcttcatcagtcgggatttagcctgtcaggcacccaagtggatgagggggttcgctcagccagcaagcgcatcgtggcgcccccaggcggccgttctaatatcacatctctgagttaagcaagccttcctcaaagagaggggcagaagcaagaagagattgttttgaagccaaaatggtacaccgatatttaagaaggaaagcgaatccaaacggttgtgatctaaagaatcaataagcctcaagccttatgtttctccaatgttacgctcgcttgcctagctttacgaatattgctttgttttctgtttatgcatagccttgatttgtttgactcccctccccccatttacatgcatgcaatcagacaggccactaaggtaaaagagtctgctctatcatagtgttgagagcgtgtgtagtgctgcatcttatgacaaggggacagacaagctgggacgtcagggaaatgaacaaaagggacgcaggttatttggggtgagtgggtggtgggagcctggagcaaggtggagggtgcagaggggctggggtagggcatgtaggagggaggtgggtgggtcaggtgagtggaaggggtgttgtatattgtgttgatgacgtacgttatttccatggaagatagccgctgtggcagctgtcacatcaccacagctccctagggtctgccgagaaggcaggcagtctttgggttctgttctttgtcacgtcccctacaagtaaattttgtttctttgaacgtttattaaaatgccaagacccaaccatttcttccacctgcttgattgtgccagtgtttgctcaggcctctttcttagtgttgctttcaaatccttctctttcctgggttgggaaggccaggcagggacagagcaaatgacacttctcttcctcttgccctccctgcctctttggtgctcttaaaagccagcagctgagaacatagcacaggcccacgtggtgagggcacccacagcttaaagacgcttccttctaaacacggcgaggtcacctctcactcttctgtctttgcaaaccgagaagagtggcatgcttctggcatcccaagtcaggattttagctcagatgaggcagaatgaagggcctctcttacaggcagtttgtgtttgattctctcgatcctggaaaactccagcttgagtcccagatacactcatgggctgccctgggcagccagcattcattgtaagttccctctttgaaaactggtgtgtgggtgttcagttctgtgtctggtgggtatggacagacagtaatctcctgtgatctgtgctagctgtgaggcagctctggaacgtgaagagctgtttggtttgaaccgtgaacaaaactgtgttttgagtttagctgacattaaagaaaaaagttcatcacgtgactgttaatgtaaacctggttattaaaataactatgaaattaccaa

SEQ ID NO: 387817 - DNA, 3635 bp, Homo sapiens
cgtttgattttagcaggtagctaaaggacaatgtattccatcgccgaagggccatggttttgcttgtaataacatataaaccttcgtctgtcagccctgcctaaagtaaactcgggattgtgagcagtgcacgtggttcattactgatggggagcaatagcagttctactccaaatccatggctgcgcaccaggaacgtgtctgggctactgccttcccactccacaggtgttttctactttttactcacagagcagcattcatgttctttctttgattctgagactcagtcaggcagtggagtttctttaacaagatactacttggatattttttaaatacagggaatggttgagtccactgctaccgtgccccttgcagcctctgagagcgagtcacggctttccattttctaatgtgtatgttccgggtctggggaccccagcaggcccgccaggttgcagagtcggaccagtctccggcgtctgaaggggctgcgccgctgtttaccaccccgcgagcagcagaggcggcgcccagccctcctctcgaacaaaggcgcggccgccgcattcgacccgcgccatggcagaggagagcgggtgccgggagggaagccgggaaccgtctccattctgaaactagggcggggaagccgccgcgggagcccgggaggggggcggaggcgggcggaggcggcggcgcggccagcgcaccattcactccacctgatctcggggcgctgtgcgctgaggaaggcgcgggcgagccggagcagaagaaggagggagggagccagccgctgcagccaccaccgccaccatgtcctaccaaggcaagaagaacatcccgcggatcacgagtgaccgtctccttatcaagggaggcagaatcgtcaatgatgatcagtccttttatgctgatatttacatggaagatggcttaataaaacaaattggagacaatctgattgttcctggaggagtgaagaccattgaagccaatgggaagatggtgatccctggaggcatcgatgtccatactcacttccagatgccatataagggaatgaccacagtagatgacttcttccaagggacaaaggcggccttagcaggtggcaccaccatgatcattgaccatgtggtgcctgagcctgagtccagcctgactgaggcctatgagaaatggagagagtgggctgatgggaagagttgctgtgactatgccctgcatgtggacatcacccactggaatgacagcgtcaagcaggaagtgcagaacctcatcaaggacaaaggggttaactccttcatggtttatatggcttataaggatttgtatcaagtatctaacacagagctctatgagatcttcacctgcctgggagagctgggggccattgctcaagttcatgctgagaatggggatatcattgcccaggagcaaacccgcatgttggaaatggggataactggcccagaaggccatgtactgagcaggccagaagagctggaagctgaggctgtgttccgtgccatcaccattgccagccaaaccaattgccctctctacgtcacaaaggtcatgagcaagagtgcagctgacctcatctcacaagccaggaaaaaaggaaatgtagtctttggtgagcccatcactgccagcctcggcatagatggaacccattattggagcaagaactgggccaaggcggctgcatttgtgacatccccacccctgagccctgacccaactactccggactacatcaactccttgctggccagcggggatctgcagctatctgggagtgcccactgcaccttcagcactgcccagaaagcaattgggaaggacaacttcacagccattcctgagggcaccaatggtgtggaggagcggatgtctgtcatctgggacaaggctgtggccacagggaaaatggacgaaaaccagttcgtggctgtgacaagcacaaacgctgccaagatcttcaacctgtatccccgcaagggaagaatatctgtgggttctgacagcgacctcgtcatctgggatccagatgctgtgaagatcgtctctgccaagaaccaccagtctgcggcagagtacaacatctttgaagggatggagctgcgcggggctcctctggttgtcatctgccagggcaagatcatgctggaagatggcaacctgcacgtgacccagggggctggccgcttcataccctgcagcccgttctccgactatgtctacaagcgcattaaagcacggaggaagatggcagacctgcatgccgtcccaaggggcatgtacgatgggcctgtgtttgacctgaccaccacccccaaaggtggcacccccgcaggctctgctcggggctctcctactcggccgaacccacctgtgaggaatcttcatcagtcgggatttagcctgtcaggcacccaagtggatgagggggttcgctcagccagcaagcgcatcgtggcgcccccaggcggccgttctaatatcacatctctgagttaagcaagccttcctcaaagagaggggcagaagcaagaagagattgttttgaagccaaaatggtacaccgatatttaagaaggaaagcgaatccaaacggttgtgatctaaagaatcaataagcctcaagccttatgtttctccaatgttacgctcgcttgcctagctttacgaatattgctttgttttctgtttatgcatagccttgatttgtttgactcccctccccccatttacatgcatgcaatcagacaggccactaaggtaaaagagtctgctctatcatagtgttgagagcgtgtgtagtgctgcatcttatgacaaggggacagacaagctgggacgtcagggaaatgaacaaaagggacgcaggttatttggggtgagtgggtggtgggagcctggagcaaggtggagggtgcagaggggctggggtagggcatgtaggagggaggtgggtgggtcaggtgagtggaaggggtgttgtatattgtgttgatgacgtacgttatttccatggaagatagccgctgtggcagctgtcacatcaccacagctccctagggtctgccgagaaggcaggcagtctttgggttctgttctttgtcacgtcccctacaagtaaattttgtttctttgaacgtttattaaaatgccaagacccaaccatttcttccacctgcttgattgtgccagtgtttgctcaggcctctttcttagtgttgctttcaaatccttctctttcctgggttgggaaggccaggcagggacagagcaaatgacacttctcttcctcttgccctccctgcctctttggtgctcttaaaaccagcattcattgtaagttccctctttgaaaactggtgtgtgggtgttcagttctgtgtctggtgggtatggacagacagtaatctcctgtgatctgtgctagctgtgaggcagctctggaacgtgaagagctgtttggtttgaaccgtgaacaaaactgtgttttgagtttagctgacattaaagaaaaaagttcatcacgtgactgttaatgtaaacctggttattaaaataactatgaaattaccaataccaacattgttctccagtcttct

SEQ ID NO: 387818 - DNA, 3338 bp, Homo sapiens
cgtttgattttagcaggtagctaaaggacaatgtattccatcgccgaagggccatggttttgcttgtaataacatataaaccttcgtctgtcagccctgcctaaagtaaactcgggattgtgagcagtgcacgtggttcattactgatggggagcaatagcagttctactccaaatccatggctgcgcaccaggaacgtgtctgggctactgccttcccactccacaggtgttttctactttttactcacagagcagcattcatgttctttctttgattctgagactcagtcaggcagtggagtttctttaacaagatactacttggatattttttaaatacagggaatggttgagtccactgctaccgtgccccttgcagcctctgagagcgagtcacggctttccattttctaatgtgtatgttccgggtctggggaccccagcaggcccgccaggttgcagagtcggaccagtctccggcgtctgaaggggctgcgccgctgtttaccaccccgcgagcagcagaggcggcgcccagccctcctctcgaacaaaggcgcggccgccgcattcgacccgcgccatggcagaggagagcgggtgccgggagggaagccgggaaccgtctccattctgaaactagggcggggaagccgccgcgggagcccgggaggggggcggaggcgggcggaggcggcggcgcggccagcgcaccattcactccacctgatctcggggcgctgtgcgctgaggaaggcgcgggcgagccggagcagaagaaggagggagggagccagccgctgcagccaccaccgccaccatgtcctaccaaggcaagaagaacatcccgcggatcacgagtgaccgtctccttatcaagggaggcagaatcgtcaatgatgatcagtccttttatgctgatatttacatggaagatggcttaataaaacaaattggagacaatctgattgttcctggaggagtgaagaccattgaagccaatgggaagatggtgatccctggaggcatcgatgtccatactcacttccagatgccatataagggaatgaccacagtagatgacttcttccaagggacaaaggcggccttagcaggtggcaccaccatgatcattgaccatgtggtgcctgagcctgagtccagcctgactgaggcctatgagaaatggagagagtgggctgatgggaagagttgctgtgactatgccctgcatgtggacatcacccactggaatgacagcgtcaagcaggaagtgcagaacctcatcaaggacaaaggggttaactccttcatggtttatatggcttataaggatttgtatcaagtatctaacacagagctctatgagatcttcacctgcctgggagagctgggggccattgctcaagttcatgctgagaatggggatatcattgcccaggagcaaacccgcatgttggaaatggggataactggcccagaaggccatgtactgagcaggccagaagagctggaagctgaggctgtgttccgtgccatcaccattgccagccaaaccaattgccctctctacgtcacaaaggtcatgagcaagagtgcagctgacctcatctcacaagccaggaaaaaaggaaatgtagtctttggtgagcccatcactgccagcctcggcatagatggaacccattattggagcaagaactgggccaaggcggctgcatttgtgacatccccacccctgagccctgacccaactactccggactacatcaactccttgctggccagcggggatctgcagctatctgggagtgcccactgcaccttcagcactgcccagaaagcaattgggaaggacaacttcacagccattcctgagggcaccaatggtgtggaggagcggatgtctgtcatctgggacaaggctgtggccacagggaaaatggacgaaaaccagttcgtggctgtgacaagcacaaacgctgccaagatcttcaacctgtatccccgcaagggaagaatatctgtgggttctgacagcgacctcgtcatctgggatccagatgctgtgaagatcgtctctgccaagaaccaccagtctgcggcagagtacaacatctttgaagggatggagctgcgcggggctcctctggttgtcatctgccagggcaagatcatgctggaagatggcaacctgcacgtgacccagggggctggccgcttcataccctgcagcccgttctccgactatgtctacaagcgcattaaagcacggaggaagatggcagacctgcatgccgtcccaaggggcatgtacgatgggcctgtgtttgacctgaccaccacccccaaaggtggcacccccgcaggctctgctcggggctctcctactcggccgaacccacctgtgaggaatcttcatcagtcgggatttagcctgtcaggcacccaagtggatgagggggttcgctcagccagcaagcgcatcgtggcgcccccaggcggccgttctaatatcacatctctgagttaagcaagccttcctcaaagagaggggcagaagcaagaagagattgttttgaagccaaaatggtacaccgatatttaagaaggaaagcgaatccaaacggttgtgatctaaagaatcaataagcctcaagccttatgtttctccaatgttacgctcgcttgcctagctttacgaatattgctttgttttctgtttatgcatagccttgatttgtttgactcccctccccccatttacatgcatgcaatcagacaggccactaaggtaaaagagtctgctctatcatagtgttgagagcgtgtgtagtgctgcatcttatgacaaggggacagacaagcgtcccctacaagtaaattttgtttctttgaacgtttattaaaatgccaagacccaaccatttcttccacctgcttgattgtgccagtgtttgctcaggcctctttcttagtgttgctttcaaatccttctctttcctgggttgggaaggccaggcagggacagagcaaatgacacttctcttcctcttgccctccctgcctctttggtgctcttaaaaccagcattcattgtaagttccctctttgaaaactggtgtgtgggtgttcagttctgtgtctggtgggtatggacagacagtaatctcctgtgatctgtgctagctgtgaggcagctctggaacgtgaagagctgtttggtttgaaccgtgaacaaaactgtgttttgagtttagctgacattaaagaaaaaagttcatcacgtgactgttaatgtaaacctggttattaaaataactatgaaattaccaa

SEQ ID NO: 387819 - DNA, 3093 bp, Homo sapiens
cgtttgattttagcaggtagctaaaggacaatgtattccatcgccgaagggccatggttttgcttgtaataacatataaaccttcgtctgtcagccctgcctaaagtaaactcgggattgtgagcagtgcacgtggttcattactgatggggagcaatagcagttctactccaaatccatggctgcgcaccaggaacgtgtctgggctactgccttcccactccacaggtgttttctactttttactcacagagcagcattcatgttctttctttgattctgagactcagtcaggcagtggagtttctttaacaagatactacttggatattttttaaatacagggaatggttgagtccactgctaccgtgccccttgcagcctctgagagcgagtcacggctttccattttctaatgtgtatgttccgggtctggggaccccagcaggcccgccaggttgcagagtcggaccagtctccggcgtctgaaggggctgcgccgctgtttaccaccccgcgagcagcagaggcggcgcccagccctcctctcgaacaaaggcgcggccgccgcattcgacccgcgccatggcagaggagagcgggtgccgggagggaagccgggaaccgtctccattctgaaactagggcggggaagccgccgcgggagcccgggaggggggcggaggcgggcggaggcggcggcgcggccagcgcaccattcactccacctgatctcggggcgctgtgcgctgaggaaggcgcgggcgagccggagcagaagaaggagggagggagccagccgctgcagccaccaccgccaccatgtcctaccaaggcaagaagaacatcccgcggatcacgagtgaccgtctccttatcaagggaggcagaatcgtcaatgatgatcagtccttttatgctgatatttacatggaagatggcttaataaaacaaattggagacaatctgattgttcctggaggagtgaagaccattgaagccaatgggaagatggtgatccctggaggcatcgatgtccatactcacttccagatgccatataagggaatgaccacagtagatgacttcttccaagggacaaaggcggccttagcaggtggcaccaccatgatcattgaccatgtggtgcctgagcctgagtccagcctgactgaggcctatgagaaatggagagagtgggctgatgggaagagttgctgtgactatgccctgcatgtggacatcacccactggaatgacagcgtcaagcaggaagtgcagaacctcatcaaggacaaaggggttaactccttcatggtttatatggcttataaggatttgtatcaagtatctaacacagagctctatgagatcttcacctgcctgggagagctgggggccattgctcaagttcatgctgagaatggggatatcattgcccaggagcaaacccgcatgttggaaatggggataactggcccagaaggccatgtactgagcaggccagaagagctggaagctgaggctgtgttccgtgccatcaccattgccagccaaaccaattgccctctctacgtcacaaaggtcatgagcaagagtgcagctgacctcatctcacaagccaggaaaaaaggaaatgtagtctttggtgagcccatcactgccagcctcggcatagatggaacccattattggagcaagaactgggccaaggcggctgcatttgtgacatccccacccctgagccctgacccaactactccggactacatcaactccttgctggccagcggggatctgcagctatctgggagtgcccactgcaccttcagcactgcccagaaagcaattgggaaggacaacttcacagccattcctgagggcaccaatggtgtggaggagcggatgtctgtcatctgggacaaggctgtggccacagggaaaatggacgaaaaccagttcgtggctgtgacaagcacaaacgctgccaagatcttcaacctgtatccccgcaagggaagaatatctgtgggttctgacagcgacctcgtcatctgggatccagatgctgtgaagatcgtctctgccaagaaccaccagtctgcggcagagtacaacatctttgaagggatggagctgcgcggggctcctctggttgtcatctgccagggcaagatcatgctggaagatggcaacctgcacgtgacccagggggctggccgcttcataccctgcagcccgttctccgactatgtctacaagcgcattaaagcacggaggaagatggcagacctgcatgccgtcccaaggggcatgtacgatgggcctgtgtttgacctgaccaccacccccaaaggtggcacccccgcaggctctgctcggggctctcctactcggccgaacccacctgtgaggaatcttcatcagtcgggatttagcctgtcaggcacccaagtggatgagggggttcgctcagccagcaagcgcatcgtggcgcccccaggcggccgttctaatatcacatctctgagttaagcaagccttcctcaaagagaggggcagaagcaagaagagattgttttgaagccaaaatggtacaccgatatttaagaaggaaagcgaatccaaacggttgtgatctaaagaatcaataagcctcaagccttatgtttctccaatgttacgctcgcttgcctagctttacgaatattgctttgttttctgtttatgcatagccttgatttgtttgactcccctccccccatttacatgcatgcaatcagacaggccactaaggtaaaagagtctgctctatcatagtgttgagagcgtgtgtagtgctgcatcttatgacaaggggacagacaagcggaaggggtgttgtatattgtgttgatgacgtacgttatttccatggaagatagccgctgtggcagctgtcacatcaccacagctccctagggtctgccgagaaggcaggcagtctttgggttctgttctttgtcacgtcccctacaagtaaattttgtttctttgaacgtttattaaaatgccaagacccaaccatttcttccacctgcttgattgtgccag

SEQ ID NO: 387820 - DNA, 2956 bp, Homo sapiens
cgtttgattttagcaggtagctaaaggacaatgtattccatcgccgaagggccatggttttgcttgtaataacatataaaccttcgtctgtcagccctgcctaaagtaaactcgggattgtgagcagtgcacgtggttcattactgatggggagcaatagcagttctactccaaatccatggctgcgcaccaggaacgtgtctgggctactgccttcccactccacaggtgttttctactttttactcacagagcagcattcatgttctttctttgattctgagactcagtcaggcagtggagtttctttaacaagatactacttggatattttttaaatacagggaatggttgagtccactgctaccgtgccccttgcagcctctgagagcgagtcacggctttccattttctaatgtgtatgttccgggtctggggaccccagcaggcccgccaggttgcagagtcggaccagtctccggcgtctgaaggggctgcgccgctgtttaccaccccgcgagcagcagaggcggcgcccagccctcctctcgaacaaaggcgcggccgccgcattcgacccgcgccatggcagaggagagcgggtgccgggagggaagccgggaaccgtctccattctgaaactagggcggggaagccgccgcgggagcccgggaggggggcggaggcgggcggaggcggcggcgcggccagcgcaccattcactccacctgatctcggggcgctgtgcgctgaggaaggcgcgggcgagccggagcagaagaaggagggagggagccagccgctgcagccaccaccgccaccatgtcctaccaaggcaagaagaacatcccgcggatcacgagtgaccgtctccttatcaagggaggcagaatcgtcaatgatgatcagtccttttatgctgatatttacatggaagatggcttaataaaacaaattggagacaatctgattgttcctggaggagtgaagaccattgaagccaatgggaagatggtgatccctggaggcatcgatgtccatactcacttccagatgccatataagggaatgaccacagtagatgacttcttccaagggacaaaggcggccttagcaggtggcaccaccatgatcattgaccatgtggtgcctgagcctgagtccagcctgactgaggcctatgagaaatggagagagtgggctgatgggaagagttgctgtgactatgccctgcatgtggacatcacccactggaatgacagcgtcaagcaggaagtgcagaacctcatcaaggacaaaggggttaactccttcatggtttatatggcttataaggatttgtatcaagtatctaacacagagctctatgagatcttcacctgcctgggagagctgggggccattgctcaagttcatgctgagaatggggatatcattgcccaggagcaaacccgcatgttggaaatggggataactggcccagaaggccatgtactgagcaggccagaagagctggaagctgaggctgtgttccgtgccatcaccattgccagccaaaccaattgccctctctacgtcacaaaggtcatgagcaagagtgcagctgacctcatctcacaagccaggaaaaaaggaaatgtagtctttggtgagcccatcactgccagcctcggcatagatggaacccattattggagcaagaactgggccaaggcggctgcatttgtgacatccccacccctgagccctgacccaactactccggactacatcaactccttgctggccagcggggatctgcagctatctgggagtgcccactgcaccttcagcactgcccagaaagcaattgggaaggacaacttcacagccattcctgagggcaccaatggtgtggaggagcggatgtctgtcatctgggacaaggctgtggccacagggaaaatggacgaaaaccagttcgtggctgtgacaagcacaaacgctgccaagatcttcaacctgtatccccgcaagggaagaatatctgtgggttctgacagcgacctcgtcatctgggatccagatgctgtgaagatcgtctctgccaagaaccaccagtctgcggcagagtacaacatctttgaagggatggagctgcgcggggctcctctggttgtcatctgccagggcaagatcatgctggaagatggcaacctgcacgtgacccagggggctggccgcttcataccctgcagcccgttctccgactatgtctacaagcgcattaaagcacggaggaagatggcagacctgcatgccgtcccaaggggcatgtacgatgggcctgtgtttgacctgaccaccacccccaaaggtggcacccccgcaggctctgctcggggctctcctactcggccgaacccacctgtgaggaatcttcatcagtcgggatttagcctgtcaggcacccaagtggatgagggggttcgctcagccagcaagcgcatcgtggcgcccccaggcggccgttctaatatcacatctctgagttaagcaagccttcctcaaagagaggggcagaagcaagaagagattgttttgaagccaaaatggtacaccgatatttaagaaggaaagcgaatccaaacggttgtgatctaaagaatcaataagcctcaagccttatgtttctccaatgttacgctcgcttgcctagctttacgaatattgctttgttttctgtttatgcatagccttgatttgtttgactcccctccccccatttacatgcatgcaatcagacaggccactaaggtaaaagagtctgctctatcatagtgttgagagcgtgtgtagtgctgcatcttatgacaaggggacagacaagcgtcccctacaagtaaattttgtttctttgaacgtttattaaaatgccaagacccaaccatttcttccacctgcttgattgtgccag

SEQ ID NO: 387821 - DNA, 1788 bp, Homo sapiens
cgtttgattttagcaggtagctaaaggacaatgtattccatcgccgaagggccatggttttgcttgtaataacatataaaccttcgtctgtcagccctgcctaaagtaaactcgggattgtgagcagtgcacgtggttcattactgatggggagcaatagcagttctactccaaatccatggctgcgcaccaggaacgtgtctgggctactgccttcccactccacaggtgttttctactttttactcacagagcagcattcatgttctttctttgattctgagactcagtcaggcagtggagtttctttaacaagatactacttggatattttttaaatacagggaatggttgagtccactgctaccgtgccccttgcagcctctgagagcgagtcacggctttccattttctaatgtgtatgttccgggtctggggaccccagcaggcccgccaggttgcagagtcggaccagtctccggcgtctgaaggggctgcgccgctgtttaccaccccgcgagcagcagaggcggcgcccagccctcctctcgaacaaaggcgcggccgccgcattcgacccgcgccatggcagaggagagcgggtgccgggagggaagccgggaaccgtctccattctgaaactagggcggggaagccgccgcgggagcccgggaggggggcggaggcgggcggaggcggcggcgcggccagcgcaccattcactccacctgatctcggggcgctgtgcgctgaggaaggcgcgggcgagccggagcagaagaaggagggagggagccagccgctgcagccaccaccgccaccatgtcctaccaaggcaagaagaacatcccgcggatcacgagtgaccgtctccttatcaagggaggcagaatcgtcaatgatgatcagtccttttatgctgatatttacatggaagatggcttaataaaacaaattggagacaatctgattgttcctggaggagtgaagaccattgaagccaatgggaagatggtgatccctggaggcatcgatgtccatactcacttccagatgccatataagggaatgaccacagtagatgacttcttccaagggacaaaggcggccttagcaggtggcaccaccatgatcattgaccatgtggtgcctgagcctgagtccagcctgactgaggcctatgagaaatggagagagtgggctgatgggaagagttgctgtgactatgccctgcatgtggacatcacccactggaatgacagcgtcaagcaggaagtgcagaacctcatcaaggacaaaggggttaactccttcatggtttatatggcttataaggatttgtatcaagtatctaacacagagctctatgagatcttcacctgcctgggagagctgggggccattgctcaagttcatgctgagaatggggatatcattgcccaggagcaaacccgcatgttggaaatggggataactggcccagaaggccatgtactgagcaggccagaagagctggaagctgaggctgtgttccgtgccatcaccattgccagccaaaccaattgccctctctacgtcacaaaggtcatgagcaagagtgcagctgacctcatctcacaagccaggaaaaaaggaatgtagtcttagggtgagccatcaatgccagcctcgggtagatggaaccattatgggcagaccgggcagggggattgggaattccacccggagcgccaatatccggaataccctgtggccgggggaaggcgatgggagccggcctaagcgaac

SEQ ID NO: 387822 - DNA, 5762 bp, Homo sapiens
cgtttgattttagcaggtagctaaaggacaatgtattccatcgccgaagggccatggttttgcttgtaataacatataaaccttcgtctgtcagccctgcctaaagtaaactcgggattgtgagcagtgcacgtggttcattactgatggggagcaatagcagttctactccaaatccatggctgcgcaccaggaacgtgtctgggctactgccttcccactccacaggtgttttctactttttactcacagagcagcattcatgttctttctttgattctgagactcagtcaggcagtggagtttctttaacaagatactacttggatattttttaaatacagggaatggttgagtccactgctaccgtgccccttgcagcctctgagagcgagtcacggctttccattttctaatgtgtatgttccgggtctggggaccccagcaggcccgccaggttgcagagtcggaccagtctccggcgtctgaaggggctgcgccgctgtttaccaccccgcgagcagcagaggcggcgcccagccctcctctcgaacaaaggcgcggccgccgcattcgacccgcgccatggcagaggagagcgggtgccgggagggaagccgggaaccgtctccattctgaaactagggcggggaagccgccgcgggagcccgggaggggggcggaggcgggcggaggcggcggcgcggccagcgcaccattcactccacctgatctcggggcgctgtgcgctgaggaaggcgcgggcgagccggagcagaagaaggagggagggagccagccgctgcagccaccaccgccaccatgtcctaccaaggcaagaagaacatcccgcggatcacgagtgaccgtctccttatcaagggaggcagaatcgtcaatgatgatcagtccttttatgctgatatttacatggaagatggcttaataaaacaaattggagacaatctgattgttcctggaggagtgaagaccattgaagccaatgggaagatggtgatccctggaggcatcgatgtccatactcacttccagatgccatataagggaatgaccacagtagatgacttcttccaagggacaaaggcggccttagcaggtggcaccaccatgatcattgaccatgtggtgcctgagcctgagtccagcctgactgaggcctatgagaaatggagagagtgggctgatgggaagagttgctgtgactatgccctgcatgtggacatcacccactggaatgacagcgtcaagcaggaagtgcagaacctcatcaaggacaaaggggttaactccttcatggtttatatggcttataaggatttgtatcaagtatctaacacagagctctatgagatcttcacctgcctgggagagctgggggccattgctcaagttcatgctgagaatggggatatcattgcccaggagcaaacccgcatgttggaaatggggataactggcccagaaggccatgtactgagcaggccagaagagctggaagctgaggctgtgttccgtgccatcaccattgccagccaaaccaattgccctctctacgtcacaaaggtcatgagcaagagtgcagctgacctcatctcacaagccaggaaaaaaggaaatgtagtctttggtgagcccatcactgccagcctcggcatagatggaacccattattggagcaagaactgggccaaggcggctgcatttgtgacatccccacccctgagccctgacccaactactccggactacatcaactccttgctggccagcggggatctgcagctatctgggagtgcccactgcaccttcagcactgcccagaaagcaattgggaaggacaacttcacagccattcctgagggcaccaatggtgtggaggagcggatgtctgtcatctgggacaaggctgtggccacagggaaaatggacgaaaaccagttcgtggctgtgacaagcacaaacgctgccaagatcttcaacctgtatccccgcaagggaagaatatctgtgggttctgacagcgacctcgtcatctgggatccagatgctgtgaagatcgtctctgccaagaaccaccagtctgcggcagagtacaacatctttgaagggatggagctgcgcggggctcctctggttgtcatctgccagggcaagatcatgctggaagatggcaacctgcacgtgacccagggggctggccgcttcataccctgcagcccgttctccgactatgtctacaagcgcattaaagcacggaggaagatggcagacctgcatgccgtcccaaggggcatgtacgatgggcctgtgtttgacctgaccaccacccccaaaggtggcacccccgcaggctctgctcggggctctcctactcggccgaacccacctgtgaggaatcttcatcagtcgggatttagcctgtcaggcacccaagtggatgagggggttcgctcagccagcaagcgcatcgtggcgcccccaggcggccgttctaatatcacatctctgagttaagcaagccttcctcaaagagaggggcagaagcaagaagagattgttttgaagccaaaatggtacaccgatatttaagaaggaaagcgaatccaaacggttgtgatctaaagaatcaataagcctcaagccttatgtttctccaatgttacgctcgcttgcctagctttacgaatattgctttgttttctgtttatgcatagccttgatttgtttgactcccctccccccatttacatgcatgcaatcagacaggccactaaggtaaaagagtctgctctatcatagtgttgagagcgtgtgtagtgctgcatcttatgacaaggggacagacaagctgggacgtcagggaaatgaacaaaagggacgcaggttatttggggtgagtgggtggtgggagcctggagcaaggtggagggtgcagaggggctggggtagggcatgtaggagggaggtgggtgggtcaggtgagtggaaggggtgttgtatattgtgttgatgacgtacgttatttccatggaagatagccgctgtggcagctgtcacatcaccacagctccctagggtctgccgagaaggcaggcagtctttgggttctgttctttgtcacgtcccctacaagtaaattttgtttctttgaacgtttattaaaatgccaagacccaaccatttcttccacctgcttgattgtgccagtgtttgctcaggcctctttcttagtgttgctttcaaatccttctctttcctgggttgggaaggccaggcagggacagagcaaatgacacttctcttcctcttgccctccctgcctctttggtgctcttaaaagccagcagctgagaacatagcacaggcccacgtggtgagggcacccacagcttaaagacgcttccttctaaacacggcgaggtcacctctcactcttctgtctttgcaaaccgagaagagtggcatgcttctggcatcccaagtcaggattttagctcagatgaggcagaatgaagggcctctcttacaggcagtttgtgtttgattctctcgatcctggcacatccatgataaataggagtttttgaaagttggttttattaggtgttccctaatttttaccgtaataggtcatctcagcttatatgaaagtcaagtggggaactgggaaagccaaagtcagtcttgagcagagggagcacattttgtggacctggttccacctttccattccaaaccacctgtttccccttccattagcagaaactctgggggaactttgtgtctcagtcctagaatctccccaagtgagtggaagtgacatgatgcagtcttcctcatggggcacctgaaagaaattagtgtgggtgcttcgatctaccttgtctgtcagagttgaatatctctttccctatcatgctgcttctgaaaattcagttttggagcaagtcctgtgagcaagataagaatctatagaaccaagatgctcattttcagaagaaatatgttcaacctgggatcagacttccatgctctggggaatccaagtggtagcacctgtaaccctgtgtactaagtgctttgaagagaagagcaggcctcagacaccttttaattgcttaggagaaaccattgtctctgactgcaggtttgaataagttgaagaccagagaaaagtacacactgggctacaaaggaatttggagatagccaaggaacaggatttcccctagcaagctaccttctgttcaaatcatgaaaaaagactatttccccttagaatagggaagcttgctattttaaagctcttgtagtgcttttcttttaagggagatgtagtaaaagggaaaatgtagctcttagtttacacttcaaagatgtgggggtctttcagagaactaagaataacagttttatgtgcagagagagtttgccagatctgaagcatatacctcattgactaggctgttactttgggataggttgcagtaccagccacagccagcagatagaggaaaagacacacataaactcgcttctgagcgtccacttctgcactctctgctctgctgttactcagcccctgagtctgactcatctctgcacaacctctctgtgccatgaagataagtcttccatggccaaatcggtcatccgcactgcccttgggacttccgaagtgaaccattccaccagaacctttgattctgcacaagatttccttgctctgggaacaacccccaaatgcccttgggaggaacaacatgagctcaggaagcctctctttcttcacttaccattactaactctccaagcatagaaatccctgggaattgcgagaataactcccactattttaaaatttatattcagatttgtttcgtttcataagacacatcaaacaggcctatacaaaaggtttaggaaaagaaaacaatggtgagtcccggccctcttcgaattcactggcacctcatgcaagtgtaggaaggcacgctggatcgtctatctgattccaaagctgtcctttgccatctcatcccttggcctgccccccaaccctgaggatgcccctgccatccccccaacctcctcatattgcctctgaacccagatggcaatccatcccggttctctctgagggccacgggcttgggtagtggaaagggtgtttgggaaattgttaaatcagttacccgtagtagagctatttcttgtacttctaagttttctagaagtggaaggattgtagtcatcctgaaaatgggtttacttcaaaatccctcagccttgttcttcacgactgtctatactgagagtgtcatgtttccacaaagggctgacacctgagcctggattttcactcatccctgagaagccctttccagtagggtgggcaattcccaacttccttgccacaagcttcccaggctttctcccctggaaaactccagcttgagtcccagatacactcatgggctgccctgggcagccagcattcattgtaagttccctctttgaaaactggtgtgtgggtgttcagttctgtgtctggtgggtatggacagacagtaatctcctgtgatctgtgctagctgtgaggcagctctggaacgtgaagagctgtttggtttgaaccgtgaacaaaactgtgttttgagtttagctgacattaaagaaaaaagttcatcacgtgactgttaatgtaaacctggttattaaaataactatgaaattaccaa

SEQ ID NO: 387823 - DNA, 5367 bp, Homo sapiens
cactgtggctcggcgcacgctgccggcggctgccctttccgcctctggggaagaaaaacccgcgggccgctttcgtgcttgaaccatggcctcgggccggaggggctgggacagctcccacgaagacgatctgcccgtgtacctggccaggccgggcaccacggaccaggtcccgcggcagaaatacggcggcatgttctgcaacgtggagggcgccttcgagagcaagacgctggatttcgatgccctcagcgtggggcagcggggcgcgaagactcctcggagcggccagggcagcgaccgaggatcggggagtcggcccgggatcgagggggacaccccgcgcaggggccaaggccgggaagagagcagggagcccgcgcccgcctcccccgcccccgccggggtagagatccggagcgccaccggcaaagaggtgttgcagaacctcggccccaaggacaagagtgaccgtctccttatcaagggaggcagaatcgtcaatgatgatcagtccttttatgctgatatttacatggaagatggcttaataaaacaaattggagacaatctgattgttcctggaggagtgaagaccattgaagccaatgggaagatggtgatccctggaggcatcgatgtccatactcacttccagatgccatataagggaatgaccacagtagatgacttcttccaagggacaaaggcggccttagcaggtggcaccaccatgatcattgaccatgtggtgcctgagcctgagtccagcctgactgaggcctatgagaaatggagagagtgggctgatgggaagagttgctgtgactatgccctgcatgtggacatcacccactggaatgacagcgtcaagcaggaagtgcagaacctcatcaaggacaaaggggttaactccttcatggtttatatggcttataaggatttgtatcaagtatctaacacagagctctatgagatcttcacctgcctgggagagctgggggccattgctcaagttcatgctgagaatggggatatcattgcccaggagcaaacccgcatgttggaaatggggataactggcccagaaggccatgtactgagcaggccagaagagctggaagctgaggctgtgttccgtgccatcaccattgccagccaaaccaattgccctctctacgtcacaaaggtcatgagcaagagtgcagctgacctcatctcacaagccaggaaaaaaggaaatgtagtctttggtgagcccatcactgccagcctcggcatagatggaacccattattggagcaagaactgggccaaggcggctgcatttgtgacatccccacccctgagccctgacccaactactccggactacatcaactccttgctggccagcggggatctgcagctatctgggagtgcccactgcaccttcagcactgcccagaaagcaattgggaaggacaacttcacagccattcctgagggcaccaatggtgtggaggagcggatgtctgtcatctgggacaaggctgtggccacagggaaaatggacgaaaaccagttcgtggctgtgacaagcacaaacgctgccaagatcttcaacctgtatccccgcaagggaagaatatctgtgggttctgacagcgacctcgtcatctgggatccagatgctgtgaagatcgtctctgccaagaaccaccagtctgcggcagagtacaacatctttgaagggatggagctgcgcggggctcctctggttgtcatctgccagggcaagatcatgctggaagatggcaacctgcacgtgacccagggggctggccgcttcataccctgcagcccgttctccgactatgtctacaagcgcattaaagcacggaggaagatggcagacctgcatgccgtcccaaggggcatgtacgatgggcctgtgtttgacctgaccaccacccccaaaggtggcacccccgcaggctctgctcggggctctcctactcggccgaacccacctgtgaggaatcttcatcagtcgggatttagcctgtcaggcacccaagtggatgagggggttcgctcagccagcaagcgcatcgtggcgcccccaggcggccgttctaatatcacatctctgagttaagcaagccttcctcaaagagaggggcagaagcaagaagagattgttttgaagccaaaatggtacaccgatatttaagaaggaaagcgaatccaaacggttgtgatctaaagaatcaataagcctcaagccttatgtttctccaatgttacgctcgcttgcctagctttacgaatattgctttgttttctgtttatgcatagccttgatttgtttgactcccctccccccatttacatgcatgcaatcagacaggccactaaggtaaaagagtctgctctatcatagtgttgagagcgtgtgtagtgctgcatcttatgacaaggggacagacaagctgggacgtcagggaaatgaacaaaagggacgcaggttatttggggtgagtgggtggtgggagcctggagcaaggtggagggtgcagaggggctggggtagggcatgtaggagggaggtgggtgggtcaggtgagtggaaggggtgttgtatattgtgttgatgacgtacgttatttccatggaagatagccgctgtggcagctgtcacatcaccacagctccctagggtctgccgagaaggcaggcagtctttgggttctgttctttgtcacgtcccctacaagtaaattttgtttctttgaacgtttattaaaatgccaagacccaaccatttcttccacctgcttgattgtgccagtgtttgctcaggcctctttcttagtgttgctttcaaatccttctctttcctgggttgggaaggccaggcagggacagagcaaatgacacttctcttcctcttgccctccctgcctctttggtgctcttaaaagccagcagctgagaacatagcacaggcccacgtggtgagggcacccacagcttaaagacgcttccttctaaacacggcgaggtcacctctcactcttctgtctttgcaaaccgagaagagtggcatgcttctggcatcccaagtcaggattttagctcagatgaggcagaatgaagggcctctcttacaggcagtttgtgtttgattctctcgatcctggcacatccatgataaataggagtttttgaaagttggttttattaggtgttccctaatttttaccgtaataggtcatctcagcttatatgaaagtcaagtggggaactgggaaagccaaagtcagtcttgagcagagggagcacattttgtggacctggttccacctttccattccaaaccacctgtttccccttccattagcagaaactctgggggaactttgtgtctcagtcctagaatctccccaagtgagtggaagtgacatgatgcagtcttcctcatggggcacctgaaagaaattagtgtgggtgcttcgatctaccttgtctgtcagagttgaatatctctttccctatcatgctgcttctgaaaattcagttttggagcaagtcctgtgagcaagataagaatctatagaaccaagatgctcattttcagaagaaatatgttcaacctgggatcagacttccatgctctggggaatccaagtggtagcacctgtaaccctgtgtactaagtgctttgaagagaagagcaggcctcagacaccttttaattgcttaggagaaaccattgtctctgactgcaggtttgaataagttgaagaccagagaaaagtacacactgggctacaaaggaatttggagatagccaaggaacaggatttcccctagcaagctaccttctgttcaaatcatgaaaaaagactatttccccttagaatagggaagcttgctattttaaagctcttgtagtgcttttcttttaagggagatgtagtaaaagggaaaatgtagctcttagtttacacttcaaagatgtgggggtctttcagagaactaagaataacagttttatgtgcagagagagtttgccagatctgaagcatatacctcattgactaggctgttactttgggataggttgcagtaccagccacagccagcagatagaggaaaagacacacataaactcgcttctgagcgtccacttctgcactctctgctctgctgttactcagcccctgagtctgactcatctctgcacaacctctctgtgccatgaagataagtcttccatggccaaatcggtcatccgcactgcccttgggacttccgaagtgaaccattccaccagaacctttgattctgcacaagatttccttgctctgggaacaacccccaaatgcccttgggaggaacaacatgagctcaggaagcctctctttcttcacttaccattactaactctccaagcatagaaatccctgggaattgcgagaataactcccactattttaaaatttatattcagatttgtttcgtttcataagacacatcaaacaggcctatacaaaaggtttaggaaaagaaaacaatggtgagtcccggccctcttcgaattcactggcacctcatgcaagtgtaggaaggcacgctggatcgtctatctgattccaaagctgtcctttgccatctcatcccttggcctgccccccaaccctgaggatgcccctgccatccccccaacctcctcatattgcctctgaacccagatggcaatccatcccggttctctctgagggccacgggcttgggtagtggaaagggtgtttgggaaattgttaaatcagttacccgtagtagagctatttcttgtacttctaagttttctagaagtggaaggattgtagtcatcctgaaaatgggtttacttcaaaatccctcagccttgttcttcacgactgtctatactgagagtgtcatgtttccacaaagggctgacacctgagcctggattttcactcatccctgagaagccctttccagtagggtgggcaattcccaacttccttgccacaagcttcccaggctttctcccctggaaaactccagcttgagtcccagatacactcatgggctgccctgggcagccagcattcattgtaagttccctctttgaaaactggtgtgtgggtgttcagttctgtgtctggtgggtatggacagacagtaatctcctgtgatctgtgctagctgtgaggcagctctggaacgtgaagagctgtttggtttgaaccgtgaacaaaactgtgttttgagtttagctgacattaaagaaaaaagttcatcacgtgactgttaatgtaaacctggttattaaaataactatgaaattaccaa

SEQ ID NO: 387824 - DNA, 4768 bp, Homo sapiens
agagagatgtacgaggcggtcccggttgttatttcatgcagggccggggtcttgatgttataatacatggacctgagcgacgacaatatgacttcttccaagggacaaaggcggccttagcaggtggcaccaccatgatcattgaccatgtggtgcctgagcctgagtccagcctgactgaggcctatgagaaatggagagagtgggctgatgggaagagttgctgtgactatgccctgcatgtggacatcacccactggaatgacagcgtcaagcaggaagtgcagaacctcatcaaggacaaaggggttaactccttcatggtttatatggcttataaggatttgtatcaagtatctaacacagagctctatgagatcttcacctgcctgggagagctgggggccattgctcaagttcatgctgagaatggggatatcattgcccaggagcaaacccgcatgttggaaatggggataactggcccagaaggccatgtactgagcaggccagaagagctggaagctgaggctgtgttccgtgccatcaccattgccagccaaaccaattgccctctctacgtcacaaaggtcatgagcaagagtgcagctgacctcatctcacaagccaggaaaaaaggaaatgtagtctttggtgagcccatcactgccagcctcggcatagatggaacccattattggagcaagaactgggccaaggcggctgcatttgtgacatccccacccctgagccctgacccaactactccggactacatcaactccttgctggccagcggggatctgcagctatctgggagtgcccactgcaccttcagcactgcccagaaagcaattgggaaggacaacttcacagccattcctgagggcaccaatggtgtggaggagcggatgtctgtcatctgggacaaggctgtggccacagggaaaatggacgaaaaccagttcgtggctgtgacaagcacaaacgctgccaagatcttcaacctgtatccccgcaagggaagaatatctgtgggttctgacagcgacctcgtcatctgggatccagatgctgtgaagatcgtctctgccaagaaccaccagtctgcggcagagtacaacatctttgaagggatggagctgcgcggggctcctctggttgtcatctgccagggcaagatcatgctggaagatggcaacctgcacgtgacccagggggctggccgcttcataccctgcagcccgttctccgactatgtctacaagcgcattaaagcacggaggaagatggcagacctgcatgccgtcccaaggggcatgtacgatgggcctgtgtttgacctgaccaccacccccaaaggtggcacccccgcaggctctgctcggggctctcctactcggccgaacccacctgtgaggaatcttcatcagtcgggatttagcctgtcaggcacccaagtggatgagggggttcgctcagccagcaagcgcatcgtggcgcccccaggcggccgttctaatatcacatctctgagttaagcaagccttcctcaaagagaggggcagaagcaagaagagattgttttgaagccaaaatggtacaccgatatttaagaaggaaagcgaatccaaacggttgtgatctaaagaatcaataagcctcaagccttatgtttctccaatgttacgctcgcttgcctagctttacgaatattgctttgttttctgtttatgcatagccttgatttgtttgactcccctccccccatttacatgcatgcaatcagacaggccactaaggtaaaagagtctgctctatcatagtgttgagagcgtgtgtagtgctgcatcttatgacaaggggacagacaagctgggacgtcagggaaatgaacaaaagggacgcaggttatttggggtgagtgggtggtgggagcctggagcaaggtggagggtgcagaggggctggggtagggcatgtaggagggaggtgggtgggtcaggtgagtggaaggggtgttgtatattgtgttgatgacgtacgttatttccatggaagatagccgctgtggcagctgtcacatcaccacagctccctagggtctgccgagaaggcaggcagtctttgggttctgttctttgtcacgtcccctacaagtaaattttgtttctttgaacgtttattaaaatgccaagacccaaccatttcttccacctgcttgattgtgccagtgtttgctcaggcctctttcttagtgttgctttcaaatccttctctttcctgggttgggaaggccaggcagggacagagcaaatgacacttctcttcctcttgccctccctgcctctttggtgctcttaaaagccagcagctgagaacatagcacaggcccacgtggtgagggcacccacagcttaaagacgcttccttctaaacacggcgaggtcacctctcactcttctgtctttgcaaaccgagaagagtggcatgcttctggcatcccaagtcaggattttagctcagatgaggcagaatgaagggcctctcttacaggcagtttgtgtttgattctctcgatcctggcacatccatgataaataggagtttttgaaagttggttttattaggtgttccctaatttttaccgtaataggtcatctcagcttatatgaaagtcaagtggggaactgggaaagccaaagtcagtcttgagcagagggagcacattttgtggacctggttccacctttccattccaaaccacctgtttccccttccattagcagaaactctgggggaactttgtgtctcagtcctagaatctccccaagtgagtggaagtgacatgatgcagtcttcctcatggggcacctgaaagaaattagtgtgggtgcttcgatctaccttgtctgtcagagttgaatatctctttccctatcatgctgcttctgaaaattcagttttggagcaagtcctgtgagcaagataagaatctatagaaccaagatgctcattttcagaagaaatatgttcaacctgggatcagacttccatgctctggggaatccaagtggtagcacctgtaaccctgtgtactaagtgctttgaagagaagagcaggcctcagacaccttttaattgcttaggagaaaccattgtctctgactgcaggtttgaataagttgaagaccagagaaaagtacacactgggctacaaaggaatttggagatagccaaggaacaggatttcccctagcaagctaccttctgttcaaatcatgaaaaaagactatttccccttagaatagggaagcttgctattttaaagctcttgtagtgcttttcttttaagggagatgtagtaaaagggaaaatgtagctcttagtttacacttcaaagatgtgggggtctttcagagaactaagaataacagttttatgtgcagagagagtttgccagatctgaagcatatacctcattgactaggctgttactttgggataggttgcagtaccagccacagccagcagatagaggaaaagacacacataaactcgcttctgagcgtccacttctgcactctctgctctgctgttactcagcccctgagtctgactcatctctgcacaacctctctgtgccatgaagataagtcttccatggccaaatcggtcatccgcactgcccttgggacttccgaagtgaaccattccaccagaacctttgattctgcacaagatttccttgctctgggaacaacccccaaatgcccttgggaggaacaacatgagctcaggaagcctctctttcttcacttaccattactaactctccaagcatagaaatccctgggaattgcgagaataactcccactattttaaaatttatattcagatttgtttcgtttcataagacacatcaaacaggcctatacaaaaggtttaggaaaagaaaacaatggtgagtcccggccctcttcgaattcactggcacctcatgcaagtgtaggaaggcacgctggatcgtctatctgattccaaagctgtcctttgccatctcatcccttggcctgccccccaaccctgaggatgcccctgccatccccccaacctcctcatattgcctctgaacccagatggcaatccatcccggttctctctgagggccacgggcttgggtagtggaaagggtgtttgggaaattgttaaatcagttacccgtagtagagctatttcttgtacttctaagttttctagaagtggaaggattgtagtcatcctgaaaatgggtttacttcaaaatccctcagccttgttcttcacgactgtctatactgagagtgtcatgtttccacaaagggctgacacctgagcctggattttcactcatccctgagaagccctttccagtagggtgggcaattcccaacttccttgccacaagcttcccaggctttctcccctggaaaactccagcttgagtcccagatacactcatgggctgccctgggcagccagcattcattgtaagttccctctttgaaaactggtgtgtgggtgttcagttctgtgtctggtgggtatggacagacagtaatctcctgtgatctgtgctagctgtgaggcagctctggaacgtgaagagctgtttggtttgaaccgtgaacaaaactgtgttttgagtttagctgacattaaagaaaaaagttcatcacgtgactgttaatgtaaacctggttattaaaataactatgaaattaccaa

SEQ ID NO: 387825 - DNA, 4056 bp, Homo sapiens
cctcacagtaaacacaagactctaagctcccagtgtgcctccagccatctcccctgttcatgtggagcttttctcctttgccagcggggatctgcagctatctgggagtgcccactgcaccttcagcactgcccagaaagcaattgggaaggacaacttcacagccattcctgagggcaccaatggtgtggaggagcggatgtctgtcatctgggacaaggctgtggccacagggaaaatggacgaaaaccagttcgtggctgtgacaagcacaaacgctgccaagatcttcaacctgtatccccgcaagggaagaatatctgtgggttctgacagcgacctcgtcatctgggatccagatgctgtgaagatcgtctctgccaagaaccaccagtctgcggcagagtacaacatctttgaagggatggagctgcgcggggctcctctggttgtcatctgccagggcaagatcatgctggaagatggcaacctgcacgtgacccagggggctggccgcttcataccctgcagcccgttctccgactatgtctacaagcgcattaaagcacggaggaagatggcagacctgcatgccgtcccaaggggcatgtacgatgggcctgtgtttgacctgaccaccacccccaaaggtggcacccccgcaggctctgctcggggctctcctactcggccgaacccacctgtgaggaatcttcatcagtcgggatttagcctgtcaggcacccaagtggatgagggggttcgctcagccagcaagcgcatcgtggcgcccccaggcggccgttctaatatcacatctctgagttaagcaagccttcctcaaagagaggggcagaagcaagaagagattgttttgaagccaaaatggtacaccgatatttaagaaggaaagcgaatccaaacggttgtgatctaaagaatcaataagcctcaagccttatgtttctccaatgttacgctcgcttgcctagctttacgaatattgctttgttttctgtttatgcatagccttgatttgtttgactcccctccccccatttacatgcatgcaatcagacaggccactaaggtaaaagagtctgctctatcatagtgttgagagcgtgtgtagtgctgcatcttatgacaaggggacagacaagctgggacgtcagggaaatgaacaaaagggacgcaggttatttggggtgagtgggtggtgggagcctggagcaaggtggagggtgcagaggggctggggtagggcatgtaggagggaggtgggtgggtcaggtgagtggaaggggtgttgtatattgtgttgatgacgtacgttatttccatggaagatagccgctgtggcagctgtcacatcaccacagctccctagggtctgccgagaaggcaggcagtctttgggttctgttctttgtcacgtcccctacaagtaaattttgtttctttgaacgtttattaaaatgccaagacccaaccatttcttccacctgcttgattgtgccagtgtttgctcaggcctctttcttagtgttgctttcaaatccttctctttcctgggttgggaaggccaggcagggacagagcaaatgacacttctcttcctcttgccctccctgcctctttggtgctcttaaaagccagcagctgagaacatagcacaggcccacgtggtgagggcacccacagcttaaagacgcttccttctaaacacggcgaggtcacctctcactcttctgtctttgcaaaccgagaagagtggcatgcttctggcatcccaagtcaggattttagctcagatgaggcagaatgaagggcctctcttacaggcagtttgtgtttgattctctcgatcctggcacatccatgataaataggagtttttgaaagttggttttattaggtgttccctaatttttaccgtaataggtcatctcagcttatatgaaagtcaagtggggaactgggaaagccaaagtcagtcttgagcagagggagcacattttgtggacctggttccacctttccattccaaaccacctgtttccccttccattagcagaaactctgggggaactttgtgtctcagtcctagaatctccccaagtgagtggaagtgacatgatgcagtcttcctcatggggcacctgaaagaaattagtgtgggtgcttcgatctaccttgtctgtcagagttgaatatctctttccctatcatgctgcttctgaaaattcagttttggagcaagtcctgtgagcaagataagaatctatagaaccaagatgctcattttcagaagaaatatgttcaacctgggatcagacttccatgctctggggaatccaagtggtagcacctgtaaccctgtgtactaagtgctttgaagagaagagcaggcctcagacaccttttaattgcttaggagaaaccattgtctctgactgcaggtttgaataagttgaagaccagagaaaagtacacactgggctacaaaggaatttggagatagccaaggaacaggatttcccctagcaagctaccttctgttcaaatcatgaaaaaagactatttccccttagaatagggaagcttgctattttaaagctcttgtagtgcttttcttttaagggagatgtagtaaaagggaaaatgtagctcttagtttacacttcaaagatgtgggggtctttcagagaactaagaataacagttttatgtgcagagagagtttgccagatctgaagcatatacctcattgactaggctgttactttgggataggttgcagtaccagccacagccagcagatagaggaaaagacacacataaactcgcttctgagcgtccacttctgcactctctgctctgctgttactcagcccctgagtctgactcatctctgcacaacctctctgtgccatgaagataagtcttccatggccaaatcggtcatccgcactgcccttgggacttccgaagtgaaccattccaccagaacctttgattctgcacaagatttccttgctctgggaacaacccccaaatgcccttgggaggaacaacatgagctcaggaagcctctctttcttcacttaccattactaactctccaagcatagaaatccctgggaattgcgagaataactcccactattttaaaatttatattcagatttgtttcgtttcataagacacatcaaacaggcctatacaaaaggtttaggaaaagaaaacaatggtgagtcccggccctcttcgaattcactggcacctcatgcaagtgtaggaaggcacgctggatcgtctatctgattccaaagctgtcctttgccatctcatcccttggcctgccccccaaccctgaggatgcccctgccatccccccaacctcctcatattgcctctgaacccagatggcaatccatcccggttctctctgagggccacgggcttgggtagtggaaagggtgtttgggaaattgttaaatcagttacccgtagtagagctatttcttgtacttctaagttttctagaagtggaaggattgtagtcatcctgaaaatgggtttacttcaaaatccctcagccttgttcttcacgactgtctatactgagagtgtcatgtttccacaaagggctgacacctgagcctggattttcactcatccctgagaagccctttccagtagggtgggcaattcccaacttccttgccacaagcttcccaggctttctcccctggaaaactccagcttgagtcccagatacactcatgggctgccctgggcagccagcattcattgtaagttccctctttgaaaactggtgtgtgggtgttcagttctgtgtctggtgggtatggacagacagtaatctcctgtgatctgtgctagctgtgaggcagctctggaacgtgaagagctgtttggtttgaaccgtgaacaaaactgtgttttgagtttagctgacattaaagaaaaaagttcatcacgtgactgttaatgtaaacctggttattaaaataactatgaaattaccaa

SEQ ID NO: 387826 - DNA, 5998 bp, Homo sapiens
  misc_feature (5795)..(5795): n is a, c, g, or t
  misc_feature (5891)..(5891): n is a, c, g, or t
  misc_feature (5895)..(5895): n is a, c, g, or t
  misc_feature (5900)..(5900): n is a, c, g, or t
cgtttgattttagcaggtagctaaaggacaatgtattccatcgccgaagggccatggttttgcttgtaataacatataaaccttcgtctgtcagccctgcctaaagtaaactcgggattgtgagcagtgcacgtggttcattactgatggggagcaatagcagttctactccaaatccatggctgcgcaccaggaacgtgtctgggctactgccttcccactccacaggtgttttctactttttactcacagagcagcattcatgttctttctttgattctgagactcagtcaggcagtggagtttctttaacaagatactacttggatattttttaaatacagggaatggttgagtccactgctaccgtgccccttgcagcctctgagagcgagtcacggctttccattttctaatgtgtatgttccgggtctggggaccccagcaggcccgccaggttgcagagtcggaccagtctccggcgtctgaaggggctgcgccgctgtttaccaccccgcgagcagcagaggcggcgcccagccctcctctcgaacaaaggcgcggccgccgcattcgacccgcgccatggcagaggagagcgggtgccgggagggaagccgggaaccgtctccattctgaaactagggcggggaagccgccgcgggagcccgggaggggggcggaggcgggcggaggcggcggcgcggccagcgcaccattcactccacctgatctcggggcgctgtgcgctgaggaaggcgcgggcgagccggagcagaagaaggagggagggagccagccgctgcagccaccaccgccaccatgtcctaccaaggcaagaagaacatcccgcggatcacgagtgaccgtctccttatcaagggaggcagaatcgtcaatgatgatcagtccttttatgctgatatttacatggaagatggcttaataaaacaaattggagacaatctgattgttcctggaggagtgaagaccattgaagccaatgggaagatggtgatccctggaggcatcgatgtccatactcacttccagatgccatataagggaatgaccacagtagatgacttcttccaagggacaaaggcggccttagcaggtggcaccaccatgatcattgaccatgtggtgcctgagcctgagtccagcctgactgaggcctatgagaaatggagagagtgggctgatgggaagagttgctgtgactatgccctgcatgtggacatcacccactggaatgacagcgtcaagcaggaagtgcagaacctcatcaaggacaaaggggttaactccttcatggtttatatggcttataaggatttgtatcaagtatctaacacagagctctatgagatcttcacctgcctgggagagctgggggccattgctcaagttcatgctgagaatggggatatcattgcccaggagcaaacccgcatgttggaaatggggataactggcccagaaggccatgtactgagcaggccagaagagctggaagctgaggctgtgttccgtgccatcaccattgccagccaaaccaattgccctctctacgtcacaaaggtcatgagcaagagtgcagctgacctcatctcacaagccaggaaaaaaggaaatgtagtctttggtgagcccatcactgccagcctcggcatagatggaacccattattggagcaagaactgggccaaggcggctgcatttgtgacatccccacccctgagccctgacccaactactccggactacatcaactccttgctggccagcggggatctgcagctatctgggagtgcccactgcaccttcagcactgcccagaaagcaattgggaaggacaacttcacagccattcctgagggcaccaatggtgtggaggagcggatgtctgtcatctgggacaaggctgtggccacagggaaaatggacgaaaaccagttcgtggctgtgacaagcacaaacgctgccaagatcttcaacctgtatccccgcaagggaagaatatctgtgggttctgacagcgacctcgtcatctgggatccagatgctgtgaagatcgtctctgccaagaaccaccagtctgcggcagagtacaacatctttgaagggatggagctgcgcggggctcctctggttgtcatctgccagggcaagatcatgctggaagatggcaacctgcacgtgacccagggggctggccgcttcataccctgcagcccgttctccgactatgtctacaagcgcattaaagcacggaggaagatggcagacctgcatgccgtcccaaggggcatgtacgatgggcctgtgtttgacctgaccaccacccccaaaggtggcacccccgcaggctctgctcggggctctcctactcggccgaacccacctgtgaggaatcttcatcagtcgggatttagcctgtcaggcacccaagtggatgagggggttcgctcagccagcaagcgcatcgtggcgcccccaggcggccgttctaatatcacatctctgagttaagcaagccttcctcaaagagaggggcagaagcaagaagagattgttttgaagccaaaatggtacaccgatatttaagaaggaaagcgaatccaaacggttgtgatctaaagaatcaataagcctcaagccttatgtttctccaatgttacgctcgcttgcctagctttacgaatattgctttgttttctgtttatgcatagccttgatttgtttgactcccctccccccatttacatgcatgcaatcagacaggccactaaggtaaaagagtctgctctatcatagtgttgagagcgtgtgtagtgctgcatcttatgacaaggggacagacaagctgggacgtcagggaaatgaacaaaagggacgcaggttatttggggtgagtgggtggtgggagcctggagcaaggtggagggtgcagaggggctggggtagggcatgtaggagggaggtgggtgggtcaggtgagtggaaggggtgttgtatattgtgttgatgacgtacgttatttccatggaagatagccgctgtggcagctgtcacatcaccacagctccctagggtctgccgagaaggcaggcagtctttgggttctgttctttgtcacgtcccctacaagtaaattttgtttctttgaacgtttattaaaatgccaagacccaaccatttcttccacctgcttgattgtgccagtgtttgctcaggcctctttcttagtgttgctttcaaatccttctctttcctgggttgggaaggccaggcagggacagagcaaatgacacttctcttcctcttgccctccctgcctctttggtgctcttaaaagccagcagctgagaacatagcacaggcccacgtggtgagggcacccacagcttaaagacgcttccttctaaacacggcgaggtcacctctcactcttctgtctttgcaaaccgagaagagtggcatgcttctggcatcccaagtcaggattttagctcagatgaggcagaatgaagggcctctcttacaggcagtttgtgtttgattctctcgatcctggcacatccatgataaataggagtttttgaaagttggttttattaggtgttccctaatttttaccgtaataggtcatctcagcttatatgaaagtcaagtggggaactgggaaagccaaagtcagtcttgagcagagggagcacattttgtggacctggttccacctttccattccaaaccacctgtttccccttccattagcagaaactctgggggaactttgtgtctcagtcctagaatctccccaagtgagtggaagtgacatgatgcagtcttcctcatggggcacctgaaagaaattagtgtgggtgcttcgatctaccttgtctgtcagagttgaatatctctttccctatcatgctgcttctgaaaattcagttttggagcaagtcctgtgagcaagataagaatctatagaaccaagatgctcattttcagaagaaatatgttcaacctgggatcagacttccatgctctggggaatccaagtggtagcacctgtaaccctgtgtactaagtgctttgaagagaagagcaggcctcagacaccttttaattgcttaggagaaaccattgtctctgactgcaggtttgaataagttgaagaccagagaaaagtacacactgggctacaaaggaatttggagatagccaaggaacaggatttcccctagcaagctaccttctgttcaaatcatgaaaaaagactatttccccttagaatagggaagcttgctattttaaagctcttgtagtgcttttcttttaagggagatgtagtaaaagggaaaatgtagctcttagtttacacttcaaagatgtgggggtctttcagagaactaagaataacagttttatgtgcagagagagtttgccagatctgaagcatatacctcattgactaggctgttactttgggataggttgcagtaccagccacagccagcagatagaggaaaagacacacataaactcgcttctgagcgtccacttctgcactctctgctctgctgttactcagcccctgagtctgactcatctctgcacaacctctctgtgccatgaagataagtcttccatggccaaatcggtcatccgcactgcccttgggacttccgaagtgaaccattccaccagaacctttgattctgcacaagatttccttgctctgggaacaacccccaaatgcccttgggaggaacaacatgagctcaggaagcctctctttcttcacttaccattactaactctccaagcatagaaatccctgggaattgcgagaataactcccactattttaaaatttatattcagatttgtttcgtttcataagacacatcaaacaggcctatacaaaaggtttaggaaaagaaaacaatggtgagtcccggccctcttcgaattcactggcacctcatgcaagtgtaggaaggcacgctggatcgtctatctgattccaaagctgtcctttgccatctcatcccttggcctgccccccaaccctgaggatgcccctgccatccccccaacctcctcatattgcctctgaacccagatggcaatccatcccggttctctctgagggccacgggcttgggtagtggaaagggtgtttgggaaattgttaaatcagttacccgtagtagagctatttcttgtacttctaagttttctagaagtggaaggattgtagtcatcctgaaaatgggtttacttcaaaatccctcagccttgttcttcacgactgtctatactgagagtgtcatgtttccacaaagggctgacacctgagcctggattttcactcatccctgagaagccctttccagtagggtgggcaattcccaacttccttgccacaagcttcccaggctttctcccctggaaaactccagcttgagtcccagatacactcatgggctgccctgggcagccagcattcattgtaagttccctctttgaaaactggtgtgtgggtgttcagttctgtgtctggtgggtatggacagacagtaatctcctgtgatctgtgctagctgtgaggcagctctggaacgtgaagagctgtttggtttgaaccgtgaacaaaactgtgttttgagtttagctgacattaaagaaaaaagttcatcacgtgactgttaatgtaaacctggttattaaaataactatgaaattaccaattaaaacaggagaaatctggtaagttgttaggnttctaaattccttttagtctgttcactgagatattaaatttcagtagacagaacccaaaaagagatttcatttctttctaatcactttggcttctntctnttttnttaagtaggtaaaaaccttccttggtgggcacctaagcaggatgcagccaattagttcatgaacccagctgcggacgtgaaggcttaaaatctaagga

SEQ ID NO: 387827 - DNA, 4896 bp, Homo sapiens
cgtttgattttagcaggtagctaaaggacaatgtattccatcgccgaagggccatggttttgcttgtaataacatataaaccttcgtctgtcagccctgcctaaagtaaactcgggattgtgagcagtgcacgtggttcattactgatggggagcaatagcagttctactccaaatccatggctgcgcaccaggaacgtgtctgggctactgccttcccactccacaggtgttttctactttttactcacagagcagcattcatgttctttctttgattctgagactcagtcaggcagtggagtttctttaacaagatactacttggatattttttaaatacagggaatggttgagtccactgctaccgtgccccttgcagcctctgagagcgagtcacggctttccattttctaatgtgtatgttccgggtctggggaccccagcaggcccgccaggttgcagagtcggaccagtctccggcgtctgaaggggctgcgccgctgtttaccaccccgcgagcagcagaggcggcgcccagccctcctctcgaacaaaggcgcggccgccgcattcgacccgcgccatggcagaggagagcgggtgccgggagggaagccgggaaccgtctccattctgaaactagggcggggaagccgccgcgggagcccgggaggggggcggaggcgggcggaggcggcggcgcggccagcgcaccattcactccacctgatctcggggcgctgtgcgctgaggaaggcgcgggcgagccggagcagaagaaggagggagggagccagccgctgcagccaccaccgccaccatgtcctaccaaggcaagaagaacatcccgcggatcacgagtgaccgtctccttatcaagggaggcagaatcgtcaatgatgatcagtccttttatgctgatatttacatggaagatggcttaataaaacaaattggagacaatctgattgttcctggaggagtgaagaccattgaagccaatgggaagatggtgatccctggaggcatcgatgtccatactcacttccagatgccatataagggaatgaccacagtagatgacttcttccaagggacaaaggcggccttagcaggtggcaccaccatgatcattgaccatgtggtgcctgagcctgagtccagcctgactgaggcctatgagaaatggagagagtgggctgatgggaagagttgctgtgactatgccctgcatgtggacatcacccactggaatgacagcgtcaagcaggaagtgcagaacctcatcaaggacaaaggggttaactccttcatggtttatatggcttataaggatttgtatcaagtatctaacacagagctctatgagatcttcacctgcctgggagagctgggggccattgctcaagttcatgctgagaatggggatatcattgcccaggagcaaacccgcatgttggaaatggggataactggcccagaaggccatgtactgagcaggccagaagagctggaagctgaggctgtgttccgtgccatcaccattgccagccaaaccaattgccctctctacgtcacaaaggtcatgagcaagagtgcagctgacctcatctcacaagccaggaaaaaaggaaatgtagtctttggtgagcccatcactgccagcctcggcatagatggaacccattattggagcaagaactgggccaaggcggctgcatttgtgacatccccacccctgagccctgacccaactactccggactacatcaactccttgctggccagcggggatctgcagctatctgggagtgcccactgcaccttcagcactgcccagaaagcaattgggaaggacaacttcacagccattcctgagggcaccaatggtgtggaggagcggatgtctgtcatctgggacaaggctgtggccacagggaaaatggacgaaaaccagttcgtggctgtgacaagcacaaacgctgccaagatcttcaacctgtatccccgcaagggaagaatatctgtgggttctgacagcgacctcgtcatctgggatccagatgctgtgaagatcgtctctgccaagaaccaccagtctgcggcagagtacaacatctttgaagggatggagctgcgcggggctcctctggttgtcatctgccagggcaagatcatgctggaagatggcaacctgcacgtgacccagggggctggccgcttcataccctgcagcccgttctccgactatgtctacaagcgcattaaagcacggaggaagatggcagacctgcatgccgtcccaaggggcatgtacgatgggcctgtgtttgacctgaccaccacccccaaaggtggcacccccgcaggctctgctcggggctctcctactcggccgaacccacctgtgaggaatcttcatcagtcgggatttagcctgtcaggcacccaagtggatgagggggttcgctcagccagcaagcgcatcgtggcgcccccaggcggccgttctaatatcacatctctgagttaagcaagccttcctcaaagagaggggcagaagcaagaagagattgttttgaagccaaaatggtacaccgatatttaagaaggaaagcgaatccaaacggttgtgatctaaagaatcaataagcctcaagccttatgtttctccaatgttacgctcgcttgcctagctttacgaatattgctttgttttctgtttatgcatagccttgatttgtttgactcccctccccccatttacatgcatgcaatcagacaggccactaaggtaaaagagtctgctctatcatagtgttgagagcgtgtgtagtgctgcatcttatgacaaggggacagacaagctgggacgtcagggaaatgaacaaaagggacgcaggttatttggggtgagtgggtggtgggagcctggagcaaggtggagggtgcagaggggctggggtagggcatgtaggagggaggtgggtgggtcaggtgagtggaaggggtgttgtatattgtgttgatgacgtacgttatttccatggaagatagccgctgtggcagctgtcacatcaccacagctccctagggtctgccgagaaggcaggcagtctttgggttctgttctttgtcacgtcccctacaagtaaattttgtttctttgaacgtttattaaaatgccaagacccaaccatttcttccacctgcttgattgtgccagtgtttgctcaggcctctttcttagtgttgctttcaaatccttctctttcctgggttgggaaggccaggcagggacagagcaaatgacacttctcttcctcttgccctccctgcctctttggtgctcttaaaagccagcagctgagaacatagcacaggcccacgtggtgagggcacccacagcttaaagacgcttccttctaaacacggcgaggtcacctctcactcttctgtctttgcaaaccgagaagagtggcatgcttctggcatcccaagtcaggattttagctcagatgaggcagaatgaagggcctctcttacaggcagtttgtgtttgattctctcgatcctggcacatccatgataaataggagtttttgaaagttggttttattaggtgttccctaatttttaccgtaataggtcatctcagcttatatgaaagtcaagtggggaactgggaaagccaaagtcagtcttgagcagagggagcacattttgtggacctggttccacctttccattccaaaccacctgtttccccttccattagcagaaactctgggggaactttgtgtctcagtcctagaatctccccaagtgagtggaagtgacatgatgcagtcttcctcatggggcacctgaaagaaattagtgtgggtgcttcgatctaccttgtctgtcagagttgaatatctctttccctatcatgctgcttctgaaaattcagttttggagcaagtcctgtgagcaagataagaatctatagaaccaagatgctcattttcagaagaaatatgttcaacctgggatcagacttccatgctctggggaatccaagtggtagcacctgtaaccctgtgtactaagtgctttgaagagaagagcaggcctcagacaccttttaattgcttaggagaaaccattgtctctgactgcaggtttgaataagttgaagaccagagaaaagtacacactgggctacaaaggaatttggagatagccaaggaacaggatttcccctagcaagctaccttctgttcaaatcatgaaaaaagactatttccccttagaatagggaagcttgctattttaaagctcttgtagtgcttttcttttaagggagatgtagtaaaagggaaaatgtagctcttagtttacacttcaaagatgtgggggtctttcagagaactaagaataacagttttatgtgcagagagagtttgccagatctgaagcatatacctcattgactaggctgttactttgggataggttgcagtaccagccacagccagcagatagaggaaaagacacacataaactcgcttctgagcgtccacttctgcactctctgctctgctgttactcagcccctgagtctgactcatctctgcacaacctctctgtgccatgaagataagtcttccatggccaaatcggtcatccgcactgcccttgggacttccgaagtgaaccattccaccagaacctttgattctgcacaagatttccttgctctgggaacaacccccaaatgcccttgggaggaacaacatgagctcaggaagcctctctttcttcacttaccattactaactctccaagcatagaaatccctgggaattgcgagaaccgtcgattcgagggatcctctaggtcagccctc

SEQ ID NO: 387828 - DNA, 4730 bp, Homo sapiens
cgtttgattttagcaggtagctaaaggacaatgtattccatcgccgaagggccatggttttgcttgtaataacatataaaccttcgtctgtcagccctgcctaaagtaaactcgggattgtgagcagtgcacgtggttcattactgatggggagcaatagcagttctactccaaatccatggctgcgcaccaggaacgtgtctgggctactgccttcccactccacaggtgttttctactttttactcacagagcagcattcatgttctttctttgattctgagactcagtcaggcagtggagtttctttaacaagatactacttggatattttttaaatacagggaatggttgagtccactgctaccgtgccccttgcagcctctgagagcgagtcacggctttccattttctaatgtgtatgttccgggtctggggaccccagcaggcccgccaggttgcagagtcggaccagtctccggcgtctgaaggggctgcgccgctgtttaccaccccgcgagcagcagaggcggcgcccagccctcctctcgaacaaaggcgcggccgccgcattcgacccgcgccatggcagaggagagcgggtgccgggagggaagccgggaaccgtctccattctgaaactagggcggggaagccgccgcgggagcccgggaggggggcggaggcgggcggaggcggcggcgcggccagcgcaccattcactccacctgatctcggggcgctgtgcgctgaggaaggcgcgggcgagccggagcagaagaaggagggagggagccagccgctgcagccaccaccgccaccatgtcctaccaaggcaagaagaacatcccgcggatcacgagtgaccgtctccttatcaagggaggcagaatcgtcaatgatgatcagtccttttatgctgatatttacatggaagatggcttaataaaacaaattggagacaatctgattgttcctggaggagtgaagaccattgaagccaatgggaagatggtgatccctggaggcatcgatgtccatactcacttccagatgccatataagggaatgaccacagtagatgacttcttccaagggacaaaggcggccttagcaggtggcaccaccatgatcattgaccatgtggtgcctgagcctgagtccagcctgactgaggcctatgagaaatggagagagtgggctgatgggaagagttgctgtgactatgccctgcatgtggacatcacccactggaatgacagcgtcaagcaggaagtgcagaacctcatcaaggacaaaggggttaactccttcatggtttatatggcttataaggatttgtatcaagtatctaacacagagctctatgagatcttcacctgcctgggagagctgggggccattgctcaagttcatgctgagaatggggatatcattgcccaggagcaaacccgcatgttggaaatggggataactggcccagaaggccatgtactgagcaggccagaagagctggaagctgaggctgtgttccgtgccatcaccattgccagccaaaccaattgccctctctacgtcacaaaggtcatgagcaagagtgcagctgacctcatctcacaagccaggaaaaaaggaaatgtagtctttggtgagcccatcactgccagcctcggcatagatggaacccattattggagcaagaactgggccaaggcggctgcatttgtgacatccccacccctgagccctgacccaactactccggactacatcaactccttgctggccagcggggatctgcagctatctgggagtgcccactgcaccttcagcactgcccagaaagcaattgggaaggacaacttcacagccattcctgagggcaccaatggtgtggaggagcggatgtctgtcatctgggacaaggctgtggccacagggaaaatggacgaaaaccagttcgtggctgtgacaagcacaaacgctgccaagatcttcaacctgtatccccgcaagggaagaatatctgtgggttctgacagcgacctcgtcatctgggatccagatgctgtgaagatcgtctctgccaagaaccaccagtctgcggcagagtacaacatctttgaagggatggagctgcgcggggctcctctggttgtcatctgccagggcaagatcatgctggaagatggcaacctgcacgtgacccagggggctggccgcttcataccctgcagcccgttctccgactatgtctacaagcgcattaaagcacggaggaagatggcagacctgcatgccgtcccaaggggcatgtacgatgggcctgtgtttgacctgaccaccacccccaaaggtggcacccccgcaggctctgctcggggctctcctactcggccgaacccacctgtgaggaatcttcatcagtcgggatttagcctgtcaggcacccaagtggatgagggggttcgctcagccagcaagcgcatcgtggcgcccccaggcggccgttctaatatcacatctctgagttaagcaagccttcctcaaagagaggggcagaagcaagaagagattgttttgaagccaaaatggtacaccgatatttaagaaggaaagcgaatccaaacggttgtgatctaaagaatcaataagcctcaagccttatgtttctccaatgttacgctcgcttgcctagctttacgaatattgctttgttttctgtttatgcatagccttgatttgtttgactcccctccccccatttacatgcatgcaatcagacaggccactaaggtaaaagagtctgctctatcatagtgttgagagcgtgtgtagtgctgcatcttatgacaaggggacagacaagctgggacgtcagggaaatgaacaaaagggacgcaggttatttggggtgagtgggtggtgggagcctggagcaaggtggagggtgcagaggggctggggtagggcatgtaggagggaggtgggtgggtcaggtgagtggaaggggtgttgtatattgtgttgatgacgtacgttatttccatggaagatagccgctgtggcagctgtcacatcaccacagctccctagggtctgccgagaaggcaggcagtctttgggttctgttctttgtcacgtcccctacaagtaaattttgtttctttgaacgtttattaaaatgccaagacccaaccatttcttccacctgcttgattgtgccagtgtttgctcaggcctctttcttagtgttgctttcaaatccttctctttcctgggttgggaaggccaggcagggacagagcaaatgacacttctcttcctcttgccctccctgcctctttggtgctcttaaaagccagcagctgagaacatagcacaggcccacgtggtgagggcacccacagcttaaagacgcttccttctaaacacggcgaggtcacctctcactcttctgtctttgcaaaccgagaagagtggcatgcttctggcatcccaagtcaggattttagctcagatgaggcagaatgaagggcctctcttacaggcagtttgtgtttgattctctcgatcctggcacatccatgataaataggagtttttgaaagttggttttattaggtgttccctaatttttaccgtaataggtcatctcagcttatatgaaagtcaagtggggaactgggaaagccaaagtcagtcttgagcagagggagcacattttgtggacctggttccacctttccattccaaaccacctgtttccccttccattagcagaaactctgggggaactttgtgtctcagtcctagaatctccccaagtgagtggaagtgacatgatgcagtcttcctcatggggcacctgaaagaaattagtgtgggtgcttcgatctaccttgtctgtcagagttgaatatctctttccctatcatgctgcttctgaaaattcagttttggagcaagtcctgtgagcaagataagaatctatagaaccaagatgctcattttcagaagaaatatgttcaacctgggatcagacttccatgctctggggaatccaagtggtagcacctgtaaccctgtgtactaagtgctttgaagagaagagcaggcctcagacaccttttaattgcttaggagaaaccattgtctctgactgcaggtttgaataagttgaagaccagagaaaagtacacactgggctacaaaggaatttggagatagccaaggaacaggatttcccctagcaagctaccttctgttcaaatcatgaaaaaagactatttccccttagaatagggaagcttgctattttaaagctcttgtagtgcttttcttttaagggagatgtagtaaaagggaaaatgtagctcttagtttacacttcaaagatgtgggggtctttcagagaactaagaataacagttttatgtgcagagagagtttgccagatctgaagcatatacctcattgactaggctgttactttgggataggttgcagtaccagccacagccagcagatagaggaaaagacacacataaactcgcttctgagcgtccacttctgcactctctgctctgctgttactcagcccctgagtctgactcatctctgcacaacctctctgtgccatgaagataagtcttccatggccaaatcgaatccccgcacaaatcaagcttatcgatacaaacgacctcgaggggggatccggatttcac

SEQ ID NO: 387829 - DNA, 3228 bp, Homo sapiens
cgtttgattttagcaggtagctaaaggacaatgtattccatcgccgaagggccatggttttgcttgtaataacatataaaccttcgtctgtcagccctgcctaaagtaaactcgggattgtgagcagtgcacgtggttcattactgatggggagcaatagcagttctactccaaatccatggctgcgcaccaggaacgtgtctgggctactgccttcccactccacaggtgttttctactttttactcacagagcagcattcatgttctttctttgattctgagactcagtcaggcagtggagtttctttaacaagatactacttggatattttttaaatacagggaatggttgagtccactgctaccgtgccccttgcagcctctgagagcgagtcacggctttccattttctaatgtgtatgttccgggtctggggaccccagcaggcccgccaggttgcagagtcggaccagtctccggcgtctgaaggggctgcgccgctgtttaccaccccgcgagcagcagaggcggcgcccagccctcctctcgaacaaaggcgcggccgccgcattcgacccgcgccatggcagaggagagcgggtgccgggagggaagccgggaaccgtctccattctgaaactagggcggggaagccgccgcgggagcccgggaggggggcggaggcgggcggaggcggcggcgcggccagcgcaccattcactccacctgatctcggggcgctgtgcgctgaggaaggcgcgggcgagccggagcagaagaaggagggagggagccagccgctgcagccaccaccgccaccatgtcctaccaaggcaagaagaacatcccgcggatcacgagtgaccgtctccttatcaagggaggcagaatcgtcaatgatgatcagtccttttatgctgatatttacatggaagatggcttaataaaacaaattggagacaatctgattgttcctggaggagtgaagaccattgaagccaatgggaagatggtgatccctggaggcatcgatgtccatactcacttccagatgccatataagggaatgaccacagtagatgacttcttccaagggacaaaggcggccttagcaggtggcaccaccatgatcattgaccatgtggtgcctgagcctgagtccagcctgactgaggcctatgagaaatggagagagtgggctgatgggaagagttgctgtgactatgccctgcatgtggacatcacccactggaatgacagcgtcaagcaggaagtgcagaacctcatcaaggacaaaggggttaactccttcatggtttatatggcttataaggatttgtatcaagtatctaacacagagctctatgagatcttcacctgcctgggagagctgggggccattgctcaagttcatgctgagaatggggatatcattgcccaggagcaaacccgcatgttggaaatggggataactggcccagaaggccatgtactgagcaggccagaagagctggaagctgaggctgtgttccgtgccatcaccattgccagccaaaccaattgccctctctacgtcacaaaggtcatgagcaagagtgcagctgacctcatctcacaagccaggaaaaaaggaaatgtagtctttggtgagcccatcactgccagcctcggcatagatggaacccattattggagcaagaactgggccaaggcggctgcatttgtgacatccccacccctgagccctgacccaactactccggactacatcaactccttgctggccagcggggatctgcagctatctgggagtgcccactgcaccttcagcactgcccagaaagcaattgggaaggacaacttcacagccattcctgagggcaccaatggtgtggaggagcggatgtctgtcatctgggacaaggctgtggccacagggaaaatggacgaaaaccagttcgtggctgtgacaagcacaaacgctgccaagatcttcaacctgtatccccgcaagggaagaatatctgtgggttctgacagcgacctcgtcatctgggatccagatgctgtgaagatcgtctctgccaagaaccaccagtctgcggcagagtacaacatctttgaagggatggagctgcgcggggctcctctggttgtcatctgccagggcaagatcatgctggaagatggcaacctgcacgtgacccagggggctggccgcttcataccctgcagcccgttctccgactatgtctacaagcgcattaaagcacggaggaagatggcagacctgcatgccgtcccaaggggcatgtacgatgggcctgtgtttgacctgaccaccacccccaaaggtggcacccccgcaggctctgctcggggctctcctactcggccgaacccacctgtgaggaatcttcatcagtcgggatttagcctgtcaggcacccaagtggatgagggggttcgctcagccagcaagcgcatcgtggcgcccccaggcggccgttctaatatcacatctctgagttaagcaagccttcctcaaagagaggggcagaagcaagaagagattgttttgaagccaaaatggtacaccgatatttaagaaggaaagcgaatccaaacggttgtgatctaaagaatcaataagcctcaagccttatgtttctccaatgttacgctcgcttgcctagctttacgaatattgctttgttttctgtttatgcatagccttgatttgtttgactcccctccccccatttacatgcatgcaatcagacaggccactaaggtaaaagagtctgctctatcatagtgttgagagcgtgtgtagtgctgcatcttatgacaaggggacagacaagctgggacgtcagggaaatgaacaaaagggacgcaggttatttggggtgagtgggtggtgggagcctggagcaaggtggagggtgcagaggggctggggtagggcatgtaggagggaggtgggtgggtcaggtgagtggaaggggtgttgtatattgtgttgatgacgtacgttatttccatggaagatagccgctgtggcagctgtcacatcaccacagctccctagggtctgccgagaaggcaggcagtctttgggttctgttctttgtcacgtcccctacaagtaaattttgtttctttgaacgtttattaaaatgccaagacccaaccatttcttccacctgcttgattgtgccag

SEQ ID NO: 387830 - DNA, 3610 bp, Homo sapiens
cgtttgattttagcaggtagctaaaggacaatgtattccatcgccgaagggccatggttttgcttgtaataacatataaaccttcgtctgtcagccctgcctaaagtaaactcgggattgtgagcagtgcacgtggttcattactgatggggagcaatagcagttctactccaaatccatggctgcgcaccaggaacgtgtctgggctactgccttcccactccacaggtgttttctactttttactcacagagcagcattcatgttctttctttgattctgagactcagtcaggcagtggagtttctttaacaagatactacttggatattttttaaatacagggaatggttgagtccactgctaccgtgccccttgcagcctctgagagcgagtcacggctttccattttctaatgtgtatgttccgggtctggggaccccagcaggcccgccaggttgcagagtcggaccagtctccggcgtctgaaggggctgcgccgctgtttaccaccccgcgagcagcagaggcggcgcccagccctcctctcgaacaaaggcgcggccgccgcattcgacccgcgccatggcagaggagagcgggtgccgggagggaagccgggaaccgtctccattctgaaactagggcggggaagccgccgcgggagcccgggaggggggcggaggcgggcggaggcggcggcgcggccagcgcaccattcactccacctgatctcggggcgctgtgcgctgaggaaggcgcgggcgagccggagcagaagaaggagggagggagccagccgctgcagccaccaccgccaccatgtcctaccaaggcaagaagaacatcccgcggatcacgagtgaccgtctccttatcaagggaggcagaatcgtcaatgatgatcagtccttttatgctgatatttacatggaagatggcttaataaaacaaattggagacaatctgattgttcctggaggagtgaagaccattgaagccaatgggaagatggtgatccctggaggcatcgatgtccatactcacttccagatgccatataagggaatgaccacagtagatgacttcttccaagggacaaaggcggccttagcaggtggcaccaccatgatcattgaccatgtggtgcctgagcctgagtccagcctgactgaggcctatgagaaatggagagagtgggctgatgggaagagttgctgtgactatgccctgcatgtggacatcacccactggaatgacagcgtcaagcaggaagtgcagaacctcatcaaggacaaaggggttaactccttcatggtttatatggcttataaggatttgtatcaagtatctaacacagagctctatgagatcttcacctgcctgggagagctgggggccattgctcaagttcatgctgagaatggggatatcattgcccaggagcaaacccgcatgttggaaatggggataactggcccagaaggccatgtactgagcaggccagaagagctggaagctgaggctgtgttccgtgccatcaccattgccagccaaaccaattgccctctctacgtcacaaaggtcatgagcaagagtgcagctgacctcatctcacaagccaggaaaaaaggaaatgtagtctttggtgagcccatcactgccagcctcggcatagatggaacccattattggagcaagaactgggccaaggcggctgcatttgtgacatccccacccctgagccctgacccaactactccggactacatcaactccttgctggccagcggggatctgcagctatctgggagtgcccactgcaccttcagcactgcccagaaagcaattgggaaggacaacttcacagccattcctgagggcaccaatggtgtggaggagcggatgtctgtcatctgggacaaggctgtggccacagggaaaatggacgaaaaccagttcgtggctgtgacaagcacaaacgctgccaagatcttcaacctgtatccccgcaagggaagaatatctgtgggttctgacagcgacctcgtcatctgggatccagatgctgtgaagatcgtctctgccaagaaccaccagtctgcggcagagtacaacatctttgaagggatggagctgcgcggggctcctctggttgtcatctgccagggcaagatcatgctggaagatggcaacctgcacgtgacccagggggctggccgcttcataccctgcagcccgttctccgactatgtctacaagcgcattaaagcacggaggaagatggcagacctgcatgccgtcccaaggggcatgtacgatgggcctgtgtttgacctgaccaccacccccaaaggtggcacccccgcaggctctgctcggggctctcctactcggccgaacccacctgtgaggaatcttcatcagtcgggatttagcctgtcaggcacccaagtggatgagggggttcgctcagccagcaagcgcatcgtggcgcccccaggcggccgttctaatatcacatctctgagttaagcaagccttcctcaaagagaggggcagaagcaagaagagattgttttgaagccaaaatggtacaccgatatttaagaaggaaagcgaatccaaacggttgtgatctaaagaatcaataagcctcaagccttatgtttctccaatgttacgctcgcttgcctagctttacgaatattgctttgttttctgtttatgcatagccttgatttgtttgactcccctccccccatttacatgcatgcaatcagacaggccactaaggtaaaagagtctgctctatcatagtgttgagagcgtgtgtagtgctgcatcttatgacaaggggacagacaagctgggacgtcagggaaatgaacaaaagggacgcaggttatttggggtgagtgggtggtgggagcctggagcaaggtggagggtgcagaggggctggggtagggcatgtaggagggaggtgggtgggtcaggtgagtggaaggggtgttgtatattgtgttgatgacgtacgttatttccatggaagatagccgctgtggcagctgtcacatcaccacagctccctagggtctgccgagaaggcaggcagtctttgggttctgttctttgtcacgtcccctacaagtaaattttgtttctttgaacgtttattaaaatgccaagacccaaccatttcttccacctgcttgattgtgccagtgtttgctcaggcctctttcttagtgttgctttcaaatccttctctttcctgggttgggaaggccaggcagggacagagcaaatgacacttctcttcctcttgccctccctgcctctttggtgctcttaaaaccagcattcattgtaagttccctctttgaaaactggtgtgtgggtgttcagttctgtgtctggtgggtatggacagacagtaatctcctgtgatctgtgctagctgtgaggcagctctggaacgtgaagagctgtttggtttgaaccgtgaacaaaactgtgttttgagtttagctgacattaaagaaaaaagttcatcacgtgactgttaatgtaaacctggttattaaaataactatgaaattaccaa

SEQ ID NO: 387831 - DNA, 3180 bp, Homo sapiens
cgtttgattttagcaggtagctaaaggacaatgtattccatcgccgaagggccatggttttgcttgtaataacatataaaccttcgtctgtcagccctgcctaaagtaaactcgggattgtgagcagtgcacgtggttcattactgatggggagcaatagcagttctactccaaatccatggctgcgcaccaggaacgtgtctgggctactgccttcccactccacaggtgttttctactttttactcacagagcagcattcatgttctttctttgattctgagactcagtcaggcagtggagtttctttaacaagatactacttggatattttttaaatacagggaatggttgagtccactgctaccgtgccccttgcagcctctgagagcgagtcacggctttccattttctaatgtgtatgttccgggtctggggaccccagcaggcccgccaggttgcagagtcggaccagtctccggcgtctgaaggggctgcgccgctgtttaccaccccgcgagcagcagaggcggcgcccagccctcctctcgaacaaaggcgcggccgccgcattcgacccgcgccatggcagaggagagcgggtgccgggagggaagccgggaaccgtctccattctgaaactagggcggggaagccgccgcgggagcccgggaggggggcggaggcgggcggaggcggcggcgcggccagcgcaccattcactccacctgatctcggggcgctgtgcgctgaggaaggcgcgggcgagccggagcagaagaaggagggagggagccagccgctgcagccaccaccgccaccatgtcctaccaaggcaagaagaacatcccgcggatcacgagtgaccgtctccttatcaagggaggcagaatcgtcaatgatgatcagtccttttatgctgatatttacatggaagatggcttaataaaacaaattggagacaatctgattgttcctggaggagtgaagaccattgaagccaatgggaagatggtgatccctggaggcatcgatgtccatactcacttccagatgccatataagggaatgaccacagtagatgacttcttccaagggacaaaggcggccttagcaggtggcaccaccatgatcattgaccatgtggtgcctgagcctgagtccagcctgactgaggcctatgagaaatggagagagtgggctgatgggaagagttgctgtgactatgccctgcatgtggacatcacccactggaatgacagcgtcaagcaggaagtgcagaacctcatcaaggacaaaggggttaactccttcatggtttatatggcttataaggatttgtatcaagtatctaacacagagctctatgagatcttcacctgcctgggagagctgggggccattgctcaagttcatgctgagaatggggatatcattgcccaggagcaaacccgcatgttggaaatggggataactggcccagaaggccatgtactgagcaggccagaagagctggaagctgaggctgtgttccgtgccatcaccattgccagccaaaccaattgccctctctacgtcacaaaggtcatgagcaagagtgcagctgacctcatctcacaagccaggaaaaaaggaaatgtagtctttggtgagcccatcactgccagcctcggcatagatggaacccattattggagcaagaactgggccaaggcggctgcatttgtgacatccccacccctgagccctgacccaactactccggactacatcaactccttgctggccagcggggatctgcagctatctgggagtgcccactgcaccttcagcactgcccagaaagcaattgggaaggacaacttcacagccattcctgagggcaccaatggtgtggaggagcggatgtctgtcatctgggacaaggctgtggccacagggaaaatggacgaaaaccagttcgtggctgtgacaagcacaaacgctgccaagatcttcaacctgtatccccgcaagggaagaatatctgtgggttctgacagcgacctcgtcatctgggatccagatgctgtgaagatcgtctctgccaagaaccaccagtctgcggcagagtacaacatctttgaagggatggagctgcgcggggctcctctggttgtcatctgccagggcaagatcatgctggaagatggcaacctgcacgtgacccagggggctggccgcttcataccctgcagcccgttctccgactatgtctacaagcgcattaaagcacggaggaagatggcagacctgcatgccgtcccaaggggcatgtacgatgggcctgtgtttgacctgaccaccacccccaaaggtggcacccccgcaggctctgctcggggctctcctactcggccgaacccacctgtgaggaatcttcatcagtcgggatttagcctgtcaggcacccaagtggatgagggggttcgctcagccagcaagcgcatcgtggcgcccccaggcggccgttctaatatcacatctctgagttaagcaagccttcctcaaagagaggggcagaagcaagaagagattgttttgaagccaaaatggtacaccgatatttaagaaggaaagcgaatccaaacggttgtgatctaaagaatcaataagcctcaagccttatgtttctccaatgttacgctcgcttgcctagctttacgaatattgctttgttttctgtttatgcatagccttgatttgtttgactcccctccccccatttacatgcatgcaatcagacaggccactaaggtaaaagagtctgctctatcatagtgttgagagcgtgtgtagtgctgcatttccttgccacaagcttcccaggctttctcccctggaaaactccagcttgagtcccagatacactcatgggctgccctgggcagccagcattcattgtaagttccctctttgaaaactggtgtgtgggtgttcagttctgtgtctggtgggtatggacagacagtaatctcctgtgatctgtgctagctgtgaggcagctctggaacgtgaagagctgtttggtttgaaccgtgaacaaaactgtgttttgagtttagctgacattaaagaaaaaagttcatcacgtgactgttaatgtaaacctggttattaaaataactatgaaattaccaa

SEQ ID NO: 387832 - DNA, 3042 bp, Homo sapiens
cgtttgattttagcaggtagctaaaggacaatgtattccatcgccgaagggccatggttttgcttgtaataacatataaaccttcgtctgtcagccctgcctaaagtaaactcgggattgtgagcagtgcacgtggttcattactgatggggagcaatagcagttctactccaaatccatggctgcgcaccaggaacgtgtctgggctactgccttcccactccacaggtgttttctactttttactcacagagcagcattcatgttctttctttgattctgagactcagtcaggcagtggagtttctttaacaagatactacttggatattttttaaatacagggaatggttgagtccactgctaccgtgccccttgcagcctctgagagcgagtcacggctttccattttctaatgtgtatgttccgggtctggggaccccagcaggcccgccaggttgcagagtcggaccagtctccggcgtctgaaggggctgcgccgctgtttaccaccccgcgagcagcagaggcggcgcccagccctcctctcgaacaaaggcgcggccgccgcattcgacccgcgccatggcagaggagagcgggtgccgggagggaagccgggaaccgtctccattctgaaactagggcggggaagccgccgcgggagcccgggaggggggcggaggcgggcggaggcggcggcgcggccagcgcaccattcactccacctgatctcggggcgctgtgcgctgaggaaggcgcgggcgagccggagcagaagaaggagggagggagccagccgctgcagccaccaccgccaccatgtcctaccaaggcaagaagaacatcccgcggatcacgagtgaccgtctccttatcaagggaggcagaatcgtcaatgatgatcagtccttttatgctgatatttacatggaagatggcttaataaaacaaattggagacaatctgattgttcctggaggagtgaagaccattgaagccaatgggaagatggtgatccctggaggcatcgatgtccatactcacttccagatgccatataagggaatgaccacagtagatgacttcttccaagggacaaaggcggccttagcaggtggcaccaccatgatcattgaccatgtggtgcctgagcctgagtccagcctgactgaggcctatgagaaatggagagagtgggctgatgggaagagttgctgtgactatgccctgcatgtggacatcacccactggaatgacagcgtcaagcaggaagtgcagaacctcatcaaggacaaaggggttaactccttcatggtttatatggcttataaggatttgtatcaagtatctaacacagagctctatgagatcttcacctgcctgggagagctgggggccattgctcaagttcatgctgagaatggggatatcattgcccaggagcaaacccgcatgttggaaatggggataactggcccagaaggccatgtactgagcaggccagaagagctggaagctgaggctgtgttccgtgccatcaccattgccagccaaaccaattgccctctctacgtcacaaaggtcatgagcaagagtgcagctgacctcatctcacaagccaggaaaaaaggaaatgtagtctttggtgagcccatcactgccagcctcggcatagatggaacccattattggagcaagaactgggccaaggcggctgcatttgtgacatccccacccctgagccctgacccaactactccggactacatcaactccttgctggccagcggggatctgcagctatctgggagtgcccactgcaccttcagcactgcccagaaagcaattgggaaggacaacttcacagccattcctgagggcaccaatggtgtggaggagcggatgtctgtcatctgggacaaggctgtggccacagggaaaatggacgaaaaccagttcgtggctgtgacaagcacaaacgctgccaagatcttcaacctgtatccccgcaagggaagaatatctgtgggttctgacagcgacctcgtcatctgggatccagatgctgtgaagatcgtctctgccaagaaccaccagtctgcggcagagtacaacatctttgaagggatggagctgcgcggggctcctctggttgtcatctgccagggcaagatcatgctggaagatggcaacctgcacgtgacccagggggctggccgcttcataccctgcagcccgttctccgactatgtctacaagcgcattaaagcacggaggaagatggcagacctgcatgccgtcccaaggggcatgtacgatgggcctgtgtttgacctgaccaccacccccaaaggtggcacccccgcaggctctgctcggggctctcctactcggccgaacccacctgtgaggaatcttcatcagtcgggatttagcctgtcaggcacccaagtggatgagggggttcgctcagccagcaagcgcatcgtggcgcccccaggcggccgttctaatatcacatctctgagttaagcaagccttcctcaaagagaggggcagaagcaagaagagattgttttgaagccaaaatggtacaccgatatttaagaaggaaagcgaatccaaacggttgtgatctaaagaatcaataagcctcaagccttatgtttctccaatgttacgctcgcttgcctagctttacgaatattgctttgttttctgtttatgcatagccttgatttgtttgactcccctccccccatttacatgcatgcaatcagacaggccactaaggtaaaagagtctgctctatcataggaaggggtgttgtatattgtgttgatgacgtacgttatttccatggaagatagccgctgtggcagctgtcacatcaccacagctccctagggtctgccgagaaggcaggcagtctttgggttctgttctttgtcacgtcccctacaagtaaattttgtttctttgaacgtttattaaaatgccaagacccaaccatttcttccacctgcttgattgtgccag

SEQ ID NO: 387833 - DNA, 1443 bp, Homo sapiens
cgtttgattttagcaggtagctaaaggacaatgtattccatcgccgaagggccatggttttgcttgtaataacatataaaccttcgtctgtcagccctgcctaaagtaaactcgggattgtgagcagtgcacgtggttcattactgatggggagcaatagcagttctactccaaatccatggctgcgcaccaggaacgtgtctgggctactgccttcccactccacaggtgttttctactttttactcacagagcagcattcatgttctttctttgattctgagactcagtcaggcagtggagtttctttaacaagatactacttggatattttttaaatacagggaatggttgagtccactgctaccgtgccccttgcagcctctgagagcgagtcacggctttccattttctaatgtgtatgttccgggtctggggaccccagcaggcccgccaggttgcagagtcggaccagtctccggcgtctgaaggggctgcgccgctgtttaccaccccgcgagcagcagaggcggcgcccagccctcctctcgaacaaaggcgcggccgccgcattcgacccgcgccatggcagaggagagcgggtgccgggagggaagccgggaaccgtctccattctgaaactagggcggggaagccgccgcgggagcccgggaggggggcggaggcgggcggaggcggcggcgcggccagcgcaccattcactccacctgatctcggggcgctgtgcgctgaggaaggcgcgggcgagccggagcagaagaaggagggagggagccagccgctgcagccaccaccgccaccatgtcctaccaaggcaagaagaacatcccgcggatcacgagtgaccgtctccttatcaagggaggcagaatcgtcaatgatgatcagtccttttatgctgatatttacatggaagatggcttaataaacaattgagacatcgattttttggggggtttttttcccccctggggaggagttgaagaccattgaagccaatgggaagatggtgatccctggaggcatcgatgtccatactcacttccagatgccatataagggaatgaccacagtagatgacttcttccaagggacaaaggcggccttagcaggtggcaccaccatgatcattgaccatgtggtgcctgagcctgagtccagcctgactgaggcctatgagaaatggagagagtgggctgatgggaagagttgctgtgactatgccctgcatgtggacatcacccactggaatgacagcgtcaagcaggaagtgcagaacctcatcaaggacaaaggggttaactccttcatggtttatatggcttataaggatttgtatcaagtatctaacacagagcttgcagtgagccgagatcgcgccactgcactccagcctgggcgacagagcgagactccgtctca

SEQ ID NO: 387834 - DNA, 596 bp, Homo sapiens
ctgacgagctcggattttaagacactagcctgccgatgctcccagctgattaaagccactcccttccctatctcggtgtctgaggggttttgtctgtggcttgtactgctacagtggctcaagaacccaactggacaaataaaataagcaaacaatttcattttagagataaaattaaaaaaaaaaaaaaaaaaaaaaaaaaaaaaaaaacaaaaaacaaaaaaaaaaaaaaaaaaaagaagaaaaaagaaagaagaggagcggggggcggcgccgcgaagaagaatctccctcctcggaggaggccgccacagcagtagcgcaccaccccgacgtttgttgtgaaaaagggggcgccgccccaaaaggggcgagcgattatatataaatagccaccacacgaacacgggcgcgcgcgcggggtttatcatcaacgaggcgagaggtgggagaaaaacacaggcacggagaagcaacttttgagaagaagagacccctactttcgggggggggaacgaaaatatgggggaaaacaccacctcgaagaagaattaatacacgcccgagacgaaaataaaaaacgagagcgataaagg

SEQ ID NO: 387835 - DNA, 629 bp, Homo sapiens
ggcaactgaccctgtgggccccatctggacaggagggaggcctgtcctaggagagcagggacagcacagtcccctcccgtgggtgctcggaagagaagagaggaccctgcagagaaaagcaaacgtccctgtcacagaggctggacagctggctctgttaagccctctccggggtttttccagcacacgccaggggatctccagagatggtatcgctgaaccgccccgatccgctgccagaggagtcaagagccccgtgaggggtgccgggggccctgccctggctggcgaggcccactaaggagcaagagctcccgggacacagctgccagccacgtgccaacctgagggtcccatcgcaagggtgactgtgggaaactggcaccgatgctcttcccgaaatccaccctgctggccttcccgagtgcagctgtgggtcctgggtccccctgtgttccgtccactcatgatggacagatgctagtacaggatgagcagctacggaaaaggctcccaggccaggtgcagtggctcacgcctgtaatcccagcactgtgggaggccgaggtgggtggatcacgaggtcaggagttcaagactagcctgcgcaagatggagaaaccctgttt

SEQ ID NO: 387836 - DNA, 1000 bp, Homo sapiens
ttgagacagagtctctctctataggcccggctggaatgcagtgagtggtgtgatcacggcttactgccgcctccatctcccaggctcaagcaatcctcccacctcagccacccaagtcctgggaatatatgcgtacagcacgatgcccagctaatttcttaaatgtattttttgtagagacagggtctcactatgttgcccaggctggtctcaaactcctgggctcaagcagtcctcctgcctcagcctcccaatgtgctgggattacaggcatgagtcgctgcacctagtttaattatcccattttctgataaaaagtttttcctattatatttgcaatttatactatcaatgaatagtacaataaaatttcaaagctatgagggaactcagaaatgagtaacttgagaactaagttatatttctatcattttgaacgctactgctattatgctgatatttttcatcttaccagaaaaatgaaattaaaagcatattgttttatattgaattttttattttatttttatgctggcctcattttgaaaagttagtacaattttctttagtgctaacttgtataacatatgtaaaatttctttctccttttaaaatctgtcccacttgaatacgttctcatttaattaaaaaggtaatctataacagaaacccctttggttgtcatatcttttgttgacaatagagatggtctggatctctttatatctccaaaagttgggagactggctggtgtacagcaggcatataaataatgactgaccaggataatgatgcaattattcagcaagcattttcttacacgctctgatgtttcaggcactgtactatgtagtaaggactcaaagtggatcaagacatgcatccagacctcacagagctcctacaggaacagaggagacagatcgctcacgtgtgacaagttgctgtgacagagatacctgaaagggttagggaagcaccaagaagtgactaatcctgc

SEQ ID NO: 387837 - DNA, 439 bp, Homo sapiens
tgtgccagacaccaaggcatttcttctcagcgccaaacccaccctgccgtgcccagcttctgatcctggcactgggccttgaagaccacatggctcctgcccaggggctcaatgttcagcaatgggcacaggcactgcctcccagatggagtggggtggactggcatgtgagggtcccacatcgtttttcctggggactggggacagccaccaatcctcacctggagctgcttcactctctcacagctgcgatggactcacagtcctgtcagataaggcccctactctgggtatctaagcctcccacgcccacttttctagactcagcccctttccacactgatgaccttagcctttcttttctctttcagcagctaaccttcttttcctttgttaacgattctgtatactgaatttttcctgttcaaattactgctgc

SEQ ID NO: 387838 - DNA, 399 bp, Homo sapiens
tggaggagctgatggattagcatctccaggaaattccagtcctgtggccagtgccatgagaggctgcaatgtaggccatgtttcctgagcacctgctctgtgctggggcggggtaagagggaaggagggaggaggcataagacacacacagatggtggccacccatggaggctctgccacccccagcagccccaagccatccttcctggaatcctcaagacctggccgaaatgcagttgcctcttccagcgagccctccagaactcccactggcagtgacattttctctatcgtctgctgctctgcaagcagaaacctcctctgcaaggagtaagtctatggcacattttaactcctggttacatggcagagttttactcccatgaaatagctgtgaaa

SEQ ID NO: 387839 - DNA, 139 bp, Homo sapiens
cagcagccctaagtcaaagtcaagttctgcttaggagtatccagcattcagggacttaaaatatatcttcctctttgtcttcattagcagcagcagcccccacagcattgtggtctatgctttcctttttttttttttt

SEQ ID NO: 387840 - DNA, 497 bp, Homo sapiens
taattttattgtggctattcaaatttcgagtttttttcataaatacacaatgtcacttttaatctaaaactgcctatcaaaactgttaaatagtgagtctattcaacatccgtgatcacaggcttgtagagaatctgttgtgtgccgtgtttgtttagctttgccctgatttttgtatcaaggcagtttttcaggtgaaaaaccagaatctctaggcgttgctaaaagccacacagaaaggtactgtcataactctgccccctgtgattcaggcgctcagccctcacagaacagcctctggcccttcaaaacggagattttcagaaagcacaagtgaaaagcatctttgtttcagctgtatctgccttttatcgagcagtggaggggctgcaaacccacgtccatcacaccccgaccacatacctggcgcatgcaggtgatcagtgggcttgggacataaacactccaggaaaaaaggctaaaagactatttttttt

SEQ ID NO: 387841 - DNA, 862 bp, Homo sapiens
tatttttagtagagacggggtttcaccgtgtttgccaggatggtctcgatctggaccttgtgatccgcccacctcggcctcccaaagtgctgggattacaggcgtgagccaccgcgcctggccgacaacatgatttttaatagtgaaactattaaaacaagatagaaaattattaactactaaatttcaacagtctataaagtaccacagagatgaggaaaacgattggctttaatcactgaacaaatatattctttgattagatgaagcttgttcttatgttcctctgcatcttctctctttctcccttctctctcttgggttttttttctcttttgaaccgcagttcacttactatgttttccaagtgctttaccatctgggtttgtcaatacctccctcaaaggatggtgtccagacttgaaaactgaaaaagataggagctgaccctaaagaatttaaggattgttccctccattattcttgaaaaccgctgttaaaacagaatccataaccttggttcaatttctagaagtatatttgcagctctggcaagatactcttgttgccagtatcaatgcccatccaaatttttgtatctgtctagatgcagtcccatgctgccctttgtgtgttattcctgaggactacagaattcctacagcattttgtaccatgcatggctcttactttttttaaaaaaaattaaaaatcctattgagtgcttactgaacactgttctaagaactggattatggtggtaaacaaaagggacaaaatacattgcccttgtggagcttacattatagctgggagagaaaggcagtcaatcaatggcaggtggtgttaagtgctatgaaga

SEQ ID NO: 387842 - DNA, 379 bp, Homo sapiens
atatgttcatttctcagccttggtagggtgcatgataaggtcttcggagcgatgataatggattatggaaacactgccttctaaattttaggattaaatcttttaaaaattggaaacctttgtgctggtttctcagtgtcaatgagaagttcaggagtatagtgggcatggtgactcacttatgaagaaggcttctatttgctaacagtgagatgttttatagacaatgtttagcaataatgtgttttttcatataaatatactcatttgtatattgattgcatttctgctataagcttaataagctttttaatattatgttttatatcttttaatagatggtttgtgaagaaggtgacaagctaacctactcaaaata

SEQ ID NO: 387843 - DNA, 1081 bp, Homo sapiens
tagaaggcagtcttgtgggtgcctcctcccccagccgcaactcaggtctgcagctgggtcctgcctccttccgagtgggccatggccggtacatggctgctacttctcctggcccttgggtgtccagccctacccacaggtgtgggcggcacaccctttccttctctggccccaccaatcatgctgctggtggatggaaagcagcagatggtggtggtctgcctggtccttgatgttgcaccccctggccttgacagccccatctggttctcagccggcaatggcagtgcactggatgccttcacctatggcccttccccagcaacggatggcacctggaccaacttggcccatctctccctgccttctgaggagctggcatcctgggagcctttggtctgccacactgggcctggggctgagggtcacagcaggagtacacagcccatgcatctgtcaggagaggcttctacagccaggacctgcccccaggagcctctcagggggacaccgggtggggcgctgtggctgggggtcctgcggctgctgctcttcaagctgctgctgtttgacctgctcctgacctgcagctgcctgtgcgaccccgcgggcccgctgccttcccccgcaaccaccacccgcctgcgagccctcggctcccatcgactgcacccggccacggagactgggggacgagaggccaccagctcacccagaccccagcctcgggaccgccgctggggtgacacccctccgggtcggaagcccgggagcccagtatggggggaagggtcttacctcagcagttaccccacttgcccagcacaggcctggtgctcaagatctgccctcagggctccttcctccagtcttggagcattttttgcaggtgacctgcctcctcctctgcaggctggagctgcctgagggcagggctctacctcccctgcgtcacactgtgtgaggctgtgtctctgccatccaaaagggggccccttgagaatggtgatccacccagttacaggggcatttagggagcagatgactgagaacattaaaaaagaacttaaatgacacagca

SEQ ID NO: 387844 - DNA, 760 bp, Homo sapiens
tagaaggcagtcttgtgggtgcctcctcccccagccgcaactcaggtctgcagctgggtcctgcctccttccgagtgggccatggccggtacatggctgctacttctcctggcccttgggtgtccagccctacccacaggagaggcttctacagccaggacctgcccccaggagcctctcagggggacaccgggtggggcgctgtggctgggggtcctgcggctgctgctcttcaagctgctgctgtttgacctgctcctgacctgcagctgcctgtgcgaccccgcgggcccgctgccttcccccgcaaccaccacccgcctgcgagccctcggctcccatcgactgcacccggccacggagactgggggacgagaggccaccagctcacccagaccccagcctcgggaccgccgctggggtgacacccctccgggtcggaagcccgggagcccagtatggggggaagggtcttacctcagcagttaccccacttgcccagcacaggcctggtgctcaagatctgccctcagggctccttcctccagtcttggagcattttttgcaggtgacctgcctcctcctctgcaggctggagctgcctgagggcagggctctacctcccctgcgtcacactgtgtgaggctgtgtctctgccatccaaaagggggccccttgagaatggtgatccacccagttacaggggcatttagggagcagatgactgagaacattaaaaaagaacttaaatgacacagca

SEQ ID NO: 387845 - DNA, 1006 bp, Homo sapiens
tagaaggcagtcttgtgggtgcctcctcccccagccgcaactcaggtctgcagctgggtcctgcctccttccgagtgggccatggccggtacatggctgctacttctcctggcccttgggtgtccagccctacccacaggtcctgtttccttcccttcctcaccagaggctgccacaacaggccccatctggttctcagccggcaatggcagtgcactggatgccttcacctatggcccttccccagcaacggatggcacctggaccaacttggcccatctctccctgccttctgaggagctggcatcctgggagcctttggtctgccacactgggcctggggctgagggtcacagcaggagtacacagcccatgcatctgtcaggagaggcttctacagccaggacctgcccccaggagcctctcagggggacaccgggtggggcgctgtggctgggggtcctgcggctgctgctcttcaagctgctgctgtttgacctgctcctgacctgcagctgcctgtgcgaccccgcgggcccgctgccttcccccgcaaccaccacccgcctgcgagccctcggctcccatcgactgcacccggccacggagactgggggacgagaggccaccagctcacccagaccccagcctcgggaccgccgctggggtgacacccctccgggtcggaagcccgggagcccagtatggggggaagggtcttacctcagcagttaccccacttgcccagcacaggcctggtgctcaagatctgccctcagggctccttcctccagtcttggagcattttttgcaggtgacctgcctcctcctctgcaggctggagctgcctgagggcagggctctacctcccctgcgtcacactgtgtgaggctgtgtctctgccatccaaaagggggccccttgagaatggtgatccacccagttacaggggcatttagggagcagatgactgagaacattaaaaaagaacttaaatgacacagca

SEQ ID NO: 387846 - DNA, 555 bp, Homo sapiens
tagaaggcagtcttgtgggtgcctcctcccccagccgcaactcaggtctgcagctgggtcctgcctccttccgagtgggccatggccggtacatggctgctacttctcctggcccttgggtgtccagccctacccacaggtgtgggcggcacaccctttccttctctggccccaccaatcatgctgctggtggatggaaagcagcagatggtggtggtctgcctggtccttgatgttgcaccccctggccttgacagccccatctggttctcagccggcaatggcagtgcactggatgccttcacctatggcccttccccagcaacggatggcacctggaccaacttggcccatctctccctgccttctgaggagctggcatcctgggagcctttggtctgccacactgggcctggggctgagggtcacactgtgtgaggctgtgtctctgccatccaaaagggggccccttgagaatggtgatccacccagttacaggggcatttagggagcagatgactgagaacattaaaaaagaacttaaatgacacagca

SEQ ID NO: 387847 - DNA, 243 bp, Homo sapiens
  misc_feature (1)..(1): n is a, c, g, or t
ngcggcgttgtgtgtgtgtgtgtgtgtggtatataaacaaaatggatactctgtattttgcattttgtcttgcctttttcactcaggatgttatcaacctcatctttaacttcttcctctctccttatttttgctgaggtgactgttttcaagtcatttgaatattacgttgtgttctaacatataattattttttatccttactccgagagttttattcctgggacctaataaatctgtgtg

SEQ ID NO: 387848 - DNA, 360 bp, Homo sapiens
gagcctacggcagaaaaagaaacatcttcctataaaaactagacagaataattctcagaatctgctttgtgatgtgtgcgttcaactcatagagtaaaacttttcttttgatagagcagttttgaaacactctttttgtaatatttgcatgtgtatatttagaagcgccttgaagcctatgctagaaatggaaatatctccccataaaaccaagagagtagcaatctcagaaactaatgtgtgatggctgcattccacacacacggtggaccatttctcttgatagagcagttttgaaacactctttctgtagaatctgcaagtggataattggacctcctagaggtcttcattggaaac

SEQ ID NO: 387849 - DNA, 394 bp, Homo sapiens
gtctgaaatgtaattttaaatatgagataataatatcaccttctgcttagcctatgactacagtctagcaccaaaggaggtcagaatttccccctttatatttagtccatctttctgttgaaagcatttgtagattgagtgttttttgtattatgaatcgggtttagtctctcccaaggcaggaagttttcaagtattacattttttaatacacagcaggtggattttgtctgaaagatagttttatgccaggatattgtacttgtttcactattgaactacagaaccttagaattattttaaagattggaaaggtataacctgtctcccatgaaagacctttgtagtggtaaatttgccaaccttgttaattttactcaaactttgtttttga

SEQ ID NO: 387850 - DNA, 284 bp, Homo sapiens
tttgaacctttgccagctggaagaaaggacaaaacagctgttctaaactgccaagaaattggctggtgcatagaagagggaatttgtctttgttgtatattttgcctttgtcctgggagtgattattttgatcagcacttttggttgtacagatgtgagccaaatatctagcagagggtagctcctgattttagttaagtaattcactgctgagacttcagattatgatgtaaagtgttctgcttaatagtgataaaagctgacctgaaaagggtgttatattc

SEQ ID NO: 387851 - DNA, 676 bp, Homo sapiens
agaccccttctccaaagctttttgcatcttaagaaagataattcctaggaaaggtgcctcacctgggtcatagccagtggaaaaaggaaagcttatgatatctcttggtctggtattaagaggccaggctggaaaaggaaggcaccatttccatcatattcttctggagagaacttagtctcatcttcttcacagaagatggggaaaggtggcccagctggtcagccctgtgcctggctgcatttctgttactatggaaggagggaaaaaggaaagccagcagtgcatgtcacgcttacataagctccctccatcaggaaacttaagaccaactccatttgatctgatcagaggacgtctataaggaccaacacagtgtcacattcaaaagcatctttctccccctccaatcaaccagtgtcctggggccttcttacctctgggtaagttctttgctatcttgggctctcctagaggtggacaatgatcttccttttggttgagagtcctaattgaggagccttaagatctgaccatttgtctaaaagtcctctagataacttctcccaagtttacattggtccttatgcaaatacacctccaaatggcccatcccagaatgtcagaatttcttaactgtaccctggaaacagagtctcagggcaaaccaagaatg

SEQ ID NO: 387852 - DNA, 394 bp, Homo sapiens
ctcaaacagctttcccctgcagctgcgtgtaaattggttttataatgtttgtctttgggacaaaagctgtatcgccagtgcctacctccttctggtgcccctaacccttcctgccacctgtcctcgtccacacaggcctctggctggcttggctggggccagagccctggaagctgggagccagggtctctggaggccctgtcacccaggggcgtgtctgagcaggcagagatttggaggattgttgaaccatctcaaaccatgaggacgctggctccagggaggggaaggaagaggagaggtaccgtttgtgtgagatggggggacgggacataaagaacgcctgtggccagcggcagacccgtcctgtgacttcaggagcaatgtaccggca

SEQ ID NO: 387853 - DNA, 240 bp, Homo sapiens
cttacctcatcaggttgttataaggattaagtgagattatataagtgaagcatatagtacaatatctactattaaatgcacgctgaaataaaatagtagctgtgaaaatgtaggtgaagaaagtatactagaaaataaacaagagaggacttcaaataatggagattaaacatagggagaggcaatatgcaaatgaggtcacttgtgccccatattgcgtcatttaaatggtagataaac

SEQ ID NO: 387854 - DNA, 408 bp, Homo sapiens
ggcttcagtatttcatttgaggtgactttccaaaacagcagacaaatttatattcaagtgtagatataaaaccatattttaagcaaattatttttgtattaccagccatttagatttaacatgtctttgttcctcgattgatatttagttgactacatttggttcccacatgaagggcctagaatgagcagtaggaagtattcaatgaggtcatagtcgcccctgatatttgtcttctatccctctctagatttcaagaaaattatacctatgggttttgaagtttgggtctttttagcaaatgaggcattatttgtagggttaatcacttgcaggactctgagcgtgggacattttttaagtattctaaatttaacacaagattaacagactattgaaaacaacatt

SEQ ID NO: 387855 - DNA, 819 bp, Homo sapiens
tcctttgctgatagggcctgcgtgctgatagttgattcagtgaatatatgtagcagtgatagctcatgggctccagaggtcagatatcttattctctaggctgaaacccttgttgctttaaggaaacaggattttaataggaatcacatgcagattgactacagggagccaagcggtagtggaagaagcaaagttggcggttttggagacggacgtctatctatccacagtgggacaaaaatgaaggttattgaaaagaatcatgcttggtggaagaagtaattacatttttttttcaaatctcagaggaataatgcttttatatttcctgcgatgacccaatttgcactacgatatgctcccttaaatgtgatttaaacagaagagaggaccaccccgccaaccaaatgtccaggtcctattccatggaacctatgaacaggttgtcccacattgcaaaagggacttcacagatgtcggtaagttaaggccattgagacgaatgattctggattgtctgtgggcccaatgtgatcaaaagtttccctagaagagctagagaagatgcgataatggaagcggaatcaaagacagatttgaagatgctgctgtctttggagagaatggccaggaggcaaggaacacaagcagccctagaagttggaaaaggtttcacaaaggactgggttgaaaactaagatcttaaatcaattcatcgtgttgggaatggagcaggatagagatcgttcctgaaagataaaacatacgtgcagcatatgcacttgtgcatacatagtgctggttaatgacatatgtcag

SEQ ID NO: 387856 - DNA, 454 bp, Homo sapiens
tgaactcaccaccattattccaacctaaatgagatactttacgttcttctaattcttgtcatttttccatccttgcactaaatgcactttttgctgatattaatgttaatgtctggcagctccatttgactaagttcacaggaaaagggatggcgctgactgtttcaactcagggtctagcacagcgcctggcatggagggcccagactatgcctgccctgtagacagcaagcgctggctttactgcatatcttctagagaagatgcactgatccaccacacaatcacatgctccacaaatatgccacagctaaactgacaatttgtttaaaatgatcatttccaatgctggcaggctgtggacagacgggctgcttatggcctgtcagcaggttgtaaaatggcaccctctttctgtggagaacttggccatatgtaccaccatgcatacccg

SEQ ID NO: 387857 - DNA, 339 bp, Homo sapiens
aagaaagttcagtatgtaatgttagaggatagtttttggtattagttcatgcttatagcttggaacacagttttaggagtttaagagataataagctgcgtgctgtggctcatgcctgtaataccagtggtttgggagaccaaggctggtggatcacctgaagtcgggagtttgagaccatcctggccaacatggtgaaaccccgtctctattaaaaatacaaaaagtaatcccagctactctggaagctggggcaggagaatcacttgaacccaggaggtagaggttgcagtgagctgagatcacaccactgcactttagcctgggtgacagagcgag

SEQ ID NO: 387858 - DNA, 475 bp, Homo sapiens
ttcaccatgctggccaggctggtctcaaactcctgacctcagatgatccgcctgcctcagcctcccaagtgctgggattacaggcatgagccactgcaccccagtagggcaatttctcggcgtaggtttctttacctgggtgtgagctccatggatgggcttcatccagccagtgggccctgtcagctctgcaaagtccagtgtgtttgcatagatgcttgaggtcgtgatgatgctctggggactgcagtggggagaaggtccacagctctcatcagatccttcaaggacctggtgatggttcagtttacgtgtctgcctggctgggctaggaggtgcccagatagctgagaagacatgatttctgggtgtgttcgtgagggtgactgaatgaagaagatatgccttcactattttgggcaggcatcatccaatgcattgagggtttgaatagaacaaaaagatggagaaaaga

SEQ ID NO: 387859 - DNA, 143 bp, Homo sapiens
tacacagactactaagatatggccctgttcacaagaaaggtctcaaacattatgtcaagagatgcttatagaacattgaagagagctcaaccatggatgtagcaacagtagatgtctgctatagaaatacagtagaaggaatc

SEQ ID NO: 387860 - DNA, 497 bp, Homo sapiens
ccctgtccagatcaaatcaactcatgtcaatttaacaaagctttgagtgcctgccactgggtgtcactgtgctggtgagtgaggaacgtgcctgccatcactctgctcttgtacacaggagcgaattaggaactgatcccattcaataccaaatttgatgctccttctgatacacaatgtattcttggtgctctggtattctaggacagtggcttccagaattttttcccaaaaagccacagtaaaaaaatgcaccttatatcaggatcctgtacacatatgtgcacatacacaagtatatatgtgtatctgtgtgtatatgtaatatatatactaaagtaaaaatttcaaaaaagtaatactatgtgtgctatgcttaaatatttttatccattttctattacatattttaataatattattgctgtattcctcatatttgctatgtcaacttaagcccttggcacagtgagactcaataacatgaaaaaaaaaaa

SEQ ID NO: 387861 - DNA, 547 bp, Homo sapiens
ttgatgaattgaaaattatcaaagtaaaatgatagggtattttgtttcatgacatcagctgctgctttttgatgtggtgctgctccccgccagtgccgtgaattctccgcctttgccgggtggtgcacgcgacttagactctgctggtgcatgccgaggagtcaggagcccagctgggtaacttttcctaatggtcaaaaggttgttccctcctccaccttcctgaagcaaccatgatttgactaaagctctttattactccacctgaatatcagacagtcatgctgcttgcaatttatttattgttttccagaggtaaactactgagattttccccacctgtttttaatgtgcttctcgttcataagtattctgatctgttagtaatatctgaaaatatcacttttaacactcttgggtgcactattgctgaagccccctcacagaatggaaagttaatttgaagaactatggacctgcatcaggtttagctacacacaccacacacatacgcacatacacacacgcacatactctacagagacca

SEQ ID NO: 387862 - DNA, 384 bp, Homo sapiens
aagtcaacatctattatgttttttgtttgtgtgtgtgtttgtttttacagaagaggctcagtgatgttatgtgtcttgctcagggtcagaaagtatgtggtaggactaggattcaagcactgttcacctaactttatgttcattaagtttttcactgtactacactgccctaaatccattaaagggttttttgttgttgttgagtttgccttccaactatgaagacttaagaaatttatggatgtttgctttaactgaaaacagatactttcattaaatgattaatcttatgaatcaaatgtaaacaaaacagtttatgtatgtttctattttccttaatttgttcaaagttttgttgctagtcttaatatattttgccataac

SEQ ID NO: 387863 - DNA, 535 bp, Homo sapiens
taaaggcatattgaatattcttgttttcatgtacctctgttcattatatgaagttcaattcaggatttgaagtctttccttcacacaatcccacaaaaatgcatatggtgagtataaattgaaaaaaatagggtatttctctaaatgcaaaaagaaaaacatctgtctttaaatttttttaaaccctgcctaaattgacatgtgctttacattagtcctgtattattcaaactttcatacttatgtgtgcattatgtatgctcacacacactttagtgatggggtttgtgtatgtataaggtacctgcaaatccaaactacttcatttgaaatttgggaaatttttcctaaaataacttccacaaatatatgtgtgtatgtaggtatatatgtatattttatatgtaaatatttatatatgcatattatatataatatatgtattctacaaatgtattatatatctataaaatagtaccatggaatgctttaaatatattgtaattggttttcagagttggggtgtgtgagttgt

SEQ ID NO: 387864 - DNA, 545 bp, Homo sapiens
taatatgttaagtatgctttgaaaatgaaagaggaaagacaccccaagaagtcatgagcaggaaataaccaggaatttttacagacaagtaaacatagctaataaacataggaaaagatgatagtaattagggaaacccaaattaagacaatgagagctaattctttatccaagtagattggctaaaatcaaatctggcaataccaagggttcaagaggatgtggctcagtggtaactcttacgtattgactgtatggatgcaaactggtaaaactgctccaggaaataatttggttttcttgaaaagttgaacatggataccttttcagtatctagaaattcactcaggaaatgcttacacataagccccttgagacagaaataatcagaatagcattgttgtgtcagaacatcaacaagaactggaaatgtaatatcccagcctcttaggaggctgaggtgggaggatagcttgagcctgggaggctgaagctgccatgagccatgctgcactccagcctgggtaacagagcagcaagaccct

SEQ ID NO: 387865 - DNA, 512 bp, Homo sapiens
ctccccctctctcgtaattgttttttcttgttttgtcttggttgggtgaaaactttgcatcaaggattgaagtttgaactggcattcagaaaccttgcattgagtgttttgtttttaaaaagtaacatctcagcctggtgcagtggctcatgtctgtaatctcagcattttgggaggctgaggcagaaggattgcttgaggcctagagttctagaccagcctgggcaacagagcaagacccaatatctacaaaaaaaaaagtacaaaattcactgggcatggtggcacatgcccgtagctctagctactcaggaggctgaggtgggaggattgcttgtaaaagcccatgacttccaggctgcagtgaactatgatctcgccactgcacgccagcccaggaaacagagcaagaccccgtctcttaaaaaacgaagcatctctaaaaggtaaactcttcatattttcaaaagaatattaaacaccttggggtagggacctcatcttacgtgctg

SEQ ID NO: 387866 - DNA, 357 bp, Homo sapiens
ttgtgtggatgaagagggccatgtctgtgaagtgctcaggatggagctggtggtggggcggccatgccggccacatggctcacacccctcacccgtcaactcggtgcccggcattttccttagctcctctgtggattaattctcattctgaagacgggaggctgaggtttcatctcagctctgttcctggctcattgctgcgcttctctgtacccgtcccctcccctgactaggggaatgagaaccttgcctatggaaacacttaggggatggtggcccgtgactccatgccagcccctcccaagcccagccaccagctgaggtcctgaccaccttgtggaccacccggtcctccag

SEQ ID NO: 387867 - DNA, 486 bp, Homo sapiens
gttttactttttgagatggagtctcgctctgtcgcccagcctggagtgtagtggcttaatctcggctcactgcaacctctgcctcctggattcaagcgattctcctgcctcagcctcccaagtagccgggactacaggcatgtgccaccacgcctggcagatttttgtattgttagtagagacagggtttcaccgtgttggccaggctggtcttgaactcctgaactcaggtgatccacccgcctccgcctcccacagtgctgggattacaggcgtgagccaccacacaccctgccttgcctttcaaggttaactgatgagtcctttcaactgttttattcttcccgttttctttgaatgttacatgtagtgattaaataactatggccattccatgaacgggtacgtgcagctggttcttggggctctccaggccagtgggctgtagctgggtggtggggtggggggctgttttctgtcactcgc

SEQ ID NO: 387868 - DNA, 733 bp, Homo sapiens
cacagcttcctgagtaaagcacatgggctttgtcatcatccccttgtgcgttgcttaaagagcttagctctgtggccacacctgtgtccccagtagctgaggccatatacataatactgagggcgagacattttaccgctgaaggggaactgtcgtgtgttttgagatctttgatttaaatggattgaaaccacaaggggccccttcctcttgtgccaccacccactgcctggtgcgttggcaggcctcgcggatgaattcgtgaggagcatgccctgctcaggaacagcagagccacccagagatttcatggcagtgcagagcagcatacctgccggccgttgcagggacttatttggggaccccagcagggcatgtggagggggtctttcaaggtcttcccatcactgagagatgccagtcccacagcccctgtttctagtccagctgagttgctctccaggccctgcccctgccctgggctcattcagctatggtcagcccaggtctaggctcttgccctacctctctgtttatctgcagtggccagcacagctcctggcccagagagcgtgctcagtaaatgttggtgaattgaacaaagtccagctcaccaacgccgtggcgtcttctcccctggccacgttcctacttgaactcagttgtactttctctgcatcctccttccctcctggcctccccacctcactcctaaccaggccccacttcctcc

SEQ ID NO: 387869 - DNA, 345 bp, Homo sapiens
ttccccttccatcatgattaaaagctttctgaggtcctcaccagaaccagaggctgaagccatgcttctagtaaagcctgcaaaactatgaaccaagtaaacctcttttctttataaattacccaccctcaggtatccctttataataacacaaacagactaagggagtgctcttataaaaagggctgcaggaacttgtttaccccttctgccatgtgaggagacagagaaagcatcgtctattcagcagagacactgaatctgctggtgccttgattctggacatcttccaaaactgtgagaaataaattcctgttgtttataaactacctagtctaaaggtat

SEQ ID NO: 387870 - DNA, 1462 bp, Homo sapiens
gataaggagctgtgaagaggctgaaagtccagaagcctcgggtgtaactgagtctgttgtgggcatcccgacctgcgagtccgtggtgcagctgcagccggggcggagctacattatctatgtgcgagccctcaatatggggggccccagcgtgaggagcgagccagctacagtccacaccataggaagctactttcgcctaaacaaggacacttgccatccctggctgaccatttctgaagacggacttacggctgtacgaagtgaaaggagaacccccgccagggagctgtcacccagcgacactcacttcaccaggtgtgttgctgtcatgggaaatctaattccagtccgagggcaccattactgggaggtggaggtggatgagcatttggactacagagttggtgtggcctttgcagatgtccgtaaacaggaggatctgggagcaaattgcctctcctggtgcatgaggcacacatttgcatcatcaaggcataagtatgaatttctgcacaacagaacaactccagatataagaataacagttccaccaaagaagattggcattctattagactatgaacattcaaagttgtcatttttcaatgtggacctttctcagcatctatatacatttagttgtcagcttcacgaatttgtgcatccctgtttttctttggaaaagcctgggtgtctaaaggtacataatggcatttcaatgccaaaacatgtcactttctattagaacattctgatgtccagtttcctgtcttccatgcctacccctctcgcagctgctcacgccttagctggctgaacctggcacttaagcaccatgtgcccagcacaatttatggctcatgctattatctgactggtgtgctagcgctcatttcacccaacctggattctagtcctgtgtgctgctacctgtgtgctgctaggatagtcattaccaggcccagctgtaaaataaaggctcagactaaacgaactcaaagtctttgaagctgtcaaactatattcgtgtatatgcaaaatatcttgagtttccaagacctagagagcttgggagaggacgagggtagtcttaatggctccagcagcaccagtacacccatgcatttcatgagtcagccaagaatacacttgagaaggcgagaggctgtctgtagagaaccagggaagctgtgtgcccttctcaatgtcttctaccctcgttttcccaatagtgagcagcactgtggtgaggtcccttccactgtgtactctgcatacagggtattccctgttccactcctacacagtatgcaccactctctaattttgaaattacctctataatgcctaattccatgaagggagggacagtgcctgttttgttcattgctagatcaccaagggctaacacataacagctgtcaccaagtatttgttgaataaattagtatcttcttca

SEQ ID NO: 387871 - DNA, 155 bp, Homo sapiens
ggcactgatgggaatgcagacaaatctcacccatgttttgtctgtgactgttgggtggggtctcttgccttctctgccaaacaaggcatattccaatttggcatttgtgattaaaaagaaaggacacaagaaagtaaggaaggaaatagaagaaa

SEQ ID NO: 387872 - DNA, 359 bp, Homo sapiens
tctggcgaagtctattggagcattctttgtagcattggggaattctttgtcatatgcttgcaacttctctgtaaaccagacattatttcaaaataagtttttttgaaaagcaaaagcaaattctttgaattcttacccagtttaaaaggatgatatgattgcaaaaaagttgtgtttctctatctataggcataaatggtagtgcttggcagtttaggatccattcacacagaaactgcatttgaggcaggtgtttgtgagcaccttttgaccccttgacatttaagcaaaggagaagtgggttcctcttattcgcagctgtcataggtcagacttctgcttgttgggcgtgtcaggct

SEQ ID NO: 387873 - DNA, 2497 bp, Homo sapiens
  misc_feature (12)..(13): n is a, c, g, or t
  misc_feature (21)..(21): n is a, c, g, or t
  misc_feature (29)..(29): n is a, c, g, or t
  misc_feature (32)..(32): n is a, c, g, or t
  misc_feature (36)..(36): n is a, c, g, or t
  misc_feature (47)..(47): n is a, c, g, or t
ggccggagccgnncagctcancgagagcntanttcnggccaggtcgncccggcaaccacgagcccagccaatcagcgccccggactgcaccagagccatggtcggcagaagagcactgatcgtactggctcactcagagaggacctccttcaactatgccatgaaggaggctgctgcagcggctttgaagaagaaaggatgggaggtggtggagtcggacctctatgccatgaacttcaatcccatcatttccagaaaggacatcacaggtaaactgaaggaccctgcgaactttcagtatcctgccgagtctgttctggcttataaagaaggccatctgagcccagatattgtggctgaacaaaagaagctggaagccgcagaccttgtgatattccagttccccctgcagtggtttggagtccctgccattctgaaaggctggtttgagcgagtgttcataggagagtttgcttacacttacgctgccatgtatgacaaaggacccttccggagtaagaaggcagtgctttccatcaccactggtggcagtggctccatgtactctctgcaagggatccacggggacatgaatgtcattctctggccaattcagagtggcattctgcatttctgtggcttccaagtcttagaacctcaactgacatatagcattgggcacactccagcagacgcccgaattcaaatcctggaaggatggaagaaacgcctggagaatatttgggatgagacaccactgtattttgctccaagcagcctctttgacctaaacttccaggcaggattcttaatgaaaaaagaggtacaggatgaggagaaaaacaagaaatttggcctttctgtgggccatcacttgggcaagtccatcccaactgacaaccagatcaaagctagaaaatgagattccttagcctggatttccttctaacatgttatcaaatctgggtatctttccaggcttccctgacttgctttagtttttaagatttgtgtttttctttttccacaaggaataaatgagagggaatcgaccgtattcgtgcatttttggatgcatttttaactgattcttatgattactatcatggcatataaccaaaatccgactgggctcaagaggccacttagggaaagatgtagaaagatgctagaaaaatgttctttaaaggcatctacacaatttaattcctctttttagggctaaagttttagggtacagttggctaggtatcattcaactctccaatgttctattaatcacctctctgtagtttatggcagaagggaattgctcagagaaggaaaagactgaatctacctgccctaagggacttaacttgtttggtagttagccatctaatgcttgtttatgatatttcttgctttcaattacaaagcagttactaatatgcctagcacaagtaccactcttggtcagcttttgttgtttatatacagtacacagataccttgaaaggaagagctaataaatctcttctttgctgcagtcatctactttttttttaattaaaaaaaatttttttttgaagcagtcttgctctgttacccaggctggagtgcagtggtgtgatctcggctcactgcaacctctgcctcccaggttccagcaattctcctgcctcagcctccctagtagctgggatgacaggcgcctgccatcatgcctgactaatttttgtatttttagtagagacggcgtttcaccatgttggccaggctggtctcaaactcctgacctcaggtgatccgcctacctcagcctcccaaagtgctgggattacaggcgtgatccaccacacctggcccttgcaatcttctactttaaggtttgcagagataaaccaataaatccacaccgtacatctgcaatatgaattcaagaaaggaaatagtaccttcaatacttaaaaatagtcttccacaaaaaatactttatttctgatctatacaaattttcagaaggttattttctttatcattgctaaactgatgacttaccatgggatggggtccagtcccatgaccttggggtacaattgtaaacctagagttttatcaactttggtgaacagttttggcataatagtcaatttctacttctggaagtcatctcattccactgttggtattatataattcaaggagaatatgataaaacactgccctcttgtggtgcattgaaagaagagatgagaaatgatgaaaaggttgcctgaaaaatgggagacagcctcttacttgccaagaaaatgaagggattggaccgagctggaaaacctcctttaccagatgctgactggcactggtggtttttgctctcgacagtatccacaatagctgacggctgggtgtttcagtttgaaaatattttgttgccttcatcttcactgcaattttgtgtaaatttctcaaagatctgaattaaataaataaaattcatttctacagacccaca

SEQ ID NO: 387874 - DNA, 2520 bp, Homo sapiens
  misc_feature (12)..(13): n is a, c, g, or t
  misc_feature (21)..(21): n is a, c, g, or t
  misc_feature (29)..(29): n is a, c, g, or t
  misc_feature (32)..(32): n is a, c, g, or t
  misc_feature (36)..(36): n is a, c, g, or t
  misc_feature (47)..(47): n is a, c, g, or t
ggccggagccgnncagctcancgagagcntanttcnggccaggtcgncccggcaaccacgagcccagccaatcagcgccccggactgcaccagagccatggtcggcagaagagcactgatcgtactggctcactcagagaggacctccttcaactatgccatgaaggaggctgctgcagcggctttgaagaagaaaggatgggaggtggtggagtcggacctctatgccatgaacttcaatcccatcatttccagaaaggacatcacaggtaaactgaaggaccctgcgaactttcagtatcctgccgagtctgttctggcttataaagaaggccatctgagcccagatattgtggctgaacaaaagaagctggaagccgcagaccttgtgatattccagttccccctgcagtggtttggagtccctgccattctgaaaggctggtttgagcgagtgttcataggagagtttgcttacacttacgctgccatgtatgacaaaggacccttccggagtaagaaggcagtgctttccatcaccactggtggcagtggctccatgtactctctgcaagggatccacggggacatgaatgtcattctctggccaattcagagtggcattctgcatttctgtggcttccaagtcttagaacctcaactgacatatagcattgggcacactccagcagacgcccgaattcaaatcctggaaggatggaagaaacgcctggagaatatttgggatgagacaccactgtattttgctccaagcagcctctttgacctaaacttccaggcaggattcttaatgaaaaaagaggtacaggatgaggagaaaaacaagaaatttggcctttctgtgggccatcacttgggcaagtccatcccaactgacaaccagatcaaagctagaaaatgagattccttagcctggatttccttctaacatgttatcaaatctgggtatctttccaggcttccctgacttgctttagtttttaagatttgtgtttttctttttccacaaggaataaatgagagggaatcgaccgtattcgtgcatttttggatgcatttttaactgattcttatgattactatcatggcatataaccaaaatccgactgggctcaagaggccacttagggaaagatgtagaaagatgctagaaaaatgttctttaaaggcatctacacaatttaattcctctttttagggctaaagttttagggtacagttggctaggtatcattcaactctccaatgttctattaatcacctctctgtagtttatggcagaagggaattgctcagagaaggaaaagactgaatctacctgccctaagggacttaacttgtttggtagttagccatctaatgcttgtttatgatatttcttgctttcaattacaaagcagttactaatatgcctagcacaagtaccactcttggtcagcttttgttgtttatatacagtacacagataccttgaaaggaagagctaataaatctcttctttgctgcagtcatctactttttttttaattaaaaaaaatttttttttgaagcagtcttgctctgttacccaggctggagtgcagtggtgtgatctcggctcactgcaacctctgcctcccaggttccagcaattctcctgcctcagcctccctagtagctgggatgacaggcgcctgccatcatgcctgactaatttttgtatttttagtagagacggcgtttcaccatgttggccaggctggtctcaaactcctgacctcaggtgatccgcctacctcagcctcccaaagtgctgggattacaggcgtgatccaccacacctggcccttgcaatcttctactttaaggtttgcagagataaaccaataaatccacaccgtacatctgcaatatgaattcaagaaaggaaatagtaccttcaatacttaaaaatagtcttccacaaaaaatactttatttctgatctatacaaattttcagaaggttattttctttatcattgctaaactgatgacttaccatgggatggggtccagtcccatgaccttggggtacaattgtaaacctagagttttatcaactttggtgaacagttttggcataatagtcaatttctacttctggaagtcatctcattccactgttggtattatataattcaaggagaatatgataaaacactgccctcttgtggtgcattgaaagaagagatgagaaatgatgaaaaggttgcctgaaaaatgggagacagcctcttacttgccaagaaaatgaagggattggaccgagctggaaaacctcctttaccagatgctgactggcactggtggtttttgctctcgacagtatccacaatagctgacggctgggtgtttcagtttgaaaatattttgttgccttcatcttcactgcaattttgtgtaaatttctcaaagatctgaattaaataaataaaattcatttctacagacccacaaaaaaacaacaaaacaaaaaaag

SEQ ID NO: 387875 - DNA, 2450 bp, Homo sapiens
  misc_feature (12)..(13): n is a, c, g, or t
  misc_feature (21)..(21): n is a, c, g, or t
  misc_feature (29)..(29): n is a, c, g, or t
  misc_feature (32)..(32): n is a, c, g, or t
  misc_feature (36)..(36): n is a, c, g, or t
  misc_feature (47)..(47): n is a, c, g, or t
ggccggagccgnncagctcancgagagcntanttcnggccaggtcgncccggcaaccacgagcccagccaatcagcgccccggactgcaccagagccatggtcggcagaagagcactgatcgtactggctcactcagagaggacctccttcaactatgccatgaaggaggctgctgcagcggctttgaagaagaaaggatgggaggtggtggagtcggacctctatgccatgaacttcaatcccatcatttccagaaaggacatcacaggtaaactgaaggaccctgcgaactttcagtatcctgccgagtctgttctggcttataaagaaggccatctgagcccagatattgtggctgaacaaaagaagctggaagccgcagaccttgtgatattccagttccccctgcagtggtttggagtccctgccattctgaaaggctggtttgagcgagtgttcataggagagtttgcttacacttacgctgccatgtatgacaaaggacccttccggagtaagaaggcagtgctttccatcaccactggtggcagtggctccatgtactctctgcaagggatccacggggacatgaatgtcattctctggccaattcagagtggcattctgcatttctgtggcttccaagtcttagaacctcaactgacatatagcattgggcacactccagcagacgcccgaattcaaatcctggaaggatggaagaaacgcctggagaatatttgggatgagacaccactgtattttgctccaagcagcctctttgacctaaacttccaggcaggattcttaatgaaaaaagaggtacaggatgaggagaaaaacaagaaatttggcctttctgtgggccatcacttgggcaagtccatcccaactgacaaccagatcaaagctagaaaatgagattccttagcctggatttccttctaacatgttatcaaatctgggtatctttccaggcttccctgacttgctttagtttttaagatttgtgtttttctttttccacaaggaataaatgagagggaatcgaccgtattcgtgcatttttggatgcatttttaactgattcttatgattactatcatggcatataaccaaaatccgactgggctcaagaggccacttagggaaagatgtagaaagatgctagaaaaatgttctttaaaggcatctacacaatttaattcctctttttagggctaaagttttagggtacagttggctaggtatcattcaactctccaatgttctattaatcacctctctgtagtttatggcagaagggaattgctcagagaaggaaaagactgaatctacctgccctaagggacttaacttgtttggtagttagccatctaatgcttgtttatgatatttcttgctttcaattacaaagcagttactaatatgcctagcacaagtaccactcttggtcagcttttgttgtttatatacagtacacagataccttgaaaggaagagctaataaatctcttctttgctgcagtcatctactttttttttaattaaaaaaaatttttttttgaagcagtcttgctctgttacccaggctggagtgcagtggtgtgatctcggctcactgcaacctctgcctcccaggttccagcaattctcctgcctcagcctccctagtagctgggatgacaggcgcctgccatcatgcctgactaatttttgtatttttagtagagacggcgtttcaccatgttggccaggctggtctcaaactcctgacctcaggtgatccgcctacctcagcctcccaaagtgctgggattacaggcgtgatccaccacacctggcccttgcaatcttctactttaaggtttgcagagataaaccaataaatccacaccgtacatctgcaatatgaattcaagaaaggaaatagtaccttcaatacttaaaaatagtcttccacaaaaaatactttatttctgatctatacaaattttcagaaggttattttctttatcattgctaaactgatgacttaccatgggatggggtccagtcccatgaccttggggtacaattgtaaacctagagttttatcaactttggtgaacagttttggcataatagtcaatttctacttctggaagtcatctcattccactgttggtattatataattcaaggagaatatgataaaacactgccctcttgtggtgcattgaaagaagagatgagaaatgatgaaaaggttgcctgaaaaatgggagacagcctcttacttgccaagaaaatgaagggattggaccgagctggaaaaccatccatataaaccaagaaagcagactggcaactaggtaggaaaatagctatagacagtaatccaacaaaaagcaagaacaggacaagggagtaatacagtaaagaaaaaaaaatgataagcctattacca

SEQ ID NO: 387876 - DNA, 167 bp, Homo sapiens
cgaggacgccgagctatgagaggagggagggcgcgcgaggccgagtggggagcttggagcagcgggaaggtcaggggcgcccatctgcggcactctcggtttggctcagtttctgcctacaagtgtctgtgcgtgtgaggagaaaataaagtcatgagctcatcacc

SEQ ID NO: 387877 - DNA, 684 bp, Homo sapiens
aaaggatgggggtattttagacagagtggagagtgaaggcctctctgagaacctgatatttgagcggagagctgaagaagcaaggagccagccatggggttatctggggagaaagtgctccaggaagagggagcaaccagtgcaaagaccctgaggcagggggcatggggaggagcagaggcaagtggtgagttgccaaagcatgcggtggggtgtgggaactaaagaaagatgagccagcctgggcaacacagccagaccccatctctacccaaaatgttgttccaagttagccaggcagggccaggtgcagtggctcacgcccaagctcccatcctgcacgcacaagcctgcccaatcctggtctctgagcaggagggcacccgcaccacccccaaacatgccgatccatgatacatgtaatcccagtactttgggaggccgaggcgggtggatcacctgaggtcaggggtttgagaccagcccggccaacatggcaaaaccccatctctactaaaaatacaaaaattagctgggcgtggtggcaggcacctgtaatcccagctactcaggaggctgaggcaggagaattgcttgaaccgtggaggcggaagttgcagttgaactgagattatgccactgcactccagcctgggtgacagagtgagactctgtctcaaaaaa

SEQ ID NO: 387878 - DNA, 91 bp, Homo sapiens
gcactgctgaatgttatgctggtccccaagaaaagatcctgacacagcacaggttatgcctcttcttctgagctcatactgccccagacag

SEQ ID NO: 387879 - DNA, 414 bp, Homo sapiens
aggattgtgagtggggaggtggggtgggtatgggggaggaagacaagaccgcctggccggatgcaagcaggttcctgagtgaaaggtactcagacgggaaatgcaagctttcctggggtcagagaggacttatcgtacagtaaagggattggagctcagcaaaggtctaggtgaagcttgctgtccagaaacatatccttttgaaaagtgaccattcagggaggtcttaggactttgttggtaatttcttcatcctttatagagctctgagtagttgggatggcagaaagaaaacagagacacttattgaccaaaattcttgttatatgcaccaatatccaaacccttaagatgtggaaatcctttctccatgttcctatagtcctttgcacaaattcctatcatagcactgac

SEQ ID NO: 387880 - DNA, 603 bp, Homo sapiens
acatttttctctcatatggatatctattccacacaatccctttttttgaaagaccattatttcctcattacattacggtattgcatttgtcataaattaggagagggtctgtttctggaccctctattgatttctactggttagtttgcctgttctttcattagtattacactgtcttaatttttgtaactttagcatgagttgatatctggtaacataagtcctccagctttgttattcaagattacctggattttccacctgaatttgaaaaccagtttgtcaattttgacaaaaaatcctgcttgaattttgctggaatactgttgaatttatgaatcaacttgggaaagaaggaacatctttacaaagtcaggtcttctaatccatgaacatggtatattcctccatttatttgtgttttgtctacttcaataatttttaaaaaattagtccagaggtcttgcacagcttttgtaaggtttattcctaggtttttgatttctaaatgttattaaaataagattttttttttgttttctattcatttcttgctagcaaatagaaatacaattaaattttgtgtcctggtcttttacatcc

SEQ ID NO: 387881 - DNA, 322 bp, Homo sapiens
tctatgtgaccccttatcctctagccagcctgcttaggcttgttcgtatggtgctcagcgttccctggcacatcagggttgcagtaagcaattacccttcgtacctctgagtgtgtcacatttgtgacagttccattagccaacccaaattcaactccaaaagggttaaaagaaaattagattctgcctcttgttgggagaccctgtaacatcactttgcaaagtcctaggtgcaaagagagggattttttattatttttaggaatgattccaggaactagatcagtttttttacttctgtatcccacgcatctgaaatatt

SEQ ID NO: 387882 - DNA, 622 bp, Homo sapiens
ggagatcaaatttcaacatgaggtttggaggggacaaacatccagacgatatcaggcttatacatggtacatatttattacatgttggatagatgtttctacaaaagaagatggcacaagatttatgatttattggatacttaggataagagagaagaaaacattagagttttacactaattaaaagtagagggattttctgtataagtgtaaggatatgatctttgttctacttagcttaaggaggtttgtctccattaattttgagttatgctataatgaatgctgtttttagatagctttgaagaggtagacatataattaaagtatgaataatttgtttgatgttgaacatcaatttcatctttgccaaaggtcatggactttaagaccagaatttctgaggtccacataataatttaatgactcaatgataatttttggtgttaaataaaagtcctgcagatgacctttctggacacaaagttgaatttagaattatcaaagagcaagcttgaatttgaatttgatgctattattttgttataaagaaagaatctattatgcagtgctaaaacaccagaaggaagatagtatgtctgaatatcttttaattggtagt

SEQ ID NO: 387883 - DNA, 206 bp, Homo sapiens
cctctgaccttcttttgtctcttcagtcatctaaagagatttttaaaaggaaaacggtctagtgtgtgcggtgcacccctagcccagggcctaagaggagcgtcttgtgaaggagctgtacctgccggctcaggtcccttctcggagtgactcctggcagagcagagcaggcctcagccctccttacaggcgcgtccagccagccc

SEQ ID NO: 387884 - DNA, 626 bp, Homo sapiens
gcattgtctaatctgcagttatcttattaggcacatttggagcagtgctcattgtaggactaattattctccactactcaggcaaggttttcctgattttgtactcagcactatgtgagtgaaaaaagttttttaaggttagatggtggaaacatgcataggctcagagtgacatctggccagatctgtatactgttcagatgttttttccctggtttttgatagttacgtcacatgcatgtgcttatcagtaccctgctgaattcttgaagtggatcttctgcagatctctgggcttccctctgtctctcttccctccattactctgttctgccttgatctccattagctctcactttcatgtcaactcagaaagttgtcctccaggctttgtctgggttcttcctaccagagcagaggcctagaatctgtatcaggcagtaagctgggataatagtacagcacatcttttctttcctgattttcagggatctctgtccttcattgcctggcatccagtgtgtcttggttgtataaagcagaagggtaattttgattactgttaactatttttttttccactttgttaaagattgattttgtggctctttcttgagatggatgaa

SEQ ID NO: 387885 - DNA, 461 bp, Homo sapiens
agcagaaattaaaaatgtaaaaacatttaagagtcacagaatttacatcttggtgaaaaccactttttaaaaacaaaacagtggctgacttacaggaggttggcacagcttgccctgttttcagaaccccgttacaccttgggttcactgctgaacactggctgactctcctcggtttctctaacgccgcactgactgtgctcatctagtttttcttctggaattggtgttagctcttatgtttctgtgggaaaaatacacatgccttgggagctttacgggctttttaagtgtaattttacacatttgcctctctgaatatatcctaaaaacaatatgcttgctttctttacttatttatttatttattcatttatttatttagagacggagtttttgctcttgtttcccaagatcgtgtcactgctctccagcctgggcaatagagcaagactccgtct

SEQ ID NO: 387886 - DNA, 776 bp, Homo sapiens
gataactaaattttaaccaaaatattgaaagtgttaatgctgttgttatcagatagaataaactgttacaaacgcagcctccactcagaatggatcggacttgtcacttgggcctgaacagacctaattgatcatttttcatgactgctgccagcccacagtagaataccgcagttgttaatatttctaattgggtaggatgctacatggaatgtattttgttttatatattaaattactaaaattctatataaaatacagaaagttaagattagaaagccttcttacagcacaatgaatatttatttaatggctatactgttcctgtggttgaagtcccatgtatttagtatgtctaagttatgggcgactctggatctccaaaggcaaattagtcatggaagaatctttagttttggaaaatcactatgttgcttctcaaaaagtatactagttacgacaaggtagtatttagtgtcttttacatcaacattgaggctggcacggtggctcacgcctataatcccggctcttaaggaggctgatgcaggtggatcacctgaggtcaggagtttaaggccagcctggccaacatggtaaaaccccatctctactaaaaatacaaaaatcagccaggcgtgttggtgtgcgcctataatcccagctactcgggaggctgaggcaggagaattgcttgaacccgggaggtggagattgcagtgagccaagatcgtgtcactgctctccagcctgggcaatagagcaagactccgtct

SEQ ID NO: 387887 - DNA, 458 bp, Homo sapiens
ttcagtaggtctggattgggacctgagaatttttatttcttagaagttttcaagtgatgctgatgctggtgctctggggatcacactttgaggaccaccaatgaacattatctcccaccaagcaaacccttaacatgttatactcctttaggttattagaatttatacatgcattatttcatttgacctgtaaactctaagtaactttgcatggaaaatgttatcctgattttatagacgagatagtgagtttagaaaggcagtatggtggaatggagcatagatttggagttggctagacctaaagtccagattaaatctctgctcaaggctgggcgtggtggctcatgcctgtaatcccagtgctttgggaggccagcgttggcagattgcttgagtctggaagttcgagaccagtctgggcaacataggcagaccctgtctctacaaaaaaaaat

SEQ ID NO: 387888 - DNA, 294 bp, Homo sapiens
actgtactccagcctgggagacagaataagaccctgtctcaaaaaaaaaaaagaaaaaagaaagaaagaaggaaagaaactaaatgagtggtgattgcctagggctcaaggtattgaggggaaaaaggcagtgctactaccgaaggatacatggtttctttaggttacatggtttctttatgggatgataaaaaccttctggaattcagtagtagtagtggttgcactactttgtgaatatgctaaaaaaccatcgagttggccgggcgcggtggctcacgcctgtaatcccag

SEQ ID NO: 387889 - DNA, 591 bp, Homo sapiens
aaaatgggacaaagaagaattccagaaatttctctgaaaacttcagctcttcacaacaagttaggcactttcttttaggataagaatggacttaacaaatatttttagctgataatttgcgaattatctacttttcctgttatggtggagggagtaggggtaaaaagtaaggctgtcattttgttgttaatttatttctaactaaagaaaatagagctaaaacatactttggatagtttattttattattttctgttcacagtttaaattggtatttggtaagggggcagggtgaatctacaggctaaagcaactttttaaaattaaacataatttttatttctaatcacctatgctatacattccacatgatcaagaaaaattgttggtgcattaacattttataggtaaagtttatgtgaaaatgatggtatggcaatgtcctagttattaaccctttacttctaaaagtatttacattaatacataagtttagggtaaaataaatattgaagatgaaataattagtaatctgtaaccagttgcatttaagcatggctgaaggtaacaaggcagacattgttgatggtg

SEQ ID NO: 387890 - DNA, 504 bp, Homo sapiens
cacacactcatgttcacataccaagaaaggtaagttttcagtgacttttttcttcagctagtgggtcttcctcttcctacctgttatatcagcgtgtatgtattatttaagttctatttttgacaaatagatgtcagagctagagtattctagcgctagaatctaatacttcatatctagtatttgtagacagcaaagttggcttcaatatcttgcctaaaaatagaatgcatgggaattattacaatgtaatatatctcctatactgcattgttaattaattcaggatcctaaattacaacataacctgaatgacattaatcaaagttgcatgtcagtgtagtattctcatggagaataagaacaaagcaaccttgaaaactttttttgtttgtttttgttttttgttttgttttgttttttgagacagttttgctcttgttgtccaggctggaatgcagtggcacaatctcagctcactacaacctccacctccctggttca

SEQ ID NO: 387891 - DNA, 510 bp, Homo sapiens
  misc_feature (381)..(381): n is a, c, g, or t
gagtgacacagggatgaagacctcactgagaagatgagactgaagctaagaacaaaatgatgagagagagggggtgacatggtgctctagggaacctctgctcagacaggtactattcttggcgtgactcaagtactttcctaaaggagaacttgacaaggacacggtcatattgttgcggggggaaggggagtgagtctcaggagattcgatttggagccaatgcctctgctggacttctcccgggacgtgggagaagtaagccagagacaggagatgagacttggcagtgtgatttagacttgcgcatgctcttaaccatgacacctgcttctggttccagaaatgtagtgtcgcacttaaatgtgctcccctaaccanaaacacctgcgcaggtgggtgggggtagaggggtgatgagttcagttaagggaaatgtggagattgaggtgccggcaggattcccagttcatcttcaacacgccatgaaaatactcttggaaattccaa

SEQ ID NO: 387892 - DNA, 287 bp, Homo sapiens
  misc_feature (283)..(283): n is a, c, g, or t
ttttctgtagagatggagtcttgctatattgcccaggccagtctcgaactcttgggctcaagcaatcctcccgtctcagcctcccaaagtgctgggattataggtgcgagccaccacgcccaaccagttgcttaattcttacaacagccctcggaggtaggttccattgttagccccaatcttatttatttagatggagtctcactctgttgtccaggctggagtgcagtgagccaagatcacgccattgcactccagcctgggcaacaagagcaaaactatntctt

SEQ ID NO: 387893 - DNA, 439 bp, Homo sapiens
ttttgtcacctataaattagggataataataataaatacaacatggaacagttacagtgttaaatgattgaggcatgtaatttgccttacgaaatgcctaactcatggggtgcccttaagaaatactactctcccccacctcctttacaaaattgcatgtctaatgcagtgagaaatgccaggcgtggaagatattctaggtttgatcatctgtggtttcttggccaaaacaagaagtttgagttctacattttattttgagttattaaacattgccatgcatccacaagagctgtattgtggcctgtagagaaacatagcatagtaatcaagagtgcaggctttgggcccacagctctgacctgaggcaaattccctacctctctggccctcagtttcctaatttgtaaagtgtgtatatgtgtggaggtggcaatga

SEQ ID NO: 387894 - DNA, 364 bp, Homo sapiens
gctgtacaggtccaataacagtacaggtcacaggaagatatatgtataggcctatgtgaatatgcctaaaacaaagagtgtaaattataagaggtatccacaaagagaacacttggtatgggcctcaactttcggaaatgccacattttatctccttatcgaaacttctctggccaggcgctgtggctcacacctgtaatcccagtactttgggaggcccgagtgggtggatcacttgaggtcagacattcgagaccagcctggacaacatggtaaaaccccatctctactaaaactacaaaaattagctgggcatggtggcacggtcctgtaatcccagcttactcaggaggctgagacagga

SEQ ID NO: 387895 - DNA, 535 bp, Homo sapiens
atggagtttcaccatgttggccaggctggtctgaactcctgacctgaagagatctgcccaccttggcctcccagagtgctgggattacaggacttagtcagtgtgcccggccaagattttcaaaggaagcagggaactaggttttaaagaccttattcttaaggaggaaaaccaggacattaggaaatcaagataagagattgtggcaagacactgaaaactgtccttggatttagcaatatggaagtcattggtgactttagcaagggttattttggtggaatgatgagggcagaagcctgagtttagcaatatggaggtcattgctgacttcaacccctcttccctttctgccatgagtggaaggaagcagccagagaccctcaccagatgcaggtgccagtgccacacttctggcacaacctgcagaactgtgagccaaataaacctcttttctttatcaattacacagcctcaggtattcctttatagcaacattaaatggactaagacaaggtagagccgagagcaatgg

SEQ ID NO: 387896 - DNA, 727 bp, Homo sapiens
ggacgctcagagcccagctcttgagagttcaagtatccgacagttccccactgctcccaggagcggttacccgggcactctgtgcccctcattcctgtttgggccaaggccgaggacctgcgagtagggctcagttgcctggagccccttcagcccatcccccagttcactttgcttgtgggatctccccgttgctcctgcccctggactgagtggcaggccatcctacaaacacccgcacactcgacatcagtggtgtcaagacaactctaagaaggttttccgtgatcctgcaagacctgtgttccatcctggtgattctgtcttcaatttcactgcacaggtaccacagtaagccagtgctgtgtgctccgagttccagggcatcccccagctcagccactacactgagcacaaggactctgtggggcccaggagcaggtagtcacccctttggggtccacaacacccggctgtccccagacttgtgtccagggaagatagtgttgagggccctcaaggagagcggggcagggatgcctgagcagcacaaggaccccagagtccaagaaaatcctgatgatcagagaacggtccccgaggtcaccggggatgcacggtctgcattttggcccctgcgggacaatggaggcccctctccctttgtgcccaggcccgggcctctgcagacagacctccacgcccagagctcagaaatcagatataa

SEQ ID NO: 387897 - DNA, 659 bp, Homo sapiens
gcatgtaaaacacttagaaagtgcctggtatacaaagagtgttgaaattactcttcttcctcctcccttccatcctcctttcttcctcccttccatccagtaaactgtcaccgccataccactgactcccattttccctgcattctggatagataattaaccaagtctgttacagtctcccttcacattctcttagattaggccacaacaccggaaaggtttatgtaaaggcccagtctttgggctccaagactagtttcctcattcgtactataaggccaaaagggaaacaatgacagcccccgcacagagcagtgtgtgtggcacctaatacatcattagcgctcaaaaaatggcaaaaaatggagctgccattaatgtaaggacatcaatttctcaaacacaacctaagccccctaactcaagagcctaccatggctactttgcagcttctcaaccaagtctgaagggtaggctgaggcgtaaggcaccctcagctgtccatgctgttcctttcctgactggtcctttagctcccctaagcctctctttccaaggctctggcttccttacccaagttcatatctgcactgacccctcccctcagatctctgctcttctgtctttaccagccacccttcctcttgtgcttcggagtg

SEQ ID NO: 387898 - DNA, 239 bp, Homo sapiens
tgtcagatttcaaatgattgaggtgacttgtaagaatttgttttatgccctgttgctgatcaaatcattggtcttccctatagctccttacaaaattatgcaatcagtgttccatttggagtaaacatttagtgtcttatcttgatagagtaattggctacatttctctttctatgcatgaagttgtgtaaaaggaccaattcacatgtataattggcagacagcatgaattctggact

SEQ ID NO: 387899 - DNA, 309 bp, Homo sapiens
gcaaatgaatgcagccaccttcaaattttgcatgatgtgggcttatatgacatgaatttccagatcctagagactggattctaagtgccaatttaggcagaaggatcgcttgagcccaggaactcgagacccgcctgggcaatgtagtgagaccccatctcttatattaaatttaaaataaaaataaaaataaactaagtgccaagttaagaaggtattactttctggcaggagtcaaatattttagttagtgaccgaccagtctccaagtctgttattgagtgccactgactgaatatgacaggcctg

SEQ ID NO: 387900 - DNA, 172 bp, Homo sapiens
tcattcttatatcataatacattgggttttaaagcttccggtatccattatatcttgatctcattaaacatacacttaacctgtgactagaaagcaggtaatagggaggagccagctccctattaaaatagttcaagatatttaccaaaagcaaatggaaagctttgtttac

SEQ ID NO: 387901 - DNA, 413 bp, Homo sapiens
tgcaggatgtcctgggagaggttggggagcggggcgtcctgcatggagtcaacccgaagagtgcccctcctgtcccaagaggtattcatggagcgcgcggccctgccaggcacggcggctttctcgggagaccaaaggcaggcaagacagatgtgccccgtctcccgggagctccccagcctagttggggagaccagcaggaggagtcgccacaggtggtcggggcaggcacaggtttgtgcaggcgcacctgcagggatggcacggaaggcttcttggaagaacagtctgagcggaatcctgtgggggcgagtaggagttagccaggcagaggaagggaaggaagagggcgaggcagaagccaggcagcaggagagcgaaataggactccgtgtggctgcagtgtccagttc

SEQ ID NO: 387902 - DNA, 522 bp, Homo sapiens
tgtaggtactctagaggatctgcccggagccttaaccctccgggtaaccccgggagccttaaccctgaggttgggctttcctgtgcttctcacaggccacagaatggtctccctttagaaagcttgcaggatgtgcaaaaccaggtgatgggccctgtcagcccacaggctatagttggctgacccttgtagctgatgaatgggatttgagggagggcttgtctgatgccctgtcagggtgcggctgtgtctcaggcctgggacatggaggaggtggggttctgctggcgggtactcactgttcgaggagccctttaggaactgagtcagctcttcagggcaggcgatgtggagccccagacggaggcacatctgtgtcaggcaggacttgggctaggtccctcactggcctccagtgcttttctttttgttgttgttgttgttttgagacagtctcgctctgtcacccaggctggaatgcagtggcacgatctcggcttactgcatcctccgcctctaggg

SEQ ID NO: 387903 - DNA, 387 bp, Homo sapiens
tcctgagtcttgctgatgaagaacgaagctagttggccaataggcgttcttttctgctcatgttttttcacacacaaaacaaaacgaaacaaaacaaaacaaaacaaaacaaaaaaccaccattttcatgcttaatatcaactatgtgcccagcactgtgttagaaccaagagactcagaatcataaaatcagaaggaacctggagatttttgagaacaagtgcaaaagccgttttcctgataatacaggacttgcagaagcattctcatgaaagcttttgctatacagccatcctcaaaaggtttgcaagcttccttaccctttgtgctggggttttacttttgaaataaaagccgatctcctgggaaaggccataaagacaaaat

SEQ ID NO: 387904 - DNA, 655 bp, Homo sapiens
tagacatggggtctcattctgttgcccaggctggcctcaaactcctgactttaagcagtcctcctgcctcggcctcccggggtgttgggattacaggcgtgagccactgcacctggccaggacttatttcttttaaaccgaatctaagtatgttctggcaagtatgcaatacctagcggaatgcactggcctgatcagcattcataccatagtaactgatgttgaaaacagcacaaataaaccagaagttgaaaatggcaataacatgctaaaaatttgcaagtcaatttgttacacttgtccaaatcttgattttttttccttctctatcgttccccccccaccaccagctttatggaggtataattagcaaataaaaagtatacatatttaaggtatacactgtgatgttttgatatacattgtgaaatggttaccataattaagctaattaatatatccatcacctcacatagccatggttaagtttctgaagtctcttttaatctacaaagtactccttccttttttccattgtcatcaccttgcagaaacagagtcagttttcccacattctgtatttatctgtttgtttctttgtggccgcatgtaacacattcctctgtctcattctaataaatggacattagctcta

SEQ ID NO: 387905 - DNA, 276 bp, Homo sapiens
gattgttcatacttgattattagtttctaaagaaagtattcttaattccaagcctaatagctcttatgtcattagtttctagtgcagagaaatgtacttgatgaatttgtgttgacttttttttttgctagccaatatgaaggttgccagtccctgccaaaatcagcactaaaactatttttcatgagtaataacaataatattcttttttaaatagcacctttaacccaaaaatcttaagcctatataaacattcactcaacaatacactcaaaa

SEQ ID NO: 387906 - DNA, 658 bp, Homo sapiens
ggaaattccagcttcctagcaaaatagatggcacttttatccctcatttctcttgctttttcaacaaatatgttaaaaaacaattacatttcagagtgcaattttcattccctttttattgtggaatcgtggcagggttttataatctgcttaaaacacctggacttaacacaacatagggcaattataagggtcttcaatatagtgtgattatggtttttaagatctgaggttatttttgaaagaaaacagaagttcctgtgtttagtaagcaaatagaaaaaccaagatagtgtcaaccgaggtcaaagggaaaagaggaaaggatcaagactcactaggatgatcttaatatctagtatattgcctgtcagtcaattggcactcagtagagatttattgcatgagttgaatgaatgaatgaatggacattatgtgctttatatttggaattgatagagtcccacttttgagcgggtaaatgagtatgttctgtcctatgggagccctcgtttcacagtttctccttcatttaaccaaatgttctgggatggaaaaacctgctgattgcgaagttgcagaataacgtccaggctgagatagtgtcctggatggtctatcagtgggcccctgcctgtggctccctctgtaagcatgc

SEQ ID NO: 387907 - DNA, 154 bp, Homo sapiens
tcctgacctcagctgattcgcccacttcggcctcccaaagtgctgagattacagatgtgagccaccatgcccagacgatagggctttttatcattctaaaaagaacccattcttggctgggcatggtggttggctcacgcctctaatcccagca

SEQ ID NO: 387908 - DNA, 587 bp, Homo sapiens
ctagccctgtgctgagtgtctccaacaggcagcccaccaggcctgcctgcacacaggtggcacggctggcagggcagctgtcacagagccacctgaggcgttgcgctaggaagagccgcagctcagcggtgggcaatgacggcagccactgcgccagcaccagtaccggctgctcgttgcggattggtggaggtgggcacatgctgtggtcaccctccacagcctgtgggtggagagaatgacagtccctggtcagctgtggcaccctgtcaacagtgggactttctggctccatttacttgcctacggcagcagtcagcaacatgatctactccatcctgcccacaggttgtgtgtgaggctcaggaaagtcagaggggcacagatgacagtcactactactaagagtccttcagcattgttaatccctcaaccttagttttcagcctgggttggcctaacccctaactgcatgttcctaagataatcctggggcttgctcacatgcagttgcttccaggacccctacagggccagaatcctcattccagtgacactaacagacatggccaggctacaggtaacag

SEQ ID NO: 387909 - DNA, 478 bp, Homo sapiens
ctctgccttccgggtccaagcaattctcctgcctcagactccccgagtctgggattacaggcgtgctccacgatgcctggctaattttttgtatcttttgtagagacgcgctttcaccactgcgccgggccaattgttattattttttttatggaagacggggcccgtgaaggccagagggccaacggcccatgaaaggcccagcgcagcccaggttagagagatgtgatttcaaaacagactcattatttataaccatcagctcctggacaagccaagtcccttctccaagcctgcttcctaatctataaagtggaggatatctggagctaccttattgaacacagaaggagtaagtggataaaggtgtgccagcgcccagcacagtgcctgccacaaagtaggcattccatcaaagaccaatcttacaaaaacgaaatctggtcctaagagcaccttagaaagagtcacactgctg

SEQ ID NO: 387910 - DNA, 441 bp, Homo sapiens
caaaactctgtctcaaaaataaataaataaataaaataaaaataaataagaattaaaaattttaaaaaaagacatgagttactggtttcaggtacacagtctttaaaatgttaggttgtttcttttgatttttattttattttattttattttattttattttattttattttattttatttattttattttatatttatttttgagatagggtctcactctgaccccaggcttgagtgcagtggcacgatctctcaccacagcctcaacctcccaggttcaagcgatccttgcacctcagcctcctgagtagctgggactacaggtgtgccccaccaccctggctaatttttgtatttttttgcagagacagggttttgccacattgcccaggctggtctcgaactcctgagctccagcaatccacctgccttggcctgc

SEQ ID NO: 387911 - DNA, 450 bp, Homo sapiens
aggaatcaggagacattcacaggactggggctaatcagaagttgacatggtggattagcatccaagatggagtcacttttgtctccacatatacagagtattttattatgtgccatgccttctgtaagtgtctgtgactcatttaatcctcaaaattgccatataaagtagattatattattctttcattcttacagatggaaaagttttccctgttttattccttgcctgatgagttctttatcttgtacccattatagaaaacttttcctagtcacccaattctagtttagagatacatgatatatttttacagcatatagcatttccttggctactacaattccattataattatctgttggtttgtatcatccactagactataaaccttgtgagggcaaacactgggccaattttaaggacactattatgttcttaacggaagac

SEQ ID NO: 387912 - DNA, 4819 bp, Homo sapiens
cggtgaggctcgcgctcgagctgcggcgccggctcctgccgcctgggccccgggcccggcccctcccgcgccgcccgggcgatgagaagctgcttctgcgtgagacggagccgggacccgccgccgccgcagccaccgccgccgccgccccagcggggaacagaccagtccaccatgcctgaagtcaaagacctctcagaagccttgccagaaacgtcaatggatcccatcacgggagtcggggtggtggcttctcggaaccgagccccgacaggctatgacgtagttgcacagacagcagatggtgtggatgctgacctctggaaagacggcttatttaaatccaaggttaccagatacctgtgtttcacaagatcattttccaaagaaaatagtcatctggggaacgtgttagtagatatgaagctcattgacatcaaggacacactgcctgtgggcttcatcccaattcaggagacggtggacacacaggaagtggcttttaggaagaagaggctgtgcattaaatttattccacgggattcaacggaagctgcgatttgtgacattcggatcatgggccggaccaagcaggccccgcctcagtacacgtttattggggaactgaacagcatggggatctggtatcgaatgggcagagtaccaagaaatcatgactcatctcaacccacaacgccttcccagtcatcagctgcctccaccccagcccccaaccttcccaggcacatctccctaacacttcctgccaccttccgaggcaggaacagcacccggacggactacgagtaccagcactccaatttgtatgccatatcagcaatggatggtgtgccttttatgatttcagagaagttttcttgtgttccagaaagtatgcagccctttgatctcctgggaatcaccatcaaatctctagcagaaatcgaaaaagagtacgagtacagcttccgcacagagcagagcgcagccgccaggctcccgcccagccccaccaggtgtcagcagatcccgcagtcctgaggagccagcggccacctgcggggagaccaccgccgcccagactactgacggcaggggctgctgcccccgcctcctcctgccgcctccgccagccctccctcccacactgccccagcagggctggcccggagactgggcagctaagtgggcgcatcctgtcttcagctggcctgactgacaccccggcctccctggggacattgttcataaccatgactaatctgtgtgtgctgtagtgaccagcggctcctaacgtgtctgtgtgatgaccagttgtcctccaaaaacctcactcaccacggagtcaccctgagggccccgggcagttgccctggccgcccagtgacgcccaccggctccctccgctccctcctgtcacctaccagggcagaccccactaagccgttgagtctcttcctggaagaccctgagggccggcagctttgcctaggactctccagggtcgctgatcctccccggcccagggctgccaggaacaagttcctctctgcaggatctcacagcagccctgagaagacatgggaggaagaagccagtggccctggggtggaccctgccctttggacatcccatggacttgtcacccagtcgcctggaagtcggggagcagcacccctgcccccggtggaggggttgttgctttctggggaggaggacggttgacggccctgcttggatccaccaccaggacgctgtgctcggccatggcgcgcctcccccaagggctcatctgtgcaacaaccacatgccaacaatagctccaggtgcctcagccccgtgccctgacccggggaccacagggacaccctctgagacgtgctggccccaggaggatacaggcacacgggcacccagcccctctcagagccaggcgtgtcttgacggtatctgctgacgggaacaagtcattctgaaaggtccctctgacccaggtcaccaaatttgggccagaactggcacttccgagtgcccactggtgctggcgtcctcaaagtgccgggcgccaagttcagccccaggtgcgtttgcctaggcagtggtggctgccatccctcggggcccaggccctcacccgaagggctgcctcactctgtggtgtcaggcactgggctgtgtcctgattcctcagagtatggggacctgacatctttgggtccccaagagttggctcttggatgtggaggcttgatgctgcggttgggggctgcactacctgcgtccgtggaagcctctgcctcagcggggacggcctcctgctgcaggtcctgggcagcccacagtagtgctagctgaggcccagaggaacgggaggaaagggaggcagcgccggacggcgcagctggccaagaggcgggcggggccagaaatacctcatgcccctgcaccagcccctccgtctccaggccccaggcctctttgtggacccatcttcctcctctgccaccccgatcttcactcggatacctcttgatttctgtggataagggaagcggccacttctccctccctgagacccgaggatgcccctggtgggggtggccttctcaggactcctgggtggcacagcagcaggaccttgtcatgggactgatgctgagcagggagggggctgccaggctggctgccgatgctccgttcacataagccagtgtggttctggggacctgaggagccctgtggcacccacagggggcacctatgtctgccgtggctcctcgggtggtgccctgtgtgacaaagcccaacagcaagggtgactcctggcaggtgggggcagcaggagggcagagggcagagctctggccacttctgcccacttcattagggtttgtgaactttgtccttcacctcttttcgtgccctggttgtgagattgcctctaacaggtaatgccaggggcccttcactccgcccccatgactgggaagaggcctgtggcagcgccgctggaccctaggaggctcagaggcagtggtgtgggagccctgtctgcaaggacgcagaataagcagtgagggcggctgcaggagaggaaggggctcccacagcccccactgatgccgctgcaggcccctgtcgagctggggtcccagccaggtgcccccgcatgccctcctgcagttgctggatggatagggacaccaggaagaggacaaactgcatggactcaagcgagctggagccatcttctccatagcattacggacttagcataagagtaaatgactgtgaacgttgtagtaaacggcagcttaagataagtaagcagagacagtgttaaggacgagttggtgtctgtggtagcttttaggctgctcctaacccaccatttattgccttctgagaggtgggtgaggacaagcatgtgcctgtgtgtgtgtgtgtgtgtgtgtgtatatgtgtgtgtgtgcacgcacatgcgtgtggtataagcccacctgagtggggctcgtgcaggagaactgaggcatgaaactctggctcaaacctaggaattgagagcgtttctgtcttttgggagagtacttttctccacgagccctctggccactgtgggagggaaggacaagggttcccttggaaatgtgaagggtcttggcctcatccctcaggtccccccacagcacttcccactactgcttctgtccctgctggcagcctctgtccctccagaacggctaaccagagcacactgtccccaccgcctcccctttctctctggaaagttgaagtatctccaaaggccttggaaatggcacaaaggtgataaggagcaggtgctttgctgcagtctcccttgcaaatgtataattaaggcctttcttcccaccccaagtccaagaacaaatgccagccacgtcctccgccacttggagagatgagaacccagtggggtcacgtaaaggaattgcaggtcggtgagaggacaagagggactcccatgttctaagcacctgttcctggccaggctctaggccaggctctctaagcacatttctcctttcattccccctaaaaacagagtgacctggaagtagatgttctttgctccttgtcagagttgaagaggctgacttggcccactgctaagcggcagaggcagggccagccatcctgtcgcaagcccgtgctggggctgccctttctgtttccagtccagttacggacttcccggccgccactgggccctgccggtcaccaggccactgtgcagtgggcgcagagcatggtcaggagtggcctgcccgtactcctccacccagatgagggccctccagagcctgcaggcatctgtggggaatcccagcctgcaggttcttggagaagcaggtgaacctaaggatgaaagcaaaggagggccttgaggaagcagcccccaggcctggcagccacgcagcggctgagctcatgaacttggttcgcagcctgccttgcccctggaggccacgccaggcgctcacccctgagcccacagcccctgcttgggctgcctggcaccctcagggtggcccggcctcctcctgccactctgagcacatgtccgggggttgccaccagagacggctttgttctcccagctaaggccgtggagctgctgtgtgactgtgtcaggcctggacaaggaagacccttagggatgacgtccccgctgcatatttattcaaggtgactcttgtacttggcaagggaagtccactgtgtgattgtctgtattcttaatataatttgttaaataaacgtttgttttaacctcttt

SEQ ID NO: 387913 - DNA, 2366 bp, Homo sapiens
cggtgaggctcgcgctcgagctgcggcgccggctcctgccgcctgggccccgggcccggcccctcccgcgccgcccgggcgatgagaagctgcttctgcgtgagacggagccgggacccgccgccgccgcagccaccgccgccgccgccccagcggggaacagaccagtccaccatgcctgaagtcaaagacctctcagaagccttgccagaaacgtcaatggatcccatcacgggagtcggggtggtggcttctcggaaccgagccccgacaggctatgacgtagttgcacagacagcagatggtgtggatgctgacctctggaaagacggcttatttaaatccaaggttaccagatacctgtgtttcacaagatcattttccaaagaaaatagtcatctggggaacgtgttagtagatatgaagctcattgacatcaaggacacactgcctgtgggcttcatcccaattcaggagacggtggacacacaggaagtggcttttaggaagaagaggctgtgcattaaatttattccacgggattcaacggaagctgcgatttgtgacattcggatcatgggccggaccaagcaggccccgcctcagtacacgtttattggggaactgaacagcatggggatctggtatcgaatgggcagagtaccaagaaatcatgactcatctcaacccacaacgccttcccagtcatcagctgcctccaccccagcccccaaccttcccaggcacatctccctaacacttcctgccaccttccgaggcaggaacagcacccggacggactacgagtaccagcactccaatttgtatgccatatcagcaatggatggtgtgccttttatgatttcagagaagttttcttgtgttccagaaagtatgcagccctttgatctcctgggaatcaccatcaaatctctagcagaaatcgaaaaagagtacgagtacagcttccgcacagagcagagcgcagccgccaggctcccgcccagccccaccaggtgtcagcagatcccgcagtcctgaggagccagcggccacctgcggggagaccaccgccgcccagactactgacggcaggggctgctgcccccgcctcctcctgccgcctccgccagccctccctcccacactgccccagcagggctggcccggagactgggcagctaagtgggcgcatcctgtcttcagctggcctgactgacaccccggcctccctggggacattgttcataaccatgactaatctgtgtgtgctgtagtgaccagcggctcctaacgtgtctgtgtgatgaccagttgtcctccaaaaacctcatcctggcaggtgggggcagcaggagggcagagggcagagctctggccacttctgcccacttcattagggtttgtgaactttgtccttcacctcttttcgtgccctggttgtgagattgcctctaacaggtaatgccaggggcccttcactccgcccccatgactgggaagaggcctgtggcagcgccgctggaccctaggaggctcagaggcagtggtgtgggagccctgtctgcaaggacgcagaataagcagtgagggcggctgcaggagaggaaggggctcccacagcccccactgatgccgctgcaggcccctgtcgagctggggtcccagccaggtgcccccgcatgccctcctgcagttgctggatggatagggacaccaggaagaggacaaactgcatggactcaagcgagctggagccatcttctccatagcattacggacttagcataagagtaaatgactgtgaacgttgtagtaaacggcagcttaagataagtaagcagagacagtgttaaggacgagttggtgtctgtggtagcttttaggctgctcctaacccaccatttattgccttctgagaggtgggtgaggacaagcatgtgcctgtgtgtgtgtgtgtgtgtgtgtgtatatgtgtgtgtgtgcacgcacatgcgtgtggtataagcccacctgagtggggctcgtgcaggagaactgaggcatgaaactctggctcaaacctaggaattgagagcgtttctgtcttttgggagagtacttttctccacgagccctctggccactgtgggagggaaggacaagggttcccttggaaatgtgaagggtcttggcctcatccctcaggtccccccacagcacttcccactactgcttctgtccctggacaaggaagacccttagggatgacgtccccgctgcatatttattcaaggtgactcttgtacttggcaagggaagtccactgtgtgattgtctgtattcttaatataatttgttaaataaacgtttgttttaacctcttt

SEQ ID NO: 387914 - DNA, 4590 bp, Homo sapiens
cccacgcgtccggacccacgcgtccgcggaaccgagccccgacaggctatgacgtagttgcacagacagcagatggtgtggatgctgacctctggaaagacggcttatttaaatccaaggttaccagatacctgtgtttcacaagatcattttccaaagaaaatagtcatctggggaacgtgttagtagatatgaagctcattgacatcaaggacacactgcctgtgggcttcatcccaattcaggagacggtggacacacaggaagtggcttttaggaagaagaggctgtgcattaaatttattccacgggattcaacggaagctgcgatttgtgacattcggatcatgggccggaccaagcaggccccgcctcagtacacgtttattggggaactgaacagcatggggatctggtatcgaatgggcagagtaccaagaaatcatgactcatctcaacccacaacgccttcccagtcatcagctgcctccaccccagcccccaaccttcccaggcacatctccctaacacttcctgccaccttccgaggcaggaacagcacccggacggactacgagtaccagcactccaatttgtatgccatatcagcaatggatggtgtgccttttatgatttcagagaagttttcttgtgttccagaaagtatgcagccctttgatctcctgggaatcaccatcaaatctctagcagaaatcgaaaaagagtacgagtacagcttccgcacagagcagagcgcagccgccaggctcccgcccagccccaccaggtgtcagcagatcccgcagtcctgaggagccagcggccacctgcggggagaccaccgccgcccagactactgacggcaggggctgctgcccccgcctcctcctgccgcctccgccagccctccctcccacactgccccagcagggctggcccggagactgggcagctaagtgggcgcatcctgtcttcagctggcctgactgacaccccggcctccctggggacattgttcataaccatgactaatctgtgtgtgctgtagtgaccagcggctcctaacgtgtctgtgtgatgaccagttgtcctccaaaaacctcactcaccacggagtcaccctgagggccccgggcagttgccctggccgcccagtgacgcccaccggctccctccgctccctcctgtcacctaccagggcagaccccactaagccgttgagtctcttcctggaagaccctgagggccggcagctttgcctaggactctccagggtcgctgatcctccccggcccagggctgccaggaacaagttcctctctgcaggatctcacagcagccctgagaagacatgggaggaagaagccagtggccctggggtggaccctgccctttggacatcccatggacttgtcacccagtcgcctggaagtcggggagcagcacccctgcccccggtggaggggttgttgctttctggggaggaggacggttgacggccctgcttggatccaccaccaggacgctgtgctcggccatggcgcgcctcccccaagggctcatctgtgcaacaaccacatgccaacaatagctccaggtgcctcagccccgtgccctgacccggggaccacagggacaccctctgagacgtgctggccccaggaggatacaggcacacgggcacccagcccctctcagagccaggcgtgtcttgacggtatctgctgacgggaacaagtcattctgaaaggtccctctgacccaggtcaccaaatttgggccagaactggcacttccgagtgcccactggtgctggcgtcctcaaagtgccgggcgccaagttcagccccaggtgcgtttgcctaggcagtggtggctgccatccctcggggcccaggccctcacccgaagggctgcctcactctgtggtgtcaggcactgggctgtgtcctgattcctcagagtatggggacctgacatctttgggtccccaagagttggctcttggatgtggaggcttgatgctgcggttgggggctgcactacctgcgtccgtggaagcctctgcctcagcggggacggcctcctgctgcaggtcctgggcagcccacagtagtgctagctgaggcccagaggaacgggaggaaagggaggcagcgccggacggcgcagctggccaagaggcgggcggggccagaaatacctcatgcccctgcaccagcccctccgtctccaggccccaggcctctttgtggacccatcttcctcctctgccaccccgatcttcactcggatacctcttgatttctgtggataagggaagcggccacttctccctccctgagacccgaggatgcccctggtgggggtggccttctcaggactcctgggtggcacagcagcaggaccttgtcatgggactgatgctgagcagggagggggctgccaggctggctgccgatgctccgttcacataagccagtgtggttctggggacctgaggagccctgtggcacccacagggggcacctatgtctgccgtggctcctcgggtggtgccctgtgtgacaaagcccaacagcaagggtgactcctggcaggtgggggcagcaggagggcagagggcagagctctggccacttctgcccacttcattagggtttgtgaactttgtccttcacctcttttcgtgccctggttgtgagattgcctctaacaggtaatgccaggggcccttcactccgcccccatgactgggaagaggcctgtggcagcgccgctggaccctaggaggctcagaggcagtggtgtgggagccctgtctgcaaggacgcagaataagcagtgagggcggctgcaggagaggaaggggctcccacagcccccactgatgccgctgcaggcccctgtcgagctggggtcccagccaggtgcccccgcatgccctcctgcagttgctggatggatagggacaccaggaagaggacaaactgcatggactcaagcgagctggagccatcttctccatagcattacggacttagcataagagtaaatgactgtgaacgttgtagtaaacggcagcttaagataagtaagcagagacagtgttaaggacgagttggtgtctgtggtagcttttaggctgctcctaacccaccatttattgccttctgagaggtgggtgaggacaagcatgtgcctgtgtgtgtgtgtgtgtgtgtgtgtatatgtgtgtgtgtgcacgcacatgcgtgtggtataagcccacctgagtggggctcgtgcaggagaactgaggcatgaaactctggctcaaacctaggaattgagagcgtttctgtcttttgggagagtacttttctccacgagccctctggccactgtgggagggaaggacaagggttcccttggaaatgtgaagggtcttggcctcatccctcaggtccccccacagcacttcccactactgcttctgtccctgctggcagcctctgtccctccagaacggctaaccagagcacactgtccccaccgcctcccctttctctctggaaagttgaagtatctccaaaggccttggaaatggcacaaaggtgataaggagcaggtgctttgctgcagtctcccttgcaaatgtataattaaggcctttcttcccaccccaagtccaagaacaaatgccagccacgtcctccgccacttggagagatgagaacccagtggggtcacgtaaaggaattgcaggtcggtgagaggacaagagggactcccatgttctaagcacctgttcctggccaggctctaggccaggctctctaagcacatttctcctttcattccccctaaaaacagagtgacctggaagtagatgttctttgctccttgtcagagttgaagaggctgacttggcccactgctaagcggcagaggcagggccagccatcctgtcgcaagcccgtgctggggctgccctttctgtttccagtccagttacggacttcccggccgccactgggccctgccggtcaccaggccactgtgcagtgggcgcagagcatggtcaggagtggcctgcccgtactcctccacccagatgagggccctccagagcctgcaggcatctgtggggaatcccagcctgcaggttcttggagaagcaggtgaacctaaggatgaaagcaaaggagggccttgaggaagcagcccccaggcctggcagccacgcagcggctgagctcatgaacttggttcgcagcctgccttgcccctggaggccacgccaggcgctcacccctgagcccacagcccctgcttgggctgcctggcaccctcagggtggcccggcctcctcctgccactctgagcacatgtccgggggttgccaccagagacggctttgttctcccagctaaggccgtggagctgctgtgtgactgtgtcaggcctggacaaggaagacccttagggatgacgtccccgctgcatatttattcaaggtgactcttgtacttggcaagggaagtccactgtgtgattgtctgtattcttaatataatttgttaaataaacgtttgttttaacctcttt

SEQ ID NO: 387915 - DNA, 5442 bp, Homo sapiens
gtgatttgactctggctggtcaccaggtaatctgtccaaagttcagaaggtgtcaggatgctatcctgaggctccacagtgacagcctctcagtctgtgcactgtcccccacgggtggccccaaagccagctgcccatttaactgggcacagcatggacactggcctcagctctcagccttctgaggaggaccagtccaccatgcctgaagtcaaagacctctcagaagccttgccagaaacgtcaatggatcccatcacgggagtcggggtggtggcttctcggaaccgagccccgacaggctatgacgtagttgcacagacagcagatggtgtggatgctgacctctggaaagacggcttatttaaatccaaggttaccagatacctgtgtttcacaagatcattttccaaagaaaatagtcatctggggaacgtgttagtagatatgaagctcattgacatcaaggacacactgcctgtgggcttcatcccaattcaggagacggtggacacacaggaagtggcttttaggaagaagaggctgtgcattaaatttattccacgggattcaacggaagctgcgatttgtgacattcggatcatgggccggaccaagcaggccccgcctcagtacacgtttattggggaactgaacagcatggggatctggtatcgaatgggcagagtaccaagaaatcatgactcatctcaacccacaacgccttcccagtcatcagctgcctccaccccagcccccaaccttcccaggcacatctccctaacacttcctgccaccttccgaggcaggaacagcacccggacggactacgagtaccagcactccaatttgtatgccatatcagcaatggatggtgtgccttttatgatttcagagaagttttcttgtgttccagaaagtatgcagccctttgatctcctgggaatcaccatcaaatctctagcagaaatcgaaaaagagtacgagtacagcttccgcacagagcagagcgcagccgccaggctcccgcccagccccaccaggtgtcagcagatcccgcagtcctgaggagccagcggccacctgcggggagaccaccgccgcccagactactgacggcaggggctgctgcccccgcctcctcctgccgcctccgccagccctccctcccacactgccccagcagggctggcccggagactgggcagctaagtgggcgcatcctgtcttcagctggcctgactgacaccccggcctccctggggacattgttcataaccatgactaatctgtgtgtgctgtagtgaccagcggctcctaacgtgtctgtgtgatgaccagttgtcctccaaaaacctcactcaccacggagtcaccctgagggccccgggcagttgccctggccgcccagtgacgcccaccggctccctccgctccctcctgtcacctaccagggcagaccccactaagccgttgagtctcttcctggaagaccctgagggccggcagctttgcctaggactctccagggtcgctgatcctccccggcccagggctgccaggaacaagttcctctctgcaggatctcacagcagccctgagaagacatgggaggaagaagccagtggccctggggtggaccctgccctttggacatcccatggacttgtcacccagtcgcctggaagtcggggagcagcacccctgcccccggtggaggggttgttgctttctggggaggaggacggttgacggccctgcttggatccaccaccaggacgctgtgctcggccatggcgcgcctcccccaagggctcatctgtgcaacaaccacatgccaacaatagctccaggtgcctcagccccgtgccctgacccggggaccacagggacaccctctgagacgtgctggccccaggaggatacaggcacacgggcacccagcccctctcagagccaggcgtgtcttgacggtatctgctgacgggaacaagtcattctgaaaggtccctctgacccaggtcaccaaatttgggccagaactggcacttccgagtgcccactggtgctggcgtcctcaaagtgccgggcgccaagttcagccccaggtgcgtttgcctaggcagtggtggctgccatccctcggggcccaggccctcacccgaagggctgcctcactctgtggtgtcaggcactgggctgtgtcctgattcctcagagtatggggacctgacatctttgggtccccaagagttggctcttggatgtggaggcttgatgctgcggttgggggctgcactacctgcgtccgtggaagcctctgcctcagcggggacggcctcctgctgcaggtcctgggcagcccacagtagtgctagctgaggcccagaggaacgggaggaaagggaggcagcgccggacggcgcagctggccaagaggcgggcggggccagaaatacctcatgcccctgcaccagcccctccgtctccaggccccaggcctctttgtggacccatcttcctcctctgccaccccgatcttcactcggatacctcttgatttctgtggataagggaagcggccacttctccctccctgagacccgaggatgcccctggtgggggtggccttctcaggactcctgggtggcacagcagcaggaccttgtcatgggactgatgctgagcagggagggggctgccaggctggctgccgatgctccgttcacataagccagtgtggttctggggacctgaggagccctgtggcacccacagggggcacctatgtctgccgtggctcctcgggtggtgccctgtgtgacaaagcccaacagcaagggtgactcctggcaggtgggggcagcaggagggcagagggcagagctctggccacttctgcccacttcattagggtttgtgaactttgtccttcacctcttttcgtgccctggttgtgagattgcctctaacaggtaatgccaggggcccttcactccgcccccatgactgggaagaggcctgtggcagcgccgctggaccctaggaggctcagaggcagtggtgtgggagccctgtctgcaaggacgcagaataagcagtgagggcggctgcaggagaggaaggggctcccacagcccccactgatgccgctgcaggcccctgtcgagctggggtcccagccaggtgcccccgcatgccctcctgcagttgctggatggatagggacaccaggaagaggacaaactgcatggactcaagcgagctggagccatcttctccatagcattacggacttagcataagagtaaatgactgtgaacgttgtagtaaacggcagcttaagataagtaagcagagacagtgttaaggacgagttggtgtctgtggtagcttttaggctgctcctaacccaccatttattgccttctgagaggtgggtgaggacaagcatgtgcctgtgtgtgtgtgtgtgtgtgtgtgtatatgtgtgtgtgtgcacgcacatgcgtgtggtataagcccacctgagtggggctcgtgcaggagaactgaggcatgaaactctggctcaaacctaggaattgagagcgtttctgtcttttgggagagtacttttctccacgagccctctggccactgtgggagggaaggacaagggttcccttggaaatgtgaagggtcttggcctcatccctcaggtccccccacagcacttcccactactgcttctgtccctgctggcagcctctgtccctccagaacggctaaccagagcacactgtccccaccgcctcccctttctctctggaaagttgaagtatctccaaaggccttggaaatggcacaaaggtgataaggagcaggtgctttgctgcagtctcccttgcaaatgtataattaaggcctttcttcccaccccaagtccaagaacaaatgccagccacgtcctccgccacttggagagatgagaacccagtggggtcacgtaaaggaattgcaggtcggtgagaggacaagagggactcccatgttctaagcacctgttcctggccaggctctaggccaggctctctaagcacatttctcctttcattccccctaaaaacagagtgacctggaagtagatgttctttgctccttgtcagagttgaagaggctgacttggcccactgctaagcggcagaggcagggccagccatcctgtcgcaagcccgtgctggggctgccctttctgtttccagtccagttacggacttcccggccgccactgggccctgccggtcaccaggccactgtgcagtgggcgcagagcatggtcaggagtggcctgcccgtactcctccacccagatgagggccctccagagcctgcaggcatctgtggggaatcccagcctgcaggttcttggagaagcaggtgaacctaaggatgaaagcaaaggagggccttgaggaagcagcccccaggcctggcagccacgcagcggctgagctcatgaacttggttcgcagcctgccttgcccctggaggccacgccaggcgctcacccctgagcccacagcccctgcttgggctgcctggcaccctcagggtggcccggcctcctcctgccactctgagcacatgtccgggggttgccaccagagacggctttgttctcccagctaaggccgtggagctgctgtgtgactgtgtcaggcctggacaaggaagacccttagggatgacgtccccgctgcatatttattcaaggtgactcttgtacttggcaagggaagtccactgtgtgattgtctgtattcttaatataatttgttaaataaacgtttgttttaacctctttaaaaaaaaaaaacacaaaaaaacaacaacaaaacaaacaaacaagagagggaggagacagaaaagaagaagaacaccaccctgaagggacaccacaaaacactaaccgacagtcgcggcggcgctacatcagggaaacacacgcgccggcgccgccgcgaccggcgagggccgagactacaaccaccgagcttattatttatgagagcacacaccgcgtggtgtacaccaacacacgagacgcgagacgcgtcgtgaaaaaaaccatgtcgcgagagcccgcgacgagcgcacctcctggtagatacgacaggcgcagccgaccgttgacaagctcggactagacaagagatgcgttgcacccccaactaacgtgggggcgaccaccataatgttcgagcacacaaacaagccatctcattattaaacggggcgcctatgagaggaggatcaaccatattggtgtcatggacagacgtcctatcgacacgagctggtgatcaaaaaggcaggggtgtgattccacccaccagctgccgcatgcggcggaaatgattgtacgcagcaagccgccgttcagcagaagagtattagagg

SEQ ID NO: 387916 - DNA, 4994 bp, Homo sapiens
gtgatttgactctggctggtcaccaggtaatctgtccaaagttcagaaggtgtcaggatgctatcctgaggctccacagtgacagcctctcagtctgtgcactgtcccccacgggtggccccaaagccagctgcccatttaactgggcacagcatggacactggcctcagctctcagccttctgaggaggaccagtccaccatgcctgaagtcaaagacctctcagaagccttgccagaaacgtcaatggatcccatcacgggagtcggggtggtggcttctcggaaccgagccccgacaggctatgacgtagttgcacagacagcagatggtgtggatgctgacctctggaaagacggcttatttaaatccaaggttaccagatacctgtgtttcacaagatcattttccaaagaaaatagtcatctggggaacgtgttagtagatatgaagctcattgacatcaaggacacactgcctgtgggcttcatcccaattcaggagacggtggacacacaggaagtggcttttaggaagaagaggctgtgcattaaatttattccacgggattcaacggaagctgcgatttgtgacattcggatcatgggccggaccaagcaggccccgcctcagtacacgtttattggggaactgaacagcatggggatctggtatcgaatgggcagagtaccaagaaatcatgactcatctcaacccacaacgccttcccagtcatcagctgcctccaccccagcccccaaccttcccaggcacatctccctaacacttcctgccaccttccgaggcaggaacagcacccggacggactacgagtaccagcactccaatttgtatgccatatcagcaatggatggtgtgccttttatgatttcagagaagttttcttgtgttccagaaagtatgcagccctttgatctcctgggaatcaccatcaaatctctagcagaaatcgaaaaagagtacgagtacagcttccgcacagagcagagcgcagccgccaggctcccgcccagccccaccaggtgtcagcagatcccgcagtcctgaggagccagcggccacctgcggggagaccaccgccgcccagactactgacggcaggggctgctgcccccgcctcctcctgccgcctccgccagccctccctcccacactgccccagcagggctggcccggagactgggcagctaagtgggcgcatcctgtcttcagctggcctgactgacaccccggcctccctggggacattgttcataaccatgactaatctgtgtgtgctgtagtgaccagcggctcctaacgtgtctgtgtgatgaccagttgtcctccaaaaacctcactcaccacggagtcaccctgagggccccgggcagttgccctggccgcccagtgacgcccaccggctccctccgctccctcctgtcacctaccagggcagaccccactaagccgttgagtctcttcctggaagaccctgagggccggcagctttgcctaggactctccagggtcgctgatcctccccggcccagggctgccaggaacaagttcctctctgcaggatctcacagcagccctgagaagacatgggaggaagaagccagtggccctggggtggaccctgccctttggacatcccatggacttgtcacccagtcgcctggaagtcggggagcagcacccctgcccccggtggaggggttgttgctttctggggaggaggacggttgacggccctgcttggatccaccaccaggacgctgtgctcggccatggcgcgcctcccccaagggctcatctgtgcaacaaccacatgccaacaatagctccaggtgcctcagccccgtgccctgacccggggaccacagggacaccctctgagacgtgctggccccaggaggatacaggcacacgggcacccagcccctctcagagccaggcgtgtcttgacggtatctgctgacgggaacaagtcattctgaaaggtccctctgacccaggtcaccaaatttgggccagaactggcacttccgagtgcccactggtgctggcgtcctcaaagtgccgggcgccaagttcagccccaggtgcgtttgcctaggcagtggtggctgccatccctcggggcccaggccctcacccgaagggctgcctcactctgtggtgtcaggcactgggctgtgtcctgattcctcagagtatggggacctgacatctttgggtccccaagagttggctcttggatgtggaggcttgatgctgcggttgggggctgcactacctgcgtccgtggaagcctctgcctcagcggggacggcctcctgctgcaggtcctgggcagcccacagtagtgctagctgaggcccagaggaacgggaggaaagggaggcagcgccggacggcgcagctggccaagaggcgggcggggccagaaatacctcatgcccctgcaccagcccctccgtctccaggccccaggcctctttgtggacccatcttcctcctctgccaccccgatcttcactcggatacctcttgatttctgtggataagggaagcggccacttctccctccctgagacccgaggatgcccctggtgggggtggccttctcaggactcctgggtggcacagcagcaggaccttgtcatgggactgatgctgagcagggagggggctgccaggctggctgccgatgctccgttcacataagccagtgtggttctggggacctgaggagccctgtggcacccacagggggcacctatgtctgccgtggctcctcgggtggtgccctgtgtgacaaagcccaacagcaagggtgactcctggcaggtgggggcagcaggagggcagagggcagagctctggccacttctgcccacttcattagggtttgtgaactttgtccttcacctcttttcgtgccctggttgtgagattgcctctaacaggtaatgccaggggcccttcactccgcccccatgactgggaagaggcctgtggcagcgccgctggaccctaggaggctcagaggcagtggtgtgggagccctgtctgcaaggacgcagaataagcagtgagggcggctgcaggagaggaaggggctcccacagcccccactgatgccgctgcaggcccctgtcgagctggggtcccagccaggtgcccccgcatgccctcctgcagttgctggatggatagggacaccaggaagaggacaaactgcatggactcaagcgagctggagccatcttctccatagcattacggacttagcataagagtaaatgactgtgaacgttgtagtaaacggcagcttaagataagtaagcagagacagtgttaaggacgagttggtgtctgtggtagcttttaggctgctcctaacccaccatttattgccttctgagaggtgggtgaggacaagcatgtgcctgtgtgtgtgtgtgtgtgtgtgtgtatatgtgtgtgtgtgcacgcacatgcgtgtggtataagcccacctgagtggggctcgtgcaggagaactgaggcatgaaactctggctcaaacctaggaattgagagcgtttctgtcttttgggagagtacttttctccacgagccctctggccactgtgggagggaaggacaagggttcccttggaaatgtgaagggtcttggcctcatccctcaggtccccccacagcacttcccactactgcttctgtccctgctggcagcctctgtccctccagaacggctaaccagagcacactgtccccaccgcctcccctttctctctggaaagttgaagtatctccaaaggccttggaaatggcacaaaggtgataaggagcaggtgctttgctgcagtctcccttgcaaatgtataattaaggcctttcttcccaccccaagtccaagaacaaatgccagccacgtcctccgccacttggagagatgagaacccagtggggtcacgtaaaggaattgcaggtcggtgagaggacaagagggactcccatgttctaagcacctgttcctggccaggctctaggccaggctctctaagcacatttctcctttcattccccctaaaaacagagtgacctggaagtagatgttctttgctccttgtcagagttgaagaggctgacttggcccactgctaagcggcagaggcagggccagccatcctgtcgcaagcccgtgctggggctgccctttctgtttccagtccagttacggacttcccggccgccactgggccctgccggtcaccaggccactgtgcagtgggcgcagagcatggtcaggagtggcctgcccgtactcctccacccagatgagggccctccagagcctgcaggcatctgtggggaatcccagcctgcaggttcttggagaagcaggtgaacctaaggatgaaagcaaaggagggccttgaggaagcagcccccaggcctggcagccacgcagcggctgagctcatgaacttggttcgcagcctgccttgcccctggaggccacgccaggcgctcacccctgagcccacagcccctgcttgggctgcctggcaccctcagggtggcccggcctcctcctgccactctgagcacatgtccgggggttgccaccagagacggctttgttctcccagctaaggccgtggagctgctgtgtgactgtgtcaggcctggacaaggaagacccttagggatgacgtccccgctgcatatttattcaaggtgactcttgtacttggcaagggaagtccactgtgtgattgtctgtattcttaatataatttgttaaataaacgtttgttttaacctctttctcaaaaaaaaaaaaaaaaaaacttgaggggggggccccggtacccaaattggccctataggtgaggccgtaattacaatttaactgggccggtcgttttaacaactttccgggactggggaaatacccctgggcgggttacccacaa

SEQ ID NO: 387917 - DNA, 1084 bp, Homo sapiens
  misc_feature (11)..(11): n is a, c, g, or t
ctagaggatcncctgtgtgctctggttagccgttctggagggacagaggctgccagcagggacagcagcagtagtgggaagtgctgtggggtgataaggagcaggtgctttgctgcagtctcccttgcaaatgtataattaaggcctttcttcccaccccaagtccaagaacaaatgccagccacgtcctccgccacttggagagatgagaacccagtggggtcacgtaaaggaattgcaggtcggtgagaggacaagagggactcccatgttctaagcacctgttcctggccaggctctaggccaggctctctaagcacatttctcctttcattccccctaaaaacagagtgacctggaagtagatgttctttgctccttgtcagagttgaagaggctgacttggcccactgctaagcggcagaggcagggccagccatcctgtcgcaagcccgtgctggggctgccctttctgtttccagtccagttacggacttcccggccgccactgggccctgccggtcaccaggccactgtgcagtgggcgcagagcatggtcaggagtggcctgcccgtactcctccacccagatgagggccctccagagcctgcaggcatctgtggggaatcccagcctgcaggttcttggagaagcaggtgaacctaaggatgaaagcaaaggagggccttgaggaagcagcccccaggcctggcagccacgcagcggctgagctcatgaacttggttcgcagcctgccttgcccctggaggccacgccaggcgctcacccctgagcccacagcccctgcttgggctgcctggcaccctcagggtggcccggcctcctcctgccactctgagcacatgtccgggggttgccaccagagacggctttgttctcccagctaaggccgtggagctgctgtgtgactgtgtcaggcctggacaaggaagacccttagggatgacgtccccgctgcatatttattcaaggtgactcttgtacttggcaagggaagtccactgtgtgattgtctgtattcttaatataatttgttaaataaacgtttgttttaacctcttt

SEQ ID NO: 387918 - DNA, 4581 bp, Homo sapiens
gtgatttgactctggctggtcaccaggtaatctgtccaaagttcagaaggtgtcaggatgctatcctgaggctccacagtgacagcctctcagtctgtgcactgtcccccacgggtggccccaaagccagctgcccatttaactgggcacagcatggacactggcctcagctctcagccttctgaggaggaccagtccaccatgcctgaagtcaaagacctctcagaagccttgccagaaacgtcaatggatcccatcacgggagtcggggtggtggcttctcggaaccgagccccgacaggctatgacgtagttgcacagacagcagatggtgtggatgctgacctctggaaagacggcttatttaaatccaaggttaccagatacctgtgtttcacaagatcattttccaaagaaaatagtcatctggggaacgtgttagtagatatgaagctcattgacatcaaggacacactgcctgtgggcttcatcccaattcaggagacggtggacacacaggaagtggcttttaggaagaagaggctgtgcattaaatttattccacgggattcaacggaagctgcgatttgtgacattcggatcatgggccggaccaagcaggccccgcctcagtacacgtttattggggaactgaacagcatggggatctggtatcgaatgggcagagtaccaagaaatcatgactcatctcaacccacaacgccttcccagtcatcagctgcctccaccccagcccccaaccttcccaggcacatctccctaacacttcctgccaccttccgaggcaggaacagcacccggacggactacgagtaccagcactccaatttgtatgccatatcagcaatggatggtgtgccttttatgatttcagagaagttttcttgtgttccagaaagtatgcagccctttgatctcctgggaatcaccatcaaatctctagcagaaatcgaaaaagagtacgagtacagcttccgcacagagcagagcgcagccgccaggctcccgcccagccccaccaggtgtcagcagatcccgcagtcctgaggagccagcggccacctgcggggagaccaccgccgcccagactactgacggcaggggctgctgcccccgcctcctcctgccgcctccgccagccctccctcccacactgccccagcagggctggcccggagactgggcagctaagtgggcgcatcctgtcttcagctggcctgactgacaccccggcctccctggggacattgttcataaccatgactaatctgtgtgtgctgtagtgaccagcggctcctaacgtgtctgtgtgatgaccagttgtcctccaaaaacctcactcaccacggagtcaccctgagggccccgggcagttgccctggccgcccagtgacgcccaccggctccctccgctccctcctgtcacctaccagggcagaccccactaagccgttgagtctcttcctggaagaccctgagggccggcagctttgcctaggactctccagggtcgctgatcctccccggcccagggctgccaggaacaagttcctctctgcaggatctcacagcagccctgagaagacatgggaggaagaagccagtggccctggggtggaccctgccctttggacatcccatggacttgtcacccagtcgcctggaagtcggggagcagcacccctgcccccggtggaggggttgttgctttctggggaggaggacggttgacggccctgcttggatccaccaccaggacgctgtgctcggccatggcgcgcctcccccaagggctcatctgtgcaacaaccacatgccaacaatagctccaggtgcctcagccccgtgccctgacccggggaccacagggacaccctctgagacgtgctggccccaggaggatacaggcacacgggcacccagcccctctcagagccaggcgtgtcttgacggtatctgctgacgggaacaagtcattctgaaaggtccctctgacccaggtcaccaaatttgggccagaactggcacttccgagtgcccactggtgctggcgtcctcaaagtgccgggcgccaagttcagccccaggtgcgtttgcctaggcagtggtggctgccatccctcggggcccaggccctcacccgaagggctgcctcactctgtggtgtcaggcactgggctgtgtcctgattcctcagagtatggggacctgacatctttgggtccccaagagttggctcttggatgtggaggcttgatgctgcggttgggggctgcactacctgcgtccgtggaagcctctgcctcagcggggacggcctcctgctgcaggtcctgggcagcccacagtagtgctagctgaggcccagaggaacgggaggaaagggaggcagcgccggacggcgcagctggccaagaggcgggcggggccagaaatacctcatgcccctgcaccagcccctccgtctccaggccccaggcctctttgtggacccatcttcctcctctgccaccccgatcttcactcggatacctcttgatttctgtggataagggaagcggccacttctccctccctgagacccgaggatgcccctggtgggggtggccttctcaggactcctgggtggcacagcagcaggaccttgtcatgggactgatgctgagcagggagggggctgccaggctggctgccgatgctccgttcacataagccagtgtggttctggggacctgaggagccctgtggcacccacagggggcacctatgtctgccgtggctcctcgggtggtgccctgtgtgacaaagcccaacagcaagggtgactcctggcaggtgggggcagcaggagggcagagggcagagctctggccacttctgcccacttcattagggtttgtgaactttgtccttcacctcttttcgtgccctggttgtgagattgcctctaacaggtaatgccaggggcccttcactccgcccccatgactgggaagaggcctgtggcagcgccgctggaccctaggaggctcagaggcagtggtgtgggagccctgtctgcaaggacgcagaataagcagtgagggcggctgcaggagaggaaggggctcccacagcccccactgatgccgctgcaggcccctgtcgagctggggtcccagccaggtgcccccgcatgccctcctgcagttgctggatggatagggacaccaggaagaggacaaactgcatggactcaagcgagctggagccatcttctccatagcattacggacttagcataagagtaaatgactgtgaacgttgtagtaaacggcagcttaagataagtaagcagagacagtgttaaggacgagttggtgtctgtggtagcttttaggctgctcctaacccaccatttattgccttctgagaggtgggtgaggacaagcatgtgcctgtgtgtgtgtgtgtgtgtgtgtgtatatgtgtgtgtgtgcacgcacatgcgtgtggtataagcccacctgagtggggctcgtgcaggagaactgaggcatgaaactctggctcaaacctaggaattgagagcgtttctgtcttttgggagagtacttttctccacgagccctctggccactgtgggagggaaggacaagggttcccttggaaatgtgaagggtcttggcctcatccctcaggtccccccacagcacttcccactactgcttctgtccctgctggcagcctctgtccctccagaacggctaaccagagcacactgtccccaccgcctcccctttctctctggaaagttgaagtatctccaaaggccttggaaatggcacaaaggtgataaggagcaggtgctttgctgcagtctcccttgcaaatgtataattaaggcctttcttcccaccccaagtccaagaacaaatgccagccacgtcctccgccacttggagagatgagaacccagtggggtcacgtaaaggaattgcaggtcggtgagaggacaagagggactcccatgttctaagcacctgttcctggccaggctctaggccaggctctctaagcacatttctcctttcattccccctaaaaacagagtgacctggaagtagatgttctttgctccttgtcagagttgaagaggctgacttggcccactgctaagcggcagaggcagggccagccatcctgtcgcaagcccgtgctggggctgccctttctgtttccagtccagttacggacttcccggccgccactgggccctgccggtcaccaggccactgtgcagtgggcgcagagcatggtcaggagtggcctgcccgtactcctcctgccactctgagcacatgtccgggggttgccaccagagacggctttgttctcccagctaaggccgtggagctgctgtgtgactgtgtcaggcctggacaaggaagacccttagggatgacgtccccgctgcatatttattcaaggtgactcttgtacttggcaagggaagtccactgtgtgattgtctgtattcttaatataatttgttaaataaacgtttgttttaacctcttt

SEQ ID NO: 387919 - DNA, 1132 bp, Homo sapiens
gtgatttgactctggctggtcaccaggtaatctgtccaaagttcagaaggtgtcaggatgctatcctgaggctccacagtgacagcctctcagtctgtgcactgtcccccacgggtggccccaaagccagctgcccatttaactgggcacagcatggacactggcctcagctctcagccttctgaggaggaccagtccaccatgcctgaagtcaaagacctctcagaagccttgccagaaacgtcaatggatcccatcacgggagtcggggtggtggcttctcggaaccgagccccgacaggctatgacgtagttgcacagacagcagatggtgtggatgctgacctctggaaagacggcttatttaaatccaaggttaccagatacctgtgtttcacaagatcattttccaaagaaaatagtcatctggggaacgtgttagtagatatgaagctcattgacatcaaggacacactgcctgtgggcttcatcccaattcaggagacggtggacacacaggaagtggcttttaggaagaagaggctgtgcattaaatttattccacgggattcaacggaagctgcgatttgtgacattcggatcatgggccggaccaagcaggccccgcctcagtacacgtttattggggaactgaacagcatggggatctggtatcgaatgggcagagtaccaagaaatcatgactcatctcaacccacaacgccttcccagtcatcagctgcctccaccccagcccccaaccttcccaggcacatctccctaacacttcctgccaccttccgaggcaggaacagcacccggacggactacgagtaccagcactccaatttgtatgccatatcagctcttcccagaagccctccctggcagctcctgtcctcctctgctggatcctgtgagcaccacagcctcctgtacaccctgagctatgcctctcaaggccctccaccagctcatcccctgctgtggcacaagccctgctttcagagtttccctgcccagggaatgaatgccccttgagagaccacacatatgctgcaagtccagccctgctcagagccgttctttgccaaataatcaccttgttattaaagagctgattgttctacta

SEQ ID NO: 387920 - DNA, 355 bp, Homo sapiens
caaatctctagcagaaatcgaaaaagaggtaagcaagccatcaggggaggggagggcaggcctgggccatcgcctgcacaccggcgtctctcgtgtgttcccctagggatccactccaagagagggacaggtggaggtgttccgttctcttctgagaaaaacactttcgttgcacccaaatgtgtttcttagataaagtaactaaattctaatgtatttcctacttccagtcaaatatgacccacatcttgtcttctctaagtcagaatgttttacatgacagacagagcctcagttctccttttttaaaagaagtctcagctttgggaaggtggaggttggaggacaggcacca

SEQ ID NO: 387921 - DNA, 566 bp, Homo sapiens
gtgtaggaatggaagcatttgcatggctcctggaataaaccaaggctggtgttcagcgcctgggttgttacggtcttgctggtgcattttgcccagtgggcagagatctggatcaaactgccaccccgtagagtcccttgggcccgctgtaaggcttgggacacactttcttcctcttggatgtcctttctagtatggaaaaaaaatgtggctgctgatgtctagaaacttccaaattccttgagaggacttgagcccagtggaggagttatgcttgattgagaaggaggcgctggccagaagcacctgctctgcccgctgatctgtgctgcatttcagctgttgatggcgtcagtgcttcctgagtcttggggaatgctccttgtaatctcctttctctcgtccttctcttcctcaggcacatctccctaacacttcctgccaccttccgaggcaggaacagcacccggacggactacgagtaccagcactccaatttgtatgccatatcagggtatgtggagccaccgctgcaggccagctacagagtctgtgtcccgggcgcc

SEQ ID NO: 387922 - DNA, 4509 bp, Homo sapiens
gtgacttcagtttttcgtctttcaacttcagttgctcatctgcagtcaccagctgggatttgaacccagccaatctgactcctgagctcctctttcctcccacttagtcttttcccctgagtccaacagcaccttagagcatgtctaatgcacgtgcttactgccttcatctcattgcagcctgtccctgccagctgtgtcaccttcatcctgctgccagcccctggtgactctcccgttacagatcagagaccagactccaggggtggagagtaggggttctggaccagccgctctctgctcctagagctcttgtctacacaactgcctggtgctcaggggatgacgaggcgcctgcctctctcagtaggttgtgtgtcctggcagcaggggtgggacctgtcctctttcatagctccagcacatctgtgctggatgtcacctggctccatccagtgacggattcatattctctgtttcgacatcttcagttgctggacaactaaatgccatcttcaatacctttaatgccatctttttttttcttcttttgcagcaatggatggtgtgccttttatgatttcagagaagttttcttgtgttccagaaagtatgcagccctttgatctcctgggaatcaccatcaaatctctagcagaaatcgaaaaagagtacgagtacagcttccgcacagagcagagcgcagccgccaggctcccgcccagccccaccaggtgtcagcagatcccgcagtcctgaggagccagcggccacctgcggggagaccaccgccgcccagactactgacggcaggggctgctgcccccgcctcctcctgccgcctccgccagccctccctcccacactgccccagcagggctggcccggagactgggcagctaagtgggcgcatcctgtcttcagctggcctgactgacaccccggcctccctggggacattgttcataaccatgactaatctgtgtgtgctgtagtgaccagcggctcctaacgtgtctgtgtgatgaccagttgtcctccaaaaacctcactcaccacggagtcaccctgagggccccgggcagttgccctggccgcccagtgacgcccaccggctccctccgctccctcctgtcacctaccagggcagaccccactaagccgttgagtctcttcctggaagaccctgagggccggcagctttgcctaggactctccagggtcgctgatcctccccggcccagggctgccaggaacaagttcctctctgcaggatctcacagcagccctgagaagacatgggaggaagaagccagtggccctggggtggaccctgccctttggacatcccatggacttgtcacccagtcgcctggaagtcggggagcagcacccctgcccccggtggaggggttgttgctttctggggaggaggacggttgacggccctgcttggatccaccaccaggacgctgtgctcggccatggcgcgcctcccccaagggctcatctgtgcaacaaccacatgccaacaatagctccaggtgcctcagccccgtgccctgacccggggaccacagggacaccctctgagacgtgctggccccaggaggatacaggcacacgggcacccagcccctctcagagccaggcgtgtcttgacggtatctgctgacgggaacaagtcattctgaaaggtccctctgacccaggtcaccaaatttgggccagaactggcacttccgagtgcccactggtgctggcgtcctcaaagtgccgggcgccaagttcagccccaggtgcgtttgcctaggcagtggtggctgccatccctcggggcccaggccctcacccgaagggctgcctcactctgtggtgtcaggcactgggctgtgtcctgattcctcagagtatggggacctgacatctttgggtccccaagagttggctcttggatgtggaggcttgatgctgcggttgggggctgcactacctgcgtccgtggaagcctctgcctcagcggggacggcctcctgctgcaggtcctgggcagcccacagtagtgctagctgaggcccagaggaacgggaggaaagggaggcagcgccggacggcgcagctggccaagaggcgggcggggccagaaatacctcatgcccctgcaccagcccctccgtctccaggccccaggcctctttgtggacccatcttcctcctctgccaccccgatcttcactcggatacctcttgatttctgtggataagggaagcggccacttctccctccctgagacccgaggatgcccctggtgggggtggccttctcaggactcctgggtggcacagcagcaggaccttgtcatgggactgatgctgagcagggagggggctgccaggctggctgccgatgctccgttcacataagccagtgtggttctggggacctgaggagccctgtggcacccacagggggcacctatgtctgccgtggctcctcgggtggtgccctgtgtgacaaagcccaacagcaagggtgactcctggcaggtgggggcagcaggagggcagagggcagagctctggccacttctgcccacttcattagggtttgtgaactttgtccttcacctcttttcgtgccctggttgtgagattgcctctaacaggtaatgccaggggcccttcactccgcccccatgactgggaagaggcctgtggcagcgccgctggaccctaggaggctcagaggcagtggtgtgggagccctgtctgcaaggacgcagaataagcagtgagggcggctgcaggagaggaaggggctcccacagcccccactgatgccgctgcaggcccctgtcgagctggggtcccagccaggtgcccccgcatgccctcctgcagttgctggatggatagggacaccaggaagaggacaaactgcatggactcaagcgagctggagccatcttctccatagcattacggacttagcataagagtaaatgactgtgaacgttgtagtaaacggcagcttaagataagtaagcagagacagtgttaaggacgagttggtgtctgtggtagcttttaggctgctcctaacccaccatttattgccttctgagaggtgggtgaggacaagcatgtgcctgtgtgtgtgtgtacgcacatgcgtgtggtataagcccacctgagtggggctcgtgcaggagaactgaggcatgaaactctggctcaaacctaggaattgagagcgtttctgtcttttgggagagtacttttctccacgagccctctggccactgtgggagggaaggacaagggttcccttggaaatgtgaagggtcttggcctcatccctcaggtccccccacagcacttcccactactgcttctgtccctgctggcagcctctgtccctccagaacggctaaccagagcacactgtccccaccgcctcccctttctctctggaaagttgaagtatctccaaaggccttggaaatggcacaaaggtgataaggagcaggtgctttgctgcagtctcccttgcaaatgtataattaaggcctttcttcccaccccaagtccaagaacaaatgccagccacgtcctccgccacttggagagatgagaacccagtggggtcacgtaaaggaattgcaggtcggtgagaggacaagagggactcccatgttctaagcacctgttcctggccaggctctaggccaggctctctaagcacatttctcctttcattccccctaaaaacagagtgacctggaagtagatgttctttgctccttgtcagagttgaagaggctgacttggcccactgctaagcggcagaggcagggccagccatcctgtcgcaagcccgtgctggggctgccctttctgtttccagtccagttacggacttcccggccgccactgggccctgccggtcaccaggccactgtgcagtgggcgcagagcatggtcaggagtggcctgcccgtactcctccacccagatgagggccctccagagcctgcaggcatctgtggggaatcccagcctgcaggttcttggagaagcaggtgaacctaaggatgaaagcaaaggagggccttgaggaagcagcccccaggcctggcagccacgcagcggctgagctcatgaacttggttcgcagcctgccttgcccctggaggccacgccaggcgctcacccctgagcccacagcccctgcttgggctgcctggcaccctcagggtggcccggcctcctcctgccactctgagcacatgtccgggggttgccaccagagacggctttgttctcccagctaaggccgtggagctgctgtgtgactgtgtcaggcctggacaaggaagacccttagggatgacgtccccgctgcatatttattcaaggtgactcttgtacttggcaagggaagtccactgtgtgattgtctgtattcttaatataatttgttaaataaacgtttgttttaacctcttt

SEQ ID NO: 387923 - DNA, 4846 bp, Homo sapiens
gtgatttgactctggctggtcaccaggtaatctgtccaaagttcagaaggtgtcaggatgctatcctgaggctccacagtgacagcctctcagtctgtgcactgtcccccacgggtggccccaaagccagctgcccatttaactgggcacagcatggacactggcctcagctctcagccttctgaggaggaccagtccaccatgcctgaagtcaaagacctctcagaagccttgccagaaacgtcaatggatcccatcacgggagtcggggtggtggcttctcggaaccgagccccgacaggctatgacgtagttgcacagacagcagatggtgtggatgctgacctctggaaagacggcttatttaaatccaaggttaccagatacctgtgtttcacaagatcattttccaaagaaaatagtcatctggggaacgtgttagtagatatgaagctcattgacatcaaggacacactgcctgtgggcttcatcccaattcaggagacggtggacacacaggaagtggcttttaggaagaagaggctgtgcattaaatttattccacgggattcaacggaagctgcgatttgtgacattcggatcatgggccggaccaagcaggccccgcctcagtacacgtttattggggaactgaacagcatggggatctggtatcgaatgggcagagtaccaagaaatcatgactcatctcaacccacaacgccttcccagtcatcagctgcctccaccccagcccccaaccttcccaggcacatctccctaacacttcctgccaccttccgaggcaggaacagcacccggacggactacgagtaccagcactccaatttgtatgccatatcagcaatggatggtgtgccttttatgatttcagagaagttttcttgtgttccagaaagtatgcagccctttgatctcctgggaatcaccatcaaatctctagcagaaatcgaaaaagagtacgagtacagcttccgcacagagcagagcgcagccgccaggctcccgcccagccccaccaggtgtcagcagatcccgcagtcctgaggagccagcggccacctgcggggagaccaccgccgcccagactactgacggcaggggctgctgcccccgcctcctcctgccgcctccgccagccctccctcccacactgccccagcagggctggcccggagactgggcagctaagtgggcgcatcctgtcttcagctggcctgactgacaccccggcctccctggggacattgttcataaccatgactaatctgtgtgtgctgtagtgaccagcggctcctaacgtgtctgtgtgatgaccagttgtcctccaaaaacctcactcaccacggagtcaccctgagggccccgggcagttgccctggccgcccagtgacgcccaccggctccctccgctccctcctgtcacctaccagggcagaccccactaagccgttgagtctcttcctggaagaccctgagggccggcagctttgcctaggactctccagggtcgctgatcctccccggcccagggctgccaggaacaagttcctctctgcaggatctcacagcagccctgagaagacatgggaggaagaagccagtggccctggggtggaccctgccctttggacatcccatggacttgtcacccagtcgcctggaagtcggggagcagcacccctgcccccggtggaggggttgttgctttctggggaggaggacggttgacggccctgcttggatccaccaccaggacgctgtgctcggccatggcgcgcctcccccaagggctcatctgtgcaacaaccacatgccaacaatagctccaggtgcctcagccccgtgccctgacccggggaccacagggacaccctctgagacgtgctggccccaggaggatacaggcacacgggcacccagcccctctcagagccaggcgtgtcttgacggtatctgctgacgggaacaagtcattctgaaaggtccctctgacccaggtcaccaaatttgggccagaactggcacttccgagtgcccactggtgctggcgtcctcaaagtgccgggcgccaagttcagccccaggtgcgtttgcctaggcagtggtggctgccatccctcggggcccaggccctcacccgaagggctgcctcactctgtggtgtcaggcactgggctgtgtcctgattcctcagagtatggggacctgacatctttgggtccccaagagttggctcttggatgtggaggcttgatgctgcggttgggggctgcactacctgcgtccgtggaagcctctgcctcagcggggacggcctcctgctgcaggtcctgggcagcccacagtagtgctagctgaggcccagaggaacgggaggaaagggaggcagcgccggacggcgcagctggccaagaggcgggcggggccagaaatacctcatgcccctgcaccagcccctccgtctccaggccccaggcctctttgtggacccatcttcctcctctgccaccccgatcttcactcggatacctcttgatttctgtggataagggaagcggccacttctccctccctgagacccgaggatgcccctggtgggggtggccttctcaggactcctgggtggcacagcagcaggaccttgtcatgggactgatgctgagcagggagggggctgccaggctggctgccgatgctccgttcacataagccagtgtggttctggggacctgaggagccctgtggcacccacagggggcacctatgtctgccgtggctcctcgggtggtgccctgtgtgacaaagcccaacagcaagggtgactcctggcaggtgggggcagcaggagggcagagggcagagctctggccacttctgcccacttcattagggtttgtgaactttgtccttcacctcttttcgtgccctggttgtgagattgcctctaacaggtaatgccaggggcccttcactccgcccccatgactgggaagaggcctgtggcagcgccgctggaccctaggaggctcagaggcagtggtgtgggagccctgtctgcaaggacgcagaataagcagtgagggcggctgcaggagaggaaggggctcccacagcccccactgatgccgctgcaggcccctgtcgagctggggtcccagccaggtgcccccgcatgccctcctgcagttgctggatggatagggacaccaggaagaggacaaactgcatggactcaagcgagctggagccatcttctccatagcattacggacttagcataagagtaaatgactgtgaacgttgtagtaaacggcagcttaagataagtaagcagagacagtgttaaggacgagttggtgtctgtggtagcttttaggctgctcctaacccaccatttattgccttctgagaggtgggtgaggacaagcatgtgcctgtgtgtgtgtgtgtgtgtgtgtgtatatgtgtgtgtgtgcacgcacatgcgtgtggtataagcccacctgagtggggctcgtgcaggagaactgaggcatgaaactctggctcaaacctaggaattgagagcgtttctgtcttttgggagagtacttttctccacgagccctctggccactgtgggagggaaggacaagggttcccttggaaatgtgaagggtcttggcctcatccctcaggtccccccacagcacttcccactactgcttctgtccctgctggcagcctctgtccctccagaacggctaaccagagcacactgtccccaccgcctcccctttctctctggaaagttgaagtatctccaaaggccttggaaatggcacaaaggtgataaggagcaggtgctttgctgcagtctcccttgcaaatgtataattaaggcctttcttcccaccccaagtccaagaacaaatgccagccacgtcctccgccacttggagagatgagaacccagtggggtcacgtaaaggaattgcaggtcggtgagaggacaagagggactcccatgttctaagcacctgttcctggccaggctctaggccaggctctctaagcacatttctcctttcattccccctaaaaacagagtgacctggaagtagatgttctttgctccttgtcagagttgaagaggctgacttggcccactgctaagcggcagaggcagggccagccatcctgtcgcaagcccgtgctggggctgccctttctgtttccagtccagttacggacttcccggccgccactgggccctgccggtcaccaggccactgtgcagtgggcgcagagcatggtcaggagtggcctgcccgtactcctccacccagatgagggccctccagagcctgcaggcatctgtggggaatcccagcctgcaggttcttggagaagcaggtgaacctaaggatgaaagcaaaggagggccttgaggaagcagcccccaggcctggcagccacgcagcggctgagctcatgaacttggttcgcagcctgccttgcccctggaggccacgccaggcgctcacccctgagcccacagcccctgcttgggctgcctggcaccctcagggtggcccggcctcctcctgccactctgagcacatgtccgggggttgccaccagagacggctttgttctcccagctaaggccgtggagctgctgtgtgactgtgtcaggcctggacaaggaagacccttagggatgacgtccccgctgcatatttattcaaggtgactcttgtacttggcaagggaagtccactgtgtgattgtctgtattcttaatataatttgttaaataaacgtttgttttaacctcttt

SEQ ID NO: 387924 - DNA, 4529 bp, Homo sapiens
tagaggatacacactcggcgaggtgccaagaaatcatgactcatctcaacccacaacgccttcccagtcatcagctgcctccaccccagcccccgacgtttccaggcacatctccctaacacttcctgccaccttccgaggcaggaacagcacccggacggactacgagtaccagcactccaatttgtatgccatatcagaggaagtggcttttaggaagaagaggctgtgcattaaatttattccacgggattcaacggaagctgcgatttgtgacattcggatcatgggccggaccaagcaggccccgcctcagtacacgtttattggggaactgaacagcatggggatctggtatcgaatgggcagagtaccaagaaatcatgactcatctcaacccacaacgccttcccagtcatcagctgcctccaccccagcccccaaccttcccaggcacatctccctaacacttcctgccaccttccgaggcaggaacagcacccggacggactacgagtaccagcactccaatttgtatgccatatcagcaatggatggtgtgccttttatgatttcagagaagttttcttgtgttccagaaagtatgcagccctttgatctcctgggaatcaccatcaaatctctagcagaaatcgaaaaagagtacgagtacagcttccgcacagagcagagcgcagccgccaggctcccgcccagccccaccaggtgtcagcagatcccgcagtcctgaggagccagcggccacctgcggggagaccaccgccgcccagactactgacggcaggggctgctgcccccgcctcctcctgccgcctccgccagccctccctcccacactgccccagcagggctggcccggagactgggcagctaagtgggcgcatcctgtcttcagctggcctgactgacaccccggcctccctggggacattgttcataaccatgactaatctgtgtgtgctgtagtgaccagcggctcctaacgtgtctgtgtgatgaccagttgtcctccaaaaacctcactcaccacggagtcaccctgagggccccgggcagttgccctggccgcccagtgacgcccaccggctccctccgctccctcctgtcacctaccagggcagaccccactaagccgttgagtctcttcctggaagaccctgagggccggcagctttgcctaggactctccagggtcgctgatcctccccggcccagggctgccaggaacaagttcctctctgcaggatctcacagcagccctgagaagacatgggaggaagaagccagtggccctggggtggaccctgccctttggacatcccatggacttgtcacccagtcgcctggaagtcggggagcagcacccctgcccccggtggaggggttgttgctttctggggaggaggacggttgacggccctgcttggatccaccaccaggacgctgtgctcggccatggcgcgcctcccccaagggctcatctgtgcaacaaccacatgccaacaatagctccaggtgcctcagccccgtgccctgacccggggaccacagggacaccctctgagacgtgctggccccaggaggatacaggcacacgggcacccagcccctctcagagccaggcgtgtcttgacggtatctgctgacgggaacaagtcattctgaaaggtccctctgacccaggtcaccaaatttgggccagaactggcacttccgagtgcccactggtgctggcgtcctcaaagtgccgggcgccaagttcagccccaggtgcgtttgcctaggcagtggtggctgccatccctcggggcccaggccctcacccgaagggctgcctcactctgtggtgtcaggcactgggctgtgtcctgattcctcagagtatggggacctgacatctttgggtccccaagagttggctcttggatgtggaggcttgatgctgcggttgggggctgcactacctgcgtccgtggaagcctctgcctcagcggggacggcctcctgctgcaggtcctgggcagcccacagtagtgctagctgaggcccagaggaacgggaggaaagggaggcagcgccggacggcgcagctggccaagaggcgggcggggccagaaatacctcatgcccctgcaccagcccctccgtctccaggccccaggcctctttgtggacccatcttcctcctctgccaccccgatcttcactcggatacctcttgatttctgtggataagggaagcggccacttctccctccctgagacccgaggatgcccctggtgggggtggccttctcaggactcctgggtggcacagcagcaggaccttgtcatgggactgatgctgagcagggagggggctgccaggctggctgccgatgctccgttcacataagccagtgtggttctggggacctgaggagccctgtggcacccacagggggcacctatgtctgccgtggctcctcgggtggtgccctgtgtgacaaagcccaacagcaagggtgactcctggcaggtgggggcagcaggagggcagagggcagagctctggccacttctgcccacttcattagggtttgtgaactttgtccttcacctcttttcgtgccctggttgtgagattgcctctaacaggtaatgccaggggcccttcactccgcccccatgactgggaagaggcctgtggcagcgccgctggaccctaggaggctcagaggcagtggtgtgggagccctgtctgcaaggacgcagaataagcagtgagggcggctgcaggagaggaaggggctcccacagcccccactgatgccgctgcaggcccctgtcgagctggggtcccagccaggtgcccccgcatgccctcctgcagttgctggatggatagggacaccaggaagaggacaaactgcatggactcaagcgagctggagccatcttctccatagcattacggacttagcataagagtaaatgactgtgaacgttgtagtaaacggcagcttaagataagtaagcagagacagtgttaaggacgagttggtgtctgtggtagcttttaggctgctcctaacccaccatttattgccttctgagaggtgggtgaggacaagcatgtgcctgtgtgtgtgtgtgtgtgtgtgtgtatatgtgtgtgtgtgcacgcacatgcgtgtggtataagcccacctgagtggggctcgtgcaggagaactgaggcatgaaactctggctcaaacctaggaattgagagcgtttctgtcttttgggagagtacttttctccacgagccctctggccactgtgggagggaaggacaagggttcccttggaaatgtgaagggtcttggcctcatccctcaggtccccccacagcacttcccactactgcttctgtccctgctggcagcctctgtccctccagaacggctaaccagagcacactgtccccaccgcctcccctttctctctggaaagttgaagtatctccaaaggccttggaaatggcacaaaggtgataaggagcaggtgctttgctgcagtctcccttgcaaatgtataattaaggcctttcttcccaccccaagtccaagaacaaatgccagccacgtcctccgccacttggagagatgagaacccagtggggtcacgtaaaggaattgcaggtcggtgagaggacaagagggactcccatgttctaagcacctgttcctggccaggctctaggccaggctctctaagcacatttctcctttcattccccctaaaaacagagtgacctggaagtagatgttctttgctccttgtcagagttgaagaggctgacttggcccactgctaagcggcagaggcagggccagccatcctgtcgcaagcccgtgctggggctgccctttctgtttccagtccagttacggacttcccggccgccactgggccctgccggtcaccaggccactgtgcagtgggcgcagagcatggtcaggagtggcctgcccgtactcctccacccagatgagggccctccagagcctgcaggcatctgtggggaatcccagcctgcaggttcttggagaagcaggtgaacctaaggatgaaagcaaaggagggccttgaggaagcagcccccaggcctggcagccacgcagcggctgagctcatgaacttggttcgcagcctgccttgcccctggaggccacgccaggcgctcacccctgagcccacagcccctgcttgggctgcctggcaccctcagggtggcccggcctcctcctgccactctgagcacatgtccgggggttgccaccagagacggctttgttctcccagctaaggccgtggagctgctgtgtgactgtgtcaggcctggacaaggaagacccttagggatgacgtccccgctgcatatttattcaaggtgactcttgtacttggcaagggaagtccactgtgtgattgtctgtattcttaatataatttgttaaataaacgtttgttttaacctcttt

SEQ ID NO: 387925 - DNA, 4819 bp, Homo sapiens
  misc_feature (4737)..(4738): n is a, c, g, or t
  misc_feature (4740)..(4740): n is a, c, g, or t
  misc_feature (4746)..(4746): n is a, c, g, or t
  misc_feature (4748)..(4748): n is a, c, g, or t
  misc_feature (4752)..(4752): n is a, c, g, or t
  misc_feature (4774)..(4774): n is a, c, g, or t
  misc_feature (4798)..(4798): n is a, c, g, or t
  misc_feature (4812)..(4812): n is a, c, g, or t
  misc_feature (4814)..(4814): n is a, c, g, or t
  misc_feature (4817)..(4817): n is a, c, g, or t
gtgatttgactctggctggtcaccaggtaatctgtccaaagttcagaaggtgtcaggatgctatcctgaggctccacagtgacagcctctcagtctgtgcactgtcccccacgggtggccccaaagccagctgcccatttaactgggcacagcatggacactggcctcagctctcagccttctgaggaggaccagtccaccatgcctgaagtcaaagacctctcagaagccttgccagaaacgtcaatggatcccatcacgggagtcggggtggtggcttctcggaaccgagccccgacaggctatgacgtagttgcacagacagcagatggtgtggatgctgacctctggaaagacggcttatttaaatccaaggttaccagatacctgtgtttcacaagatcattttccaaagaaaatagtcatctggggaacgtgttagtagatatgaagctcattgacatcaaggacacactgcctgtgggcttcatcccaattcaggagacggtggacacacaggaagtggcttttaggaagaagaggctgtgcattaaatttattccacgggattcaacggaagctgcgatttgtgacattcggatcatgggccggaccaagcaggccccgcctcagtacacgtttattggggaactgaacagcatggggatctggtatcgaatgggcagagtaccaagaaatcatgactcatctcaacccacaacgccttcccagtcatcagctgcctccaccccagcccccaaccttcccaggcacatctccctaacacttcctgccaccttccgaggcaggaacagcacccggacggactacgagtaccagcactccaatttgtatgccatatcagcaatggatggtgtgccttttatgatttcagagaagttttcttgtgttccagaaagtatgcagccctttgatctcctgggaatcaccatcaaatctctagcagaaatcgaaaaagagtacgagtacagcttccgcacagagcagagcgcagccgccaggctcccgcccagccccaccaggtgtcagcagatcccgcagtcctgaggagccagcggccacctgcggggagaccaccgccgcccagactactgacggcaggggctgctgcccccgcctcctcctgccgcctccgccagccctccctcccacactgccccagcagggctggcccggagactgggcagctaagtgggcgcatcctgtcttcagctggcctgactgacaccccggcctccctggggacattgttcataaccatgactaatctgtgtgtgctgtagtgaccagcggctcctaacgtgtctgtgtgatgaccagttgtcctccaaaaacctcactcaccacggagtcaccctgagggccccgggcagttgccctggccgcccagtgacgcccaccggctccctccgctccctcctgtcacctaccagggcagaccccactaagccgttgagtctcttcctggaagaccctgagggccggcagctttgcctaggactctccagggtcgctgatcctccccggcccagggctgccaggaacaagttcctctctgcaggatctcacagcagccctgagaagacatgggaggaagaagccagtggccctggggtggaccctgccctttggacatcccatggacttgtcacccagtcgcctggaagtcggggagcagcacccctgcccccggtggaggggttgttgctttctggggaggaggacggttgacggccctgcttggatccaccaccaggacgctgtgctcggccatggcgcgcctcccccaagggctcatctgtgcaacaaccacatgccaacaatagctccaggtgcctcagccccgtgccctgacccggggaccacagggacaccctctgagacgtgctggccccaggaggatacaggcacacgggcacccagcccctctcagagccaggcgtgtcttgacggtatctgctgacgggaacaagtcattctgaaaggtccctctgacccaggtcaccaaatttgggccagaactggcacttccgagtgcccactggtgctggcgtcctcaaagtgccgggcgccaagttcagccccaggtgcgtttgcctaggcagtggtggctgccatccctcggggcccaggccctcacccgaagggctgcctcactctgtggtgtcaggcactgggctgtgtcctgattcctcagagtatggggacctgacatctttgggtccccaagagttggctcttggatgtggaggcttgatgctgcggttgggggctgcactacctgcgtccgtggaagcctctgcctcagcggggacggcctcctgctgcaggtcctgggcagcccacagtagtgctagctgaggcccagaggaacgggaggaaagggaggcagcgccggacggcgcagctggccaagaggcgggcggggccagaaatacctcatgcccctgcaccagcccctccgtctccaggccccaggcctctttgtggacccatcttcctcctctgccaccccgatcttcactcggatacctcttgatttctgtggataagggaagcggccacttctccctccctgagacccgaggatgcccctggtgggggtggccttctcaggactcctgggtggcacagcagcaggaccttgtcatgggactgatgctgagcagggagggggctgccaggctggctgccgatgctccgttcacataagccagtgtggttctggggacctgaggagccctgtggcacccacagggggcacctatgtctgccgtggctcctcgggtggtgccctgtgtgacaaagcccaacagcaagggtgactcctggcaggtgggggcagcaggagggcagagggcagagctctggccacttctgcccacttcattagggtttgtgaactttgtccttcacctcttttcgtgccctggttgtgagattgcctctaacaggtaatgccaggggcccttcactccgcccccatgactgggaagaggcctgtggcagcgccgctggaccctaggaggctcagaggcagtggtgtgggagccctgtctgcaaggacgcagaataagcagtgagggcggctgcaggagaggaaggggctcccacagcccccactgatgccgctgcaggcccctgtcgagctggggtcccagccaggtgcccccgcatgccctcctgcagttgctggatggatagggacaccaggaagaggacaaactgcatggactcaagcgagctggagccatcttctccatagcattacggacttagcataagagtaaatgactgtgaacgttgtagtaaacggcagcttaagataagtaagcagagacagtgttaaggacgagttggtgtctgtggtagcttttaggctgctcctaacccaccatttattgccttctgagaggtgggtgaggacaagcatgtgcctgtgtgtgtgtgtgtgtgtgtgtgtatatgtgtgtgtgtgcacgcacatgcgtgtggtataagcccacctgagtggggctcgtgcaggagaactgaggcatgaaactctggctcaaacctaggaattgagagcgtttctgtcttttgggagagtacttttctccacgagccctctggccactgtgggagggaaggacaagggttcccttggaaatgtgaagggtcttggcctcatccctcaggtccccccacagcacttcccactactgcttctgtccctgctggcagcctctgtccctccagaacggctaaccagagcacactgtccccaccgcctcccctttctctctggaaagttgaagtatctccaaaggccttggaaatggcacaaaggtgataaggagcaggtgctttgctgcagtctcccttgcaaatgtataattaaggcctttcttcccaccccaagtccaagaacaaatgccagccacgtcctccgccacttggagagatgagaacccagtggggtcacgtaaaggaattgcaggtcggtgagaggacaagagggactcccatgttctaagcacctgttcctggccaggctctaggccaggctctctaagcacatttctcctttcattccccctaaaaacagagtgacctggaagtagatgttctttgctccttgtcagagttgaagaggctgacttggcccactgctaagcggcagaggcagggccagccatcctgtcgcaagcccgtgctggggctgccctttctgtttccagtccagttacggacttcccggccgccactgggccctgccggtcaccaggccactgtgcagtgggcgcagagcatggtcaggagtggcctgcccgtactcctccacccagatgagggccctccagagcctgcaggcatctgtggggaatcccagcctgcaggttcttggagaagcaggtgaacctaaggatgaaagcaaaggagggccttgaggaagcagcccccaggcctggcagccacgcagcggctgagctcatgaacttggttcgcagcctgccttgcccctggaggccacgccaggcgctcacccctgagcccacagcccctgcttgggctgcctggcaccctcagggtggcccggcctcctcctgccactctgagcacatgtccgggggttgccaccagagacggctttgttctcccagctaaggccgtggagctgctgtgtgactgtgtcaggcctggacaaggaagacccttagggatgacgtcccnngnatattntnaagngatttgttcttggaaggaatcntgtttattttttttttaaaaattntaaaaagtttttancnttncc

SEQ ID NO: 387926 - DNA, 4308 bp, Homo sapiens
gtgatttgactctggctggtcaccaggtaatctgtccaaagttcagaaggtgtcaggatgctatcctgaggctccacagtgacagcctctcagtctgtgcactgtcccccacgggtggccccaaagccagctgcccatttaactgggcacagcatggacactggcctcagctctcagccttctgaggaggaccagtccaccatgcctgaagtcaaagacctctcagaagccttgccagaaacgtcaatggatcccatcacgggagtcggggtggtggcttctcggaaccgagccccgacaggctatgacgtagttgcacagacagcagatggtgtggatgctgacctctggaaagacggcttatttaaatccaaggttaccagatacctgtgtttcacaagatcattttccaaagaaaatagtcatctggggaacgtgttagtagatatgaagctcattgacatcaaggacacactgcctgtgggcttcatcccaattcaggagacggtggacacacaggaagtggcttttaggaagaagaggctgtgcattaaatttattccacgggattcaacggaagctgcgatttgtgacattcggatcatgggccggaccaagcaggccccgcctcagtacacgtttattggggaactgaacagcatggggatctggtatcgaatgggcagagtaccaagaaatcatgactcatctcaacccacaacgccttcccagtcatcagctgcctccaccccagcccccaaccttcccaggcacatctccctaacacttcctgccaccttccgaggcaggaacagcacccggacggactacgagtaccagcactccaatttgtatgccatatcagcaatggatggtgtgccttttatgatttcagagaagttttcttgtgttccagaaagtatgcagccctttgatctcctgggaatcaccatcaaatctctagcagaaatcgaaaaagagtacgagtacagcttccgcacagagcagagcgcagccgccaggctcccgcccagccccaccaggtgtcagcagatcccgcagtcctgaggagccagcggccacctgcggggagaccaccgccgcccagactactgacggcaggggctgctgcccccgcctcctcctgccgcctccgccagccctccctcccacactgccccagcagggctggcccggagactgggcagctaagtgggcgcatcctgtcttcagctggcctgactgacaccccggcctccctggggacattgttcataaccatgactaatctgtgtgtgctgtagtgaccagcggctcctaacgtgtctgtgtgatgaccagttgtcctccaaaaacctcactcaccacggagtcaccctgagggccccgggcagttgccctggccgcccagtgacgcccaccggctccctccgctccctcctgtcacctaccagggcagaccccactaagccgttgagtctcttcctggaagaccctgagggccggcagctttgcctaggactctccagggtcgctgatcctccccggcccagggctgccaggaacaagttcctctctgcaggatctcacagcagccctgagaagacatgggaggaagaagccagtggccctggggtggaccctgccctttggacatcccatggacttgtcacccagtcgcctggaagtcggggagcagcacccctgcccccggtggaggggttgttgctttctggggaggaggacggttgacggccctgcttggatccaccaccaggacgctgtgctcggccatggcgcgcctcccccaagggctcatctgtgcaacaaccacatgccaacaatagctccaggtgcctcagccccgtgccctgacccggggaccacagggacaccctctgagacgtgctggccccaggaggatacaggcacacgggcacccagcccctctcagagccaggcgtgtcttgacggtatctgctgacgggaacaagtcattctgaaaggtccctctgacccaggtcaccaaatttgggccagaactggcacttccgagtgcccactggtgctggcgtcctcaaagtgccgggcgccaagttcagccccaggtgcgtttgcctaggcagtggtggctgccatccctcggggcccaggccctcacccgaagggctgcctcactctgtggtgtcaggcactgggctgtgtcctgattcctcagagtatggggacctgacatctttgggtccccaagagttggctcttggatgtggaggcttgatgctgcggttgggggctgcactacctgcgtccgtggaagcctctgcctcagcggggacggcctcctgctgcaggtcctgggcagcccacagtagtgctagctgaggcccagaggaacgggaggaaagggaggcagcgccggacggcgcagctggccaagaggcgggcggggccagaaatacctcatgcccctgcaccagcccctccgtctccaggccccaggcctctttgtggacccatcttcctcctctgccaccccgatcttcactcggatacctcttgatttctgtggataagggaagcggccacttctccctccctgagacccgaggatgcccctggtgggggtggccttctcaggactcctgggtggcacagcagcaggaccttgtcatgggactgatgctgagcagggagggggctgccaggctggctgccgatgctccgttcacataagccagtgtggttctggggacctgaggagccctgtggcacccacagggggcacctatgtctgccgtggctcctcgggtggtgccctgtgtgacaaagcccaacagcaagggtgactcctggcaggtgggggcagcaggagggcagagggcagagctctggccacttctgcccacttcattagggtttgtgaactttgtccttcacctcttttcgtgccctggttgtgagattgcctctaacaggtaatgccaggggcccttcactccgcccccatgactgggaagaggcctgtggcagcgccgctggaccctaggaggctcagaggcagtggtgtgggagccctgtctgcaaggacgcagaataagcagtgagggcggctgcaggagaggaaggggctcccacagcccccactgatgccgctgcaggcccctgtcgagctggggtcccagccaggtgcccccgcatgccctcctgcagttgctggatggatagggacaccaggaagaggacaaactgcatggactcaagcgagctggagccatcttctccatagcattacggacttagcataagagtaaatgactgtgaacgttgtagtaaacggcagcttaagataagtaagcagagacagtgttaaggacgagttggtgtctgtggtagcttttaggctgctcctaacccaccatttattgccttctgagaggtgggtgaggacaagcatgtgcctgtgtgtgtgtgtgtgtgtgtgtgtatatgtgtgtgtgtgcacgcacatgcgtgtggtataagcccacctgagtggggctcgtgcaggagaactgaggcatgaaactctggctcaaacctaggaattgagagcgtttctgtcttttgggagagtacttttctccacgagccctctggccactgtgggagggaaggacaagggttcccttggaaatgtgaagggtcttggcctcatccctcaggtccccccacagcacttcccactactgcttctgtccctgctggcagcctctgtccctccagaacggctaaccagagcacactgtccccaccgcctcccctttctctctggaaagttgaagtatctccaaaggccttggaaatggcacaaaggtgataaggagcaggtgctttgctgcagtctcccttgcaaatgtataattaaggcctttcttcccaccccaagtccaagaacaaatgccagccacgtcctccgccacttggagagatgagaacccagtggggtcacgtaaaggaattgcaggtcggtgagaggacaagagggactcccatgttctaagcacctgttcctggccaggctctaggccaggctctctaagcacatttctcctttcattccccctaaaaacagagtgacctggaagtagatgttctttgctccttgtcagagttgaagaggctgacttggcccactgctaagcggcagaggcagggccagccatcctgtcgcaagcccgtgctggggctgccctttctgtttccatccactgtgtgattgtctgtattcttaatataatttgttaaataaacgtttgttttaacctcttt

SEQ ID NO: 387927 - DNA, 455 bp, Homo sapiens
gctatcccacagtgatattcaccctttcgtaacagatcttttccaaaccaggctttctcaatttcaccatccccacctcccagcagcacatctgaagcccatctgaaggatagttaccagaggatgggaagggtatgggggattgaggggaggtggggatggttgaactctcatgagttcaattgttttcatttctagaccccacaaataagtgagaacatggaatgtttgtctttctgttcctggcttatttcacttaacataatgatattcagtttcatccatgttgctgcaaatgactgaatctcattcgtgattaaatagtactccattgtgtatatatgttacattctctttatccattcatctgctggtggacacttaggttgcttccaaatcttagctattgtaaacagtgctgcagtaaacataagagtgtacatatctcgtcaata

SEQ ID NO: 387928 - DNA, 478 bp, Homo sapiens
  misc_feature (474)..(477): n is a, c, g, or t
atgtctcatgcaatatttgaaacatacatttttttttcattgttcatttgggattcaaatttaactggatgtcctatattttatctggcaacactaactagttaacagtcaaggatcctattactaatcgagggtgaaggggcacagggaggaagggtgaccactgaaggacaatcagaagtctctgccacaaagtgagacccctcaaagtgggtggcaataaatgttggtcctctcttccctttccctgtaaggcaaggcaaaaccagagggtggctgcagggataactgctggtagagccaacatctgtttttgaaatagaaccaatgttctattttaatggctagtttaatcacatgagatgcatgtacttggttaagacctcagagatctctgctgtatgcatgaaagagacaactgtggcctgaaaagcaacattaataaaagcactgcttctttttaatcacaaaaannnna

SEQ ID NO: 387929 - DNA, 383 bp, Homo sapiens
tttttaattcatatcgtttgaagtttcaaatgtgcatttattattctaaaatatacttaaatgttgaggactaccctgaacatttatgcttgatgctttaatattaaataaaagaacactacttatttcaaatataaaatacctattgaattggatatgatttgattactgtttgctgtctttacaacttagttttggaaataaccaaacataggcaagtctttgtttttctcttgtgactataaaatccagtcattgaaaattaggtcaatgagaccagatgtggtagctcatgcctgtgtaatcccagcggcactttgggaggctgagggggagtatatttttcgaggccaggaattcaggaccagcctgggcaacataat

SEQ ID NO: 387930 - DNA, 896 bp, Homo sapiens
acagccttcactgcagagcacgccacgcatgggcacgtcaagatgcaccatgcctacaccaacgtggtgggcctgggggactccagcacgtggaggctgccttgcctcaaccgctatgtctacatgttccttgctcctttcctcctccccatcgccactccactggtggctgtcgagcggctgaggaaggtggagctcgggacagccctgcggacgctggccctgatttctctgggcctttattctcactactggctgctcctgaacgtgtcaggcttcaagaaccccagctcagccctgggctgcatgttcctcaccagatccctgttggcccacccctacctccacgtcaacatcttccagcacatcggactgcccatgttctcccgggacaacaagccccgtcggattcacatgatgagcctgggggtgcttaacctggcccggctgcccgtgctggactgggcgttcggccactcgatcatcagctgccatgtggaacaccatctattccccaggctctctgataacatgtgcctgaaggtagtcgagggctgggctgggggcgctggaataaagggactgttagaggatggaaaggaagattcttcggcctgggggcgttgctcacactataatcctggcacttgcggaggctgaggtgggcagattgcttgagcccaggagtttgagagcagcctgggcaacatggtgaaaccccatctctacaaaaaattcaaaaattagcggggtgtggtggcacatgcttgtggtcccagctgcttggaagctgaggtgaggaccacctgagtctgcagaggttgaggctgcaatgaaccataatcgtgccactgcactccagcctggtgacagagtaagaccctgtctcaaaaaaa

SEQ ID NO: 387931 - DNA, 484 bp, Homo sapiens
tacccccttggtggctctcctcacgtctgccttaacactctcacctaagcagatgtgcgagtccagctgcctcacgcccgctgtcttttctgggcatctttacagctaccgtagcaggttttcctctttaagtgaacgtgcatcatcctagctgaggcttttaaagggaggactcgctgcctcttggaatatattaaattctgatggtgaaacagcctgctgagctaggtagggcctcagcaacttccttatgagtatagtatttctaaaaaaagctgtcgaggccaggcatggtgtctcatgcctgtaatcctagcactttggaagactgaggcaggagtattgcttgagccaggagtccgagaccagcctgggcaacctagcaagactcgcatctctacaaaaaaatttttttttaattagctggatgtggtgatacacatctgtggccccagctacagctcaggaggctgaggcaggatga

SEQ ID NO: 387932 - DNA, 495 bp, Homo sapiens
tggaatctgcttgtgggcgggagatgtggctatgtggctataaaggatgaagatgaacgccctgtttgcttttcagcctcgcttggatcaaggttaaaaggccggttgtggccttcttggtggaagaaagagagagataaggcactgtcctccccttcggagggtctggggatacactaatccatcaaaaccactgagggctgggcgttggtgtgtgcctgtggtcccagcactttgggaggctgagctgggaggattgcttgagcccaggaggtcaaggcgtaagcaagctgtgatcgcaccgctgcacaccagtgcctgggcaacaaagtgagactctgtctctttaaaagaaaaaagaaaaaaaagcctttttttaaattaaaaaaaaaatcaagtctacctgaatggcctgcagttggacccacaaaccaggtacccaagttaccaggcaaggcagctgcagttgtaccagtcagaagtccacaagatttg

SEQ ID NO: 387933 - DNA, 409 bp, Homo sapiens
gccctattacccccaacatctaagcccctgggaaatccctcctctcactcccatctgcctcaggccccacacctgtcatcatcttcaccctccttcctcccacaccaccagaggtcttgagcaaccagtctgtcctctcctttacttccttctggctcctggaaatatccatagccctctcaaattgcaaaaaagggagcctaggacttccaaataggaaaagagtatcctatttctgttccctatcccaagaggttgtcaccttcccagaggcaagagaaagtccagagggtacctagagatcaatgtttggaacagtgctgggaaactggattaacaaggttttctagcccagtcaagactgtttgaatcagtatctgtctgaatcagctggacagatagcactttt

SEQ ID NO: 387934 - DNA, 126 bp, Homo sapiens
aggccctcatcagtttcagaaagaaaaaaaaacctaccttttagtccacaattcaaaaaatgttaaacaggccaagtgagcgcgcacgcctgtaatctcagcactttgggaggctgaggcaggcac

SEQ ID NO: 387935 - DNA, 340 bp, Homo sapiens
tggatacaccaatgctcgaaagaactgggttatcagtccagttagtgtagttggtttttaaagggagtataggggatttggcaaataagagaatgagaatatagcaaacctatacacactagaatatttgtcaatgtagaatttaatgttttttttgcatacaaaggttacattttagagtaaaaatagacctgtgactgaaggaaaattaaacacttcatttcctttttctgtttgagacagagtcttgctctgtcgcccaggctggtatacagtgagccaagatcacaccactgcactccagcctgggacgacagaaccaaaccatgtcttcaaaaaa

SEQ ID NO: 387936 - DNA, 299 bp, Homo sapiens
cgcagtagtgtgcatgcataagcagcatatacaggcacatgggcacgtgggcttgtgtgtgcttgtgtgaacagtggtgtttcagtccccactaacaatgggttgagcctctttcaccacccactgctacctggagccaccttcaaaatcctgatgaatgacaaataattgcacaactgtgaatcattgttatttttaattgttggtaagaaagtcaatgtagtgatgaaatagaaacagagctccccagattgcttgccaccagctgctgggtccttccccaccccctgcagaacccc

SEQ ID NO: 387937 - DNA, 324 bp, Homo sapiens
taggtgtgaaattggtatttttgagatgcatactgaagtttgtaaggataaatgacataatatataatatttgctttaaaatcctccagaaaaagaaaaagggagtagggctggatgagccagatatagtgaaatgctgccgctgtcaccactgagtgacaggcacataggtgtcctccgttcactccttttgcatatgtttgggaatgtttgtgataagtaagttagaaaaataacccagtcctctatctactggagcacagagatgcccccactgcccaactctctgaaaaggccctggcctcctgacacactgcttggcac

SEQ ID NO: 387938 - DNA, 262 bp, Homo sapiens
cccaacctttacagagcttcatgcacaagcttatcaatgagtatggcctgcccatctaaagattttctaagaggctgcccacgtaaaggggatgtcagagctcctggagctttgggacagccacaagccctctacctggttctctatctaggtcttttcctccttcccattgccccagtctctcccagagctcagacacactctataccttcccatgggaacaaaaaagcccccaggtgagtgttttttggctgatgtgtga

SEQ ID NO: 387939 - DNA, 277 bp, Homo sapiens
cctgtactgaaaccatcccagaaaagacgctcttatcaagcttattattaagtctctccagtgtaagtcacaaatgactctattattttgactgcttccttgactagtatactcattaattttttctcaaacataaaaaattaaaacctaggccaaaatatcctttgaagtcaagaaaaaacatacatgagagggaagacactgtgatttcaaaaaccttaaatgcacttttcccccttcaaattcatacgtaatacattattagtcttaaaaatga

SEQ ID NO: 387940 - DNA, 145 bp, Homo sapiens
ctggagctgcccagtgggcaagccagggaggctctgggcaccagctgtccttgactgcctgtccctgaagaactcctggggactctactgcagaaaaggacaacagctaaatcaggcatagactgtaacaggcgaggtctcctgg

SEQ ID NO: 387941 - DNA, 369 bp, Homo sapiens
ggccctctaatctgctctccacattgtggctagaaggggctttctgagaagactctgctctgttggaaacctctactggctgaccctgcccacgggactatgttcaaacttctggccttacattcaaagccctgggtaacttgatcccatgcctgccttttcttctagacttctcccctgtccatctggaatgtgtccttccacagcaaactgcctgccacttggcccatgctctatgctttccttctgcacgtgctggtcccttgccgacaccactgcaacctccaggcaggcccttcccctaccaccaaccctcactgtgctctggcccaggcccctgcagggagattggcaggcctgggctcaggc

SEQ ID NO: 387942 - DNA, 158 bp, Homo sapiens
gatgctttgtgaagttactaaaaatagttacatttctttatgttggcagtaatgactgccacattcaagagaagagaaaggaattgttctataaagaacggctcattttaggggttaaactttaggagttaaacacaataaaacaacttcaaggatgg

SEQ ID NO: 387943 - DNA, 810 bp, Homo sapiens
ggaattttattacaaagcattaaaataaacagcactttggcagggactaggacaaatgttgggtgaaatgagacagaaggaggccgatgaccccaagtcccaaatgagtagaaaggaggcttttatcagctgggagctatgggagaaccccaggcccagtgggcattgctgcaatgacctcatggtatgtatgtgtgtatgtgtgtgaccacctagaaagtcacagctctccaggatgagctggccccatagcagagaaaagtaaaacccccatatccctggtaggacaaatctcccatgagttcagcaagaagacttgggatctgtggacaggagggcacttggtaaaatccttcatttgaggttgatgtgaaaagttgaactcaagatcctgaggccttatgtccttcccactcccccacagggctcctgctgagccagccctgactcccagatgcaagagcccagggaggagttgggagagaggaaaacctgctgggacctcagggcatggaaggagccctggacctttctcccagtgatgcctcccctactgtcaagttcctctggccctggagcttccagggacccctgcatcctttccttcctgcagccctgcctttgccaaagctccatgcatttgcctccaagtgggtccccaaccccaggctctgggagctgtgaagaggctcagggttcctgcagtctgcaggaggaaaccttgctctaaatgggcctgtgtgggttctgggatcccttcctgcacagggccacctgcaggtcccacagatgtatcttccctagaagagc

SEQ ID NO: 387944 - DNA, 411 bp, Homo sapiens
gaaaaatggattgcatttttttgtgtgtaacaactgaagccttctgtttagtgaaggaccttgtggacgttaacggacagaagttagatacagtgggagaagtgttttgcaatgtctgaaactgacaagtcattaatatatgaaatatacaggtaactcctatatttcaacaaaaacgaggaggcagcaacctcagtaaaaaaggggaaaaggcaatttatggaagagaaaaacccgaaaaggcctaatttactgaagaaaatgtttccaaactgaagataatttaagtgatgcttaaacctatcaatattttaaaaagtgcaaagtgaatgacatcactttatttatttattagacaagatcttgccctgccatccagactggagtgcaatggcgcgatctcagctcact

SEQ ID NO: 387945 - DNA, 230 bp, Homo sapiens
ctagatgtgaggacaggattggaaggattaaccctgaaggcagacagatcaattagcagattgtactatggtccagaccagaaataatggcccagaacaggccagtggcagtggaaatggaggagaagatctattgatgatgtgggggaagtggatggaggtaagagaatttttaggaaatagaacgagcagtccttaatggggggattaggacagcacagggggagcat

SEQ ID NO: 387946 - DNA, 243 bp, Homo sapiens
cagacagggcttagctgagcaagaagtgggattctaggcagaggaagcagcatgagcaaagcccagaggactgaggtagcctggtgcatctggggaaatgcaattgagtttgtccagtgtagctgcaacataggacacaagaagggcccagtgggaggaggggagtgaggagttgatctcggcgcagaccatgctcactacagttttgcttttctggccatcttgattcctttgttcatatat

SEQ ID NO: 387947 - DNA, 192 bp, Homo sapiens
agagttggaaaccagcctggacaacatagtgagaccccgtttctaccaaaaaaaaccccaaaagccaaacttctatttccaaattgatttccatagtagtgaagacaatggacaattccaacaccagggaacaggtgccccagccgctccatctactcaccaacacttgttttgttgggcttttaaatttcc

SEQ ID NO: 387948 - DNA, 142 bp, Homo sapiens
gtgaagaaatgatacagataattcttgctaaaagcttggctgttaaaaggaggagagaaacaagactagctgcaaagtgagattgggttgatggagcagttttaaatctcaaaataaagagctttgtgcttttttgattatg

SEQ ID NO: 387949 - DNA, 434 bp, Homo sapiens
aaatcgtgggagttaagaagataggaatgcttatggtcctttggggagttagggtgccaggggtgggggactcatctcaggaaattccacaaattatacattcttgttttagttctagaaaatgtgatttttttccaaggttagggcaagaatgacaatgttgtttgagggtgttaacatctaaaagtgagcaatttgtacaatttttatttgtttattgttacttaggtattcttttttatttcatgtgcttttatttctcattttcctttcactgaaatgtccccttatgtaattctggaaagaaaatgtaagcttgtgtttctttttttttttttttttttgagactgactctcgctcttgtcaccgcactccagcctgagcgacagagtgagactctgtctccaaaaacaacaacaacaacaacaacaac

SEQ ID NO: 387950 - DNA, 202 bp, Homo sapiens
tgattggactccggtgaagactccaagatggcgatcgccacctcggacaccctgactcagcatttccgggttcacctttcctgttcctgccaccccgactaacgcacatgcccactagggcgtgtcacactcagaagcgtgaaactcaaccgaccctgcccctaccctgaccactcctcacccagcatccataaaagcacgc

SEQ ID NO: 387951 - DNA, 731 bp, Homo sapiens
agcggtataaaagcttttgagggggacttatctgttgccccagaaatggtaatcaagactcaccaatgccaaaaatggatgctcagtttcccctccttataaagaaagttaatgataccctaataggacacagacaagacccttttataattatccattacctaacaccctctgcctgttctagatgaagagaggacaggggagaaaatcaactgttatcagtgtcctttgggctttcaaggagttccgtggttggtggccactccctcttctactaggggtgggactgttctagggcaatgtcttggagagattgagaagtcctgcaagaagagaagactgacacctgattcctcaaatgaatacttctttaattgcaggtgcattttggcattgtcccttgagaaagaattcttgaagatgaggggtttaactaaatctagagatgatggctacatttctggagctttctggagatggaagtcttgctaatagaaagtcttgctaaagatctatggaattgtgtgtcttaaaaaataatggtagggctgggcacggtggctcacgcctgtaatcccagcactttgggagggtgaggcagaaggatcacctgaggtcaggaattcaagaccagcctggtcaacatggtgaaaccctctctctactaaaagtacaaaaattagctgagcgtgctgtaatcccagctactcgggaggctgaggcaggagaat

SEQ ID NO: 387952 - DNA, 448 bp, Homo sapiens
gcagtcaaacccagtaggtcagatcattatttgtgacctgtttctacacaaacaggtgaaacaaaagtagagtcctatttttaggttttgtggctggctgttgggaaagagggttctggtttctaggacctgccttgtggaagagaaattctagtttttatgacgcctgtcaggaggatggaactgagagataggagggcaagaggaggtcagagagaaacttttgcttttgaggctgcctctgaggcctttgttttggggtatcattttctgagtcccaatactggtctactcaaggattagaggaacctgcagcattgcaaagccagtcaacagggaaacctctctatggttatgagtaagctcagctgacctccacagaaccaccttgctgactccctgctggctccagataggtaagtaatacacactcttgtcttcccctgag

SEQ ID NO: 387953 - DNA, 664 bp, Homo sapiens
agtttgtgggtggggcgggggtgaaaaaaaaaggggcctggccgcatcgtctttattttagaaaaaaaactgtttctaaactgtccagctcagatgtgatctcttttatattttgggggattatcataatagaattaaaagagctagatttacagtcagaaaacccagattcaaatctcagttctgttgcctgttggctgtttgatcttgttcttattgaacttcattttccttgtctttggtcaaatattatgaaacctatttttactccttcaccaggcggatgtgaagatccaattagataatttatgtgaatgtgcttagcaaaccacagaacactaaacaaatatagaaattttttcgagaagataatgaggttctctctgggacctattgtaatattttccagcttttcttgccaagaagttccttctatcacacctaaattccgtcgaatttatttccaagcttcagccagcttggaaatagcctttctgttgggacatttccaaatcccaggtttagaggttcttccatctggcaggtgtcaaagaagacaacaggaaccatgagcagaaccacttggaactgcaaactctttgggccaaggagagacttcttctccaggtctggtttggttcgcaaattcctggctgtcatagca

SEQ ID NO: 387954 - DNA, 403 bp, Homo sapiens
ccaacagctcaaccccacatcccaaaggtgttcttcactagccttaaagtgctggcctgagaaaactcaagactgccaaatgaatctgcgttttttccaggcatcacctgaagataaggcccctgtctcctagtctctgtgggaaggcgagaacctagcttggataagcgccagtcaaaaaacccacatggtttcccatggaccaactccactttaccacttttgggaatttttcactttcctaactgagcccctactttcccctctccctaattccttcttttatccttaaaatgcccagtcacttctgtacaactcgaagttgaattttgttcacactggactcttttccctattgaaatagttatcactgattaaaatctgtccttaccactttaactag

SEQ ID NO: 387955 - DNA, 327 bp, Homo sapiens
ttggattatttgagctattgcttcagcctaactcaatgtaaaggggaaatacagaggtaagttttagagtttgggttctctttatggtcattagcagaactgtctagttgagcagccacagattatgttttccattatttattccatcattgtttatcaaggactgtaagggccttgaaattcaactcccccccccatagtttttgtattattccatgtagattttagattattctggagagtgttttgttcttgagcaacagaatactcttgagaagattacgaagtccagtggtatccttttctttgcctaggaaatagagaagc

SEQ ID NO: 387956 - DNA, 466 bp, Homo sapiens
ctatgtgaatttatccagattcacagcttcagctgctaactctacccagatgagtcccaaatctcagtggaaatctcactcctgaactccaaatcttacattcaggtgtctactgaacagcaatacttaatattccataggaccacaaatacagcgtgtccaaaccaaactcagtatctttgccataaaactcaatcctcctcaatatttcttctccagattcccagtaatttaaatatgaaatgtagacttcttccttctcacaagcctcctatatttgatgaggtatcaaattatgtttacttattttttaagtatctcttaaatccactttcttctttctgtctacactgcacctaactaaccttagctcaggccctcaacacctagtgcctagattttagtgataacccctacttctaccattctcctgcataaaacaccttttgtggtgtctgcctagctc

SEQ ID NO: 387957 - DNA, 632 bp, Homo sapiens
ggaaggtggagaaggggtaccactgaagatatgacagaaaaattttagaagaccaaaactaaaagcagttcatgagaaaacaatgtacccttcaatgatgaagttactctggatgatataattttctagaatattttgctattttaggaaaataccaacatatttgttgatattggcttataacaataaatttattaacagctactcacaaattaaagaaatgaaagaagtacgaaaaacttcacagagctaattctaatatgtcttgtattcctgtttttgcctaaatgtaagaatcaatctatataaaatcacataagttctttataaaatggactccacgagtcagtaagttctaagttacatcatcaaagttatcacacagcctttgacataacatttggtaacaaaactactccaataattagcaaacagataatttatagttaatctgtacatatatacgtcaatatatatgcagtaaatgcagtgtaaaattgtatataacttaaagtgttttttttaattttacctgtaactaaaataataaatgacattgcacatccaacagagatttgaatttgacagctgctggacataatttagtaaaattcaaagtaacaaactgggaa

SEQ ID NO: 387958 - DNA, 486 bp, Homo sapiens
cattgtacacttctgcctgggaatccactgattatgttcagatgattttttttccatattggaattgcaattgatctatttgctcatatgttttcaaaatctcccacagaaaatgtatattacttttgaagttagaagttagcaataagagttgttagctaaaaaacagaaacctatttgctatggaagatggcgggttcactcaggggtgcccgatgccatgttagccatgcatctgtccccgcatggtcccgtcctccaccgcctaggagatagtggaccatcagtgcctgaatgcaaatcatagtgagtggtgtgcaggaaagaggttgggcagggcctgtctgaggaggcatcgtgggggccgatccttgaagaatgtgaaagggacaggagaagagcaggcagctctcaggcagaggtgaggggcagtgcaaacgtggagcagtggccccgatcactcagggacgtggcagccttgggaag

SEQ ID NO: 387959 - DNA, 369 bp, Homo sapiens
taagtttctaagaactgaagtgttcaaaagtagaatgaccatctactataattctgaaattatttgttttgtgtgagtcttctcctttccactccttcctcctgtcaccagatccatccttcttcactttgctttaggcccaggaggttaagcacttgtgggtcacattatctgggctctcatcccctggcttccagttggattcagccaatggaaggtctagcaggaatctggaggacaggagaagtcaagatacaccttttctgttccttccctaccctgggtagtgttttctgcagataactgtattatcgcatgattatattgtttatctggtcgtttcaactctcctggctagcctgcttcctc

SEQ ID NO: 387960 - DNA, 2412 bp, Homo sapiens
  misc_feature (702)..(702): n is a, c, g, or t
  misc_feature (705)..(705): n is a, c, g, or t
  misc_feature (710)..(710): n is a, c, g, or t
  misc_feature (716)..(716): n is a, c, g, or t
  misc_feature (721)..(721): n is a, c, g, or t
  misc_feature (729)..(729): n is a, c, g, or t
  misc_feature (738)..(738): n is a, c, g, or t
  misc_feature (740)..(740): n is a, c, g, or t
  misc_feature (742)..(742): n is a, c, g, or t
  misc_feature (744)..(744): n is a, c, g, or t
  misc_feature (751)..(752): n is a, c, g, or t
  misc_feature (758)..(758): n is a, c, g, or t
  misc_feature (767)..(767): n is a, c, g, or t
  misc_feature (771)..(772): n is a, c, g, or t
  misc_feature (778)..(778): n is a, c, g, or t
  misc_feature (787)..(787): n is a, c, g, or t
  misc_feature (790)..(790): n is a, c, g, or t
  misc_feature (802)..(802): n is a, c, g, or t
  misc_feature (805)..(805): n is a, c, g, or t
  misc_feature (811)..(811): n is a, c, g, or t
  misc_feature (814)..(814): n is a, c, g, or t
  misc_feature (841)..(841): n is a, c, g, or t
  misc_feature (854)..(854): n is a, c, g, or t
  misc_feature (878)..(879): n is a, c, g, or t
  misc_feature (881)..(881): n is a, c, g, or t
  misc_feature (889)..(889): n is a, c, g, or t
  misc_feature (903)..(903): n is a, c, g, or t
  misc_feature (930)..(930): n is a, c, g, or t
  misc_feature (934)..(934): n is a, c, g, or t
  misc_feature (957)..(957): n is a, c, g, or t
  misc_feature (975)..(975): n is a, c, g, or t
ccaccaaccagcggctccgcctggccagacagagtgcgcgcgcgcacgttgtgcgcaggttcgaatctccgccgcttcgcggttgcttctcaacgtccgggccgcatctcggcggcggcgagggctgagcgcgggagctgcctccgagccggagccccagccctaggccctgcgcgagctgccccgccctaccccctccagcgtcctgtcgcctcctcgcccgacttcggcctgtccctctctcacgcgctcagtcctcgctcttcgccccccgcagctatcggcactcggtctcccgcgcctggcgggctccgcccgagcctctgggcccatggccaagcggcgtgcggccgagccggtgacgttccacgtgccttggaagcggctcctgctttgcgacttcgctgagcagccgccgccaccgcctctctggatccggccgcccggggtcgcgcatgctgggcagctcctcggcgtcccagagcagcaccgaaagcgcaaaatcgacgcagggaccatggcagagccctcggcttcgcccagcaagcgccgtgacagcggggacaacagcgccccgagcggccaggagcgtgaggaccacggtctggagacaggcgatccgccgctgccgccgccgcccgtactgccggggccgggggaggagctcccgggcgcccggctcccggcgcggcccgcgctgcncgnccccncgcgcnccggncccccccnccccccccngngncnctcggcnnctcccnctcccgccncccnntgcccnctttcggcnctntaataccttccnctnctggcngcntcctttccctcctattcctctcccacnccttccagatttncctcaccacaccctcccccccccnncncttcccgncacccctcccgggnctcccgttcacatcgcctcctcctctnaccnccccaacccctcggcttcgctcntttccccacctcctctcncactgaattctcgtattcttaagggaaaagttattttccatacttgaagttatatttccaaacctgagaaatgaagaaagattgttctgacattaaatacctacagttactactgaacctcttaataaggatttgtcaaggatagagtacagttgtaggggaagtattttatgtatgcattcttagagcaaaaagttttgtttaaattctagaattgaaggtactgatcttataaaaagaaattctagcagttttagaaataggtgggaaaaactcaaatattcctcctatctgcaccaaaaagtttatttgtggtatataaaatgaatattgttttataataacttgttaataaagtactttctaatacattctattgactctgttagttgaacaaatagctgacttgaacatctatgcaaacttaagatgggcgggattgttgtaaaagctattgttttaaaagagctttctaaatgtaaagtagtgataatttcaatttgggtagcgtgtttgcaaagcttccaatatttgatgttggttaagctctactatgggcaactgaagatggataaagaaaaatgaaaactgaatcggtgcctgcttccccctgttttcccaggattagaggaaaaaatttattgtataatcagcttcttggttttgaattgcttcgaggcatggttttattccttattactttagacctgtagttttcaacactgacagcactttaaaaatctttgcctgggcctcactcttgagagattctcatttaatagttctgaggtgggtcttggatataactatttttttaaacacctgtcctgtttccctccattcctctcatgtgcagacagggttgagaaccagtagactaatggtcgtttttcctgtttaaaggagataactaatttgagctgaagcaatgcttcttaattagctttgtttttgttttgctctgttggtggctttgttacaactgaattattgtgttattactatttcattgttaaagaaataaagtaagcaatttgtgatgtgagtatcagtgattaagttaactaacttttgtactgcatccagaatgttggttttgcaattgagtaactggttcttgcttgcattttttgttgttgatgacattagatccaaaattcaagacaaatggtaaatgccattgagagggaaagagaaaaacttgattttttttgtgtaatgaaggatttaagaatgggttgacattaataagaatgctttagaacagaagacaaactgtattgcattgtggtcagacatggttcaaagtcttgtactgccacttcctacctatgtatctttaagccagttatttttcatctccaagcctcaaatttctcacctgtaaaatgagaaataataaatagtatctacctcagaaaaaaaaatttattgtca

SEQ ID NO: 387961 - DNA, 944 bp, Homo sapiens
  misc_feature (792)..(792): n is a, c, g, or t
  misc_feature (860)..(860): n is a, c, g, or t
  misc_feature (913)..(913): n is a, c, g, or t
  misc_feature (922)..(922): n is a, c, g, or t
ccaccaaccagcggctccgcctggccagacagagtgcgcgcgcgcacgttgtgcgcaggttcgaatctccgccgcttcgcggttgcttctcaacgtccgggccgcatctcggcggcggcgagggctgagcgcgggagctgcctccgagccggagccccagccctaggccctgcgcgagctgccccgccctaccccctccagcgtcctgtcgcctcctcgcccgacttcggcctgtccctctctcacgcgctcagtcctcgctcttcgccccccgcagctatcggcactcggtctcccgcgcctggcgggctccgcccgagcctctgggcccatggccaagcggcgtgcggccgagccggtgacgttccacgtgccttggaagcggctcctgctttgcgacttcgctgagcagccgccgccaccgcctctctggatccggccgcccggggtcgcgcatgctgggcagctcctcggcgtcccagagcagcaccgaaagcgcaaaatcgacgcagggaccatggcagagccctcggcttcgcccagcaagcgccgtgacagcggggacaacagcgccccgagcggccaggagcgtgaggaccacggtctggagacaggcgatccgccgctgccgccgccgcccgtactgccggggccgggggaggagctcccgggcgcccggctcccggggggcggtggcgacgacggggcggggcgcgcaggacccccgcggggagactggggggtcgcatcgcgccagcacaatgaagaattttgggcagtattaataccttncaatacttggaaggaaatccttttggccttcctaattggatcttgggcaagacatttggaagaatttnaaggtggaaagaccaccccttgacaggaaagccaaccacttttaaggggcaangggaaatgnaaagggggccttgaagggttga

SEQ ID NO: 387962 - DNA, 394 bp, Homo sapiens
gatttcatcgagtacatgaagtacttagatgagacaaaatttaaaatgtatatttgttaaaaatacaaaatagaagattacaaaatcttatatgagtttgcctttaaaacaaatttgttttctgaaaaaaacttaattttttctaagctattgatgctctttgatctctcttttttctctaaagcacaatgaagaattttggcagtataataccttccagtactggaggaatcctttgcctcctattgatctggcagacattgaagatttaagtgaagacaccctgacagaagcaacacttcagggcaggaatgaaggggctgaggttgacatggagtcctgatgtaaggagccgaagcagtgggattggctgatttgaggagatgtctctaag

SEQ ID NO: 387963 - DNA, 2401 bp, Homo sapiens
ccaccaaccagcggctccgcctggccagacagagtgcgcgcgcgcacgttgtgcgcaggttcgaatctccgccgcttcgcggttgcttctcaacgtccgggccgcatctcggcggcggcgagggctgagcgcgggagctgcctccgagccggagccccagccctaggccctgcgcgagctgccccgccctaccccctccagcgtcctgtcgcctcctcgcccgacttcggcctgtccctctctcacgcgctcagtcctcgctcttcgccccccgcagctatcggcactcggtctcccgcgcctggcgggctccgcccgagcctctgggcccatggccaagcggcgtgcggccgagccggtgacgttccacgtgccttggaagcggctcctgctttgcgacttcgctgagcagccgccgccaccgcctctctggatccggccgcccggggtcgcgcatgctgggcagctcctcggcgtcccagagcagcaccgaaagcgcaaaatcgacgcagggaccatggcagagccctcggcttcgcccagcaagcgccgtgacagcggggacaacagcgccccgagcggccaggagcgtgaggaccacggtctggagacaggcgatccgccgctgccgccgccgcccgtactgccggggccgggggaggagctcccgggcgcccggctcccggggggcggtggcgacgacggggcggggcgcgcaggacccccgcggggagactggggggtcgcatcgcgccagcacaatgaagaattttggcagtataataccttccagtactggaggaatcctttgcctcctattgatctggcagacattgaagatttaagtgaagacaccctgacagaagcaacacttcagggcaggaatgaaggggctgaggttgacatggagtcctgatgtaaggagccgaagcagtgggattggctgatttgaggagatgtctctaagtgaattctcgtattcttaagggaaaagttattttccatacttgaagttatatttccaaacctgagaaatgaagaaagattgttctgacattaaatacctacagttactactgaacctcttaataaggatttgtcaaggatagagtacagttgtaggggaagtattttatgtatgcattcttagagcaaaaagttttgtttaaattctagaattgaaggtactgatcttataaaaagaaattctagcagttttagaaataggtgggaaaaactcaaatattcctcctatctgcaccaaaaagtttatttgtggtatataaaatgaatattgttttataataacttgttaataaagtactttctaatacattctattgactctgttagttgaacaaatagctgacttgaacatctatgcaaacttaagatgggcgggattgttgtaaaagctattgttttaaaagagctttctaaatgtaaagtagtgataatttcaatttgggtagcgtgtttgcaaagcttccaatatttgatgttggttaagctctactatgggcaactgaagatggataaagaaaaatgaaaactgaatcggtgcctgcttccccctgttttcccaggattagaggaaaaaatttattgtataatcagcttcttggttttgaattgcttcgaggcatggttttattccttattactttagacctgtagttttcaacactgacagcactttaaaaatctttgcctgggcctcactcttgagagattctcatttaatagttctgaggtgggtcttggatataactatttttttaaacacctgtcctgtttccctccattcctctcatgtgcagacagggttgagaaccagtagactaatggtcgtttttcctgtttaaaggagataactaatttgagctgaagcaatgcttcttaattagctttgtttttgttttgctctgttggtggctttgttacaactgaattattgtgttattactatttcattgttaaagaaataaagtaagcaatttgtgatgtgagtatcagtgattaagttaactaacttttgtactgcatccagaatgttggttttgcaattgagtaactggttcttgcttgcattttttgttgttgatgacattagatccaaaattcaagacaaatggtaaatgccattgagagggaaagagaaaaacttgattttttttgtgtaatgaaggatttaagaatgggttgacattaataagaatgctttagaacagaagacaaactgtattgcattgtggtcagacatggttcaaagtcttgtactgccacttcctacctatgtatctttaagccagttatttttcatctccaagcctcaaatttctcacctgtaaaatgagaaataataaatagtatctacctcagaaaaaaaaatttattgtca

SEQ ID NO: 387964 - DNA, 248 bp, Homo sapiens
ctggaatcgcaatggacgagagattgttgcactcgccgaggagccatactcagagcagcaccgaaagcgcaaaatcgacgcagggaccatggcagagccctcggcttcgcccagcaagcgccgtgacagcggggacaacagcgccccgagcggccaggagcgtgaggaccacggtctggagactcggcgtgtgcatgcacacgccgagtcccatacacttcttcaggggggatcctctaaaagtcgac

SEQ ID NO: 387965 - DNA, 393 bp, Homo sapiens
accactacacaatatatctatgtaacaaaactgcattcttaccccttaaattcatacaaataaaaaaaattaaaaaataaataaagtaggacaatcccccagataaataaattaataaataaataaataaataaataaataaataactttagctcttgccttctcctacacataagttaatgtctgatggggttagtggttatgcttctgtaaactataatcagatgtactcttgcacccaaacttagatgcgattttgcgtatactgaatctttgctacctgtatataaactgtggaactgaaatgctgcattggagcagtctgataggatctgtctaaagggctactctgagggctctaggcttcagtctacagtcctcaggaggactgct

SEQ ID NO: 387966 - DNA, 1954 bp, Homo sapiens
  misc_feature (99)..(99): n is a, c, g, or t
taaagaaaataacctgaaaacacttctgacttttccactgtctctttatatgtgctgataggcaaatgtgcatgcacaccaaacataagcatgtttgtnagggaagcaggaagtatctcagagcctaagaaccatgttttatagtttctttgatcataaacacttggtggtgtcttccacccattatccaggcctgaggggggcagggtggctggtgataagagggagggcagaaaatcaggcctaggcgttttcccttaccattgtcttccatggaatgttttcaagggcctctcaagccccattcatctggtttagccaagttctcagcctggggaacacagtactacttaatgattgaggtttaccatttatagtgatgcttgatttccttttcttaatatatttgtagataaaaattgaacagggacaaagtagctatttaagaaaggaagtgaaccatgttgggtcatatcattttctttagattggatatctatgaagtccacacccctttgagttatgctttttaggcatctatctcatcatctcctgatttaaggataattctgtctggtccttggagctctcttccctaggaattagtgtgtggagtctctatatgcttgtgatccttggagctctcttccctaggaattagtgtgtggagtctctatatgcttgtgattcacaactaaatatgaaatttctcaattcaggagcaggaagcaaagtgctggggtacagttttgcagattggttgaaacacttagccaaacttaagtggcctgggtaggaccatcactcccaaagttgtcagcagagaagggccctctgtgtgagtctattcaaacctggcattgctctgaaattgagtcctcatcccatggggaaggtcttctgggggctttacattccttgttactagtgttctggatattaccttctgcttcccacttcctttttttttttttggagacagagtcttgctctgtcacccaggcttgagtgcaatggtgtgatcttggctccgtgcaacctccactcccggtttcaagcgatcctcctgcctcagcctcccaagtagctgggattacaggtgcacaccaccatgcccagctaatttgtatattttttagtagagacggggtttcaccacgttggccaggctggccttgaactcctgacctcaagtgatccaccctcctcggcctcccagtgatgggattacaggcgtgagccactgctcctggcccccacttccttttgatttctcagatcagtctttcccttctgagccatggccttctgtgcacccagctcagtggctcttcacccctaaaactaagtgaagtcatccttccccaaaaggacccctgggagatgttctggccctctgctgactactcccaggaatcagcacctcaaggactatttgagaatgttgtgctctctattggtcaccttgagactccgttcccctgctgccaactcttctcttctgccctgtgtattctgctgtgatccccttaacggcttttctgtgctactagcttagccctaggccttttatgaatacctgagtcttataacaatgaacttcttgagcaggcagtgtccaacttctttgctcttcagggacctgagtgtgcacctttcccttttgcaggtctatttgacatagtaatctagtgtgttggggaggggtagccaagcaggctgcagtgtctgccatgcagagggcttggggaggtgggtactctccggttggcacttactggggttgattttcccaagagagagggctcttacggggagtgggccaggacctccctggagaagagtccgccactcggtttgtttgcttctggctcttctctctcctcggtgttggggcggcgcctcagagctccggtgtacgcggtctcgccggctcccggggggggggacccaa

SEQ ID NO: 387967 - DNA, 2407 bp, Homo sapiens
  misc_feature (99)..(99): n is a, c, g, or t
  misc_feature (1870)..(1871): n is a, c, g, or t
  misc_feature (1874)..(1875): n is a, c, g, or t
taaagaaaataacctgaaaacacttctgacttttccactgtctctttatatgtgctgataggcaaatgtgcatgcacaccaaacataagcatgtttgtnagggaagcaggaagtatctcagagcctaagaaccatgttttatagtttctttgatcataaacacttggtggtgtcttccacccattatccaggcctgaggggggcagggtggctggtgataagagggagggcagaaaatcaggcctaggcgttttcccttaccattgtcttccatggaatgttttcaagggcctctcaagccccattcatctggtttagccaagttctcagcctggggaacacagtactacttaatgattgaggtttaccatttatagtgatgcttgatttccttttcttaatatatttgtagataaaaattgaacagggacaaagtagctatttaagaaaggaagtgaaccatgttgggtcatatcattttctttagattggatatctatgaagtccacacccctttgagttatgctttttaggcatctatctcatcatctcctgatttaaggataattctgtctggtccttggagctctcttccctaggaattagtgtgtggagtctctatatgcttgtgatccttggagctctcttccctaggaattagtgtgtggagtctctatatgcttgtgattcacaactaaatatgaaatttctcaattcaggagcaggaagcaaagtgctggggtacagttttgcagattggttgaaacacttagccaaacttaagtggcctgggtaggaccatcactcccaaagttgtcagcagagaagggccctctgtgtgagtctattcaaacctggcattgctctgaaattgagtcctcatcccatggggaaggtcttctgggggctttacattccttgttactagtgttctggatattaccttctgcttcccacttcctttttttttttttggagacagagtcttgctctgtcacccaggcttgagtgcaatggtgtgatcttggctccgtgcaacctccactcccggtttcaagcgatcctcctgcctcagcctcccaagtagctgggattacaggtgcacaccaccatgcccagctaatttgtatattttttagtagagacggggtttcaccacgttggccaggctggccttgaactcctgacctcaagtgatccaccctcctcggcctcccagtgatgggattacaggcgtgagccactgctcctggcccccacttccttttgatttctcagatcagtctttcccttctgagccatggccttctgtgcacccagctcagtggctcttcacccctaaaactaagtgaagtcatccttccccaaaaggacccctgggagatgttctggccctctgctgactactcccaggaatcagcacctcaaggactatttgagaatgttgtgctctctattggtcaccttgagactccgttcccctgctgccaactcttctcttctgccctgtgtattctgctgtgatccccttaacggcttttctgtgctactagcttagccctaggccttttatgaatacctgagtcttataacaatgaacttcttgagcaggcagtgtccaacttctttgctcttcagggacctgagtgtgcacctttcccttttgcaggtctatttgacatagtaatctagtgtgttggggaggggtagccaagcaggctgcagtgtctgccatgcagagggcttggggaggtttgggtactctctgctgccactactgggatgatattcagaagagagaggacctcatactgtgactggacccaggaccctccctggaagagagctcagcccagctgtgtgtgtgtgnntgnntgagtgtgtgtgtgtgtgtttgtgtgctgtgctcatgtgcacctgggtgtaaaatgactgttatctggttgtgttactcagggtgggctggggactcaccagaagaatcccccccagctgcccaagacaggtttttcccttgtaccatcttcagagaggtcaggcgaagagggtccacgtgggttaaggggggtcgtatggataaccactaagaacagactgtgccaggaggagtggcggataaatgaagtggcccaggtctgccacactggttggttttccgtcttcttccctcaagaacgcgctgaaggcttgggactgtgcctgggttcaggagctttgtggctcggtgaacccacgtctgggtggacccggttcctcccttaaagggacgcctcttaccacaaaatgggcagtgcgggttatgagataactagactgggtcgtactttctcacaacgcagcaacatggtcgctacagcaagtctatctctcttgacaaattaccaccgacaagcggcgtcatactcga

SEQ ID NO: 387968 - DNA, 1256 bp, Homo sapiens
  misc_feature (719)..(720): n is a, c, g, or t
  misc_feature (723)..(724): n is a, c, g, or t
gcacaggtgggaccgaagaaaaccaagaagcgttctcacccagtgatccaccctcctcggcctcccagtgatgggattacaggcgtgagccactgctcctggcccccacttccttttgatttctcagatcagtctttcccttctgagccatggccttctgtgcacccagctcagtggctcttcacccctaaaactaagtgaagtcatccttccccaaaaggacccctgggagatgttctggccctctgctgactactcccaggaatcagcacctcaaggactatttgagaatgttgtgctctctattggtcaccttgagactccgttcccctgctgccaactcttctcttctgccctgtgtattctgctgtgatccccttaacggcttttctgtgctactagcttagccctaggccttttatgaatacctgagtcttataacaatgaacttcttgagcaggcagtgtccaacttctttgctcttcagggacctgagtgtgcacctttcccttttgcaggtctatttgacatagtaatctagtgtgttggggaggggtagccaagcaggctgcagtgtctgccatgcagagggcttggggaggtttgggtactctctgctgccactactgggatgatattcagaagagagaggacctcatactgtgactggacccaggaccctccctggaagagagctcagcccagctgtgtgtgtgtgnntgnntgagtgtgtgtgtgtgtgtttgtgtgctgtgctcatgtgcacctgggtgtaaaatgactgttatctggttgtgttactcagggtgggctggggactcaccagaagaatcccccccagctgcccaagacaggtttttcccttgtaccatcttcagagaggtcaggcgaagagggtccacgtgggttaaggggggtcgtatggataaccactaagaacagactgtgccaggaggagtggcggataaatgaagtggcccaggtctgccacactggttggttttccgtcttcttccctcaagaacgcgctgaaggcttgggactgtgcctgggttcaggagctttgtggctcggtgaacccacgtctgggtggacccggttcctcccttaaagggacgcctcttaccacaaaatgggcagtgcgggttatgagataactagactgggtcgtactttctcacaacgcagcaacatggtcgctacagcaagtctatctctcttgacaaattaccaccgacaagcggcgtcatactcga

SEQ ID NO: 387969 - DNA, 1160 bp, Homo sapiens
  misc_feature (623)..(624): n is a, c, g, or t
  misc_feature (627)..(628): n is a, c, g, or t
ggtgccccctgggtttatgtgtccatataagtttggagaccccttgttatccccatgagattgatgagtttctgtgcccgtaaaaaaaaaaaaaaaactaagtgaagtcatccttccccaaaaggacccctgggagatgttctggccctctgctgactactcccaggaatcagcacctcaaggactatttgagaatgttgtgctctctattggtcaccttgagactccgttcccctgctgccaactcttctcttctgccctgtgtattctgctgtgatccccttaacggcttttctgtgctactagcttagccctaggccttttatgaatacctgagtcttataacaatgaacttcttgagcaggcagtgtccaacttctttgctcttcagggacctgagtgtgcacctttcccttttgcaggtctatttgacatagtaatctagtgtgttggggaggggtagccaagcaggctgcagtgtctgccatgcagagggcttggggaggtttgggtactctctgctgccactactgggatgatattcagaagagagaggacctcatactgtgactggacccaggaccctccctggaagagagctcagcccagctgtgtgtgtgtgnntgnntgagtgtgtgtgtgtgtgtttgtgtgctgtgctcatgtgcacctgggtgtaaaatgactgttatctggttgtgttactcagggtgggctggggactcaccagaagaatcccccccagctgcccaagacaggtttttcccttgtaccatcttcagagaggtcaggcgaagagggtccacgtgggttaaggggggtcgtatggataaccactaagaacagactgtgccaggaggagtggcggataaatgaagtggcccaggtctgccacactggttggttttccgtcttcttccctcaagaacgcgctgaaggcttgggactgtgcctgggttcaggagctttgtggctcggtgaacccacgtctgggtggacccggttcctcccttaaagggacgcctcttaccacaaaatgggcagtgcgggttatgagataactagactgggtcgtactttctcacaacgcagcaacatggtcgctacagcaagtctatctctcttgacaaattaccaccgacaagcggcgtcatactcga

SEQ ID NO: 387970 - DNA, 133 bp, Homo sapiens
aatgacatgagagtaaggttccagagaggcaggagccagatgatggaagagaagtttagtaagagaaatgggaaggcttgaaagattttaaacagctgaatgatctgccttatttataacttcatgttctttt

SEQ ID NO: 387971 - DNA, 232 bp, Homo sapiens
ctaaaaagggatttcagattcataatgaagaaaagtttgttggatattattttctgaaggtcagtagaggcctgtaaagcagaagactgagctaactggtgacatcatgtgggttgctgtggatttatattaacagctgagcttgtatgccttagtctgggctctatgttctaagtaaaataaagtttcagctggtctgaatttgacgttggcattgttattggcgtatgtt

SEQ ID NO: 387972 - DNA, 354 bp, Homo sapiens
aatcatgccagtttggttcggcatttctattgaaatagatgtaaaataaatgtagataaagatatgtaaatatgaatatatactttttacactcctatagggacagacctaacatactaactgtataaactgaaaccaaatacagagtgatctgcttcaatcaagcaactatttatcattcatttagtatttgctaagtttcaggcagtgttctcaatgatgaagacagaaatggggtgctatgccccaagttaatttctaaatctaattaaatatcaattaaaatatcaaaggcattttaagaacattgcaatctatatgcagggataatcaaataataatatatttttaaaa

SEQ ID NO: 387973 - DNA, 494 bp, Homo sapiens
actggatttccgctcctttgggcctgaggggtttcccaagcactgcgtgccaagtgtggattcagcatatgcaggtgacagcagtcaaggctggccacgtgccagcaactggtgctgggcgctggggactccgctgtgaacgagacagtcttggctcctgcagcgctcacaggccctgggaggaacacagtgcagggcagtgggaagagctacagctctgaagtcacagaggctaggcccacatctcagctctggtccttcctagctgtgtgactgtgcacacgtgactcactccctctgagatcagatttcttggtaatcgtaggtaatagtatatataataactaacgtttctagaatgagttctgtgtgccagcaagttaaggctttctctgattctctcatcagtcctaggagggctacgcattgttatctccatcttttttgatgtgaaactgaggcacagagagattaagaagtttgctccagctggg

SEQ ID NO: 387974 - DNA, 342 bp, Homo sapiens
actatgggaaggtgggtgcccccctgtgcccagggtgtgctctgtgtctgtggttctgggcctgagcccggggtgtgtctgtgtctgtggttctgggcctgagcccggggtgtgtctgtgtctgtggttctgggcctgagccgggggtgtgtctgtgtctgtggttctaggcctgagcccggggtgtgtctgtgtctgtggttctgggcctgagcccggggtgtgtctgtgtctgtggttctgggcctgagccgggggtgtgtctgtgtctgtggttctgggcctgagcccggggtgtgtctgtgtccgtggttctgggcctgtgcccggggtgtgtctgtg

SEQ ID NO: 387975 - DNA, 783 bp, Homo sapiens
gacgcgatgtgatttctgcccagtgctctgaatgtcaaagcaagaacatcccagagattgtggcagtatactccagaatagaacagctgttgacgtctgactgggctgttcacatccccgaggaagatcagcgagatgggtgtgaatgtgaaatgggaacttacctgagtgagagccaagtcaatgaaatagaaatgcagttactaaaggagaaacttcaagagatatatcttcaagcagaagaacaagaggtgttgcctgaagagctctcaaatcgactggaagtggtgaaggaatttctgagaaacaatgaggatcttagaaatggccttacagaagatatgcagaagctagacagcctctgtctacatcaaaaactggattcacaggaacctgggagacaaacacctgacaggaaggcctgaggttgcccgtcaacaaaaatcaggcatgttctgtgaaagtcagcatggcttccatctcagacatccttttctgtgcaaaaggaaaaagttaccagagtattgtacccaaacaaaaaggaatttttgttgttttgtcctggactttcctctaactctttggaactattttaatatttataaacttggggttgtataatctattgcaataaaaaatattagatactctaaaaaaaaacttgctaccaggccaggtgtgatggctcacacctgtaatccccagcactttgggaggccaaggcgggcggatcacctgaggtcaggagttcgagaccagcctggccaacatggcgaaacccca

SEQ ID NO: 387976 - DNA, 420 bp, Homo sapiens
cagcattttactttttcccccctcaaataaaaaaaataaataaaacattctctttcattttaggttgcccgtcaacaaaaatcaggcatgttctgtgaaagtcagcatggcttccatctcagacatccttttctgtgcaaaaggaaaaagttaccagagtattgtacccaaacaaaaaggaatttttgttgttttgtcctggactttcctctaactctttggaactattttaatatttataaacttggggttgtataatctattgcaataaaaaatattagatactctaaaaaaaaacttgctaccaggccaggtgtgatggctcacacctgtaatccccagcactttgggaggccaaggcgggcggatcacctgaggtcaggagttcgagaccagcctggccaacatggcgaaacccca

SEQ ID NO: 387977 - DNA, 1324 bp, Homo sapiens
ggagacatggtgctgtcggagctagcggcgcgcctcaactgcgccgagtacaagaactgggtgaaggcgggccactgcctgttactgctgcgcagctgcctgcagggtttcgtcggccgcgaggtgctctccttccaccgcggcctactcgccgcagcccccggcctggggccccgcgccgtctgccgcggcggctcacggtgcagccctcgcgcccgccagtttcagcctcagtgtcaggtgtgcgctgaatggaaaagggagattttgagacatcatgtcaacagaaatggagatgtgcactggggaaactgccggccgggccgctggcccgtggacgcctgggaggtggccaaggccttcatgccccgaggactagcagacaaacaaggacctgaggaatgtgatgcagttgctcttttaagtctcatcaactcctgcgatcacttcgtggttgatcgaaagaaagtcacagaggtaattaaatgtcgtaatgagatcatgcactcttcagagatgaaagtatcttctacgtggcttcgagattttcagatgaagatccaaaattttctgaatgaattcaagaacatcccagagattgtggcagtatactccagaatagaacagctgttgacgtctgactgggctgttcacatccccgaggaagatcagcgagatgggtgtgaatgtgaaatgggaacttacctgagtgagagccaagtcaatgaaatagaaatgcagttactaaaggagaaacttcaagagatatatcttcaagcagaagaacaagaggtgttgcctgaagagctctcaaatcgactggaagtggtgaaggaatttctgagaaacaatgaggatcttagaaatggccttacagaagatatgcagaagctagacagcctctgtctacatcaaaaactggattcacaggaacctgggagacaaacacctgacaggaaggcctgaggttgcccgtcaacaaaaatcaggcatgttctgtgaaagtcagcatggcttccatctcagacatccttttctgtgcaaaaggaaaaagttaccagagtattgtacccaaacaaaaaggaatttttgttgttttgtcctggactttcctctaactctttggaactattttaatatttataaacttggggttgtataatctattgcaataaaaaatattagatactctaaaaaaaaacttgctaccaggccaggtgtgatggctcacacctgtaatccccagcactttgggaggccaaggcgggcggatcacctgaggtcaggagttcgagaccagcctggccaacatggcgaaacccca

SEQ ID NO: 387978 - DNA, 1310 bp, Homo sapiens
ggagacatggtgctgtcggagctagcggcgcgcctcaactgcgccgagtacaagaactgggtgaaggcgggccactgcctgttactgctgcgcagctgcctgcagggtttcgtcggccgcgaggtgctctccttccaccgcggcctactcgccgcagcccccggcctggggccccgcgccgtctgccgcggcggctcacggtgcagccctcgcgcccgccagtttcagcctcagtgtcaggtgtgcgctgaatggaaaagggagattttgagacatcatgtcaacagaaatggagatgtgcactggggaaactgccggccgggccgctggcccgtggacgcctgggaggtggccaaggccttcatgccccgaggactagcagacaaacaaggacctgaggaatgtgatgcagttgctcttttaagtctcatcaactcctgcgatcacttcgtggttgatcgaaagaaagtcacagaggtaattaaatgtcgtaatgagatcatgcactcttcagagatgaaagtatcttctacgtggcttcgagattttcagatgaagatccaaaattttctgaatgaattcaagaacatcccagagattgtggcagtatactccagaatagaacagctgttgacgtctgactgggctgttcacatccccgaggaagatcagcgagatgggtgtgaatgtgaaatgggaacttacctgagtgagagccaagtcaatgaaatagaaatgcagttactaaaggagaaacttcaagagatatatcttcaagcagaagaacaagaggtgttgcctgaagagctctcaaatcgactggaagtggtgaaggaatttctgagaaacaatgaggatcttagaaatggccttacagaagatatgcagaagctagacagcctctgtctacatcaaaaactggattcacaggaacctgggagacaaacacctgacaggaaggcctgaggtgagttcaggcagatgatggtgttaaagaaggacagaatcacctcatctctttcatgtctattctctcatgtgaggccatcatgaacacacaacaatctaatctgaagtttgcctttgtccttattgtttcaaagaaaggacactgaggtttgtgttcttcacttaatgattcttacgtctgtgaagtaattcagcatcaactccctgtttagccaaatacacctgaagtcattggtctagaattaaatgaatcagctttataacataatcaaaaagcatttctgccttaaaatgacaccattgatgcctagctcttaccatggcattaatagcaattgact

SEQ ID NO: 387979 - DNA, 1091 bp, Homo sapiens
ttctctctctctctctgtttctttcttgtctcactctgttgcccaagctggaattcagtggcgaaatcatggctcactgcagcaactctgcaggctcaatccatcctccacctcagcctcttgagccttcatgccccgaggactagcagacaaacaaggacctgaggaatgtgatgcagttgctcttttaagtctcatcaactcctgcgatcacttcgtggttgatcgaaagaaagtcacagaggtaattaaatgtcgtaatgagatcatgcactcttcagagatgaaagtatcttctacgtggcttcgagattttcagatgaagatccaaaattttctgaatgaattcaagaacatcccagagattgtggcagtatactccagaatagaacagctgttgacgtctgactgggctgttcacatccccgaggaagatcagcgagatgggtgtgaatgtgaaatgggaacttacctgagtgagagccaagtcaatgaaatagaaatgcagttactaaaggagaaacttcaagagatatatcttcaagcagaagaacaagaggtgttgcctgaagagctctcaaatcgactggaagtggtgaaggaatttctgagaaacaatgaggatcttagaaatggccttacagaagatatgcagaagctagacagcctctgtctacatcaaaaactggattcacaggaacctgggagacaaacacctgacaggaaggcctgaggttgcccgtcaacaaaaatcaggcatgttctgtgaaagtcagcatggcttccatctcagacatccttttctgtgcaaaaggaaaaagttaccagagtattgtacccaaacaaaaaggaatttttgttgttttgtcctggactttcctctaactctttggaactattttaatatttataaacttggggttgtataatctattgcaataaaaaatattagatactctaaaaaaaaacttgctaccaggccaggtgtgatggctcacacctgtaatccccagcactttgggaggccaaggcgggcggatcacctgaggtcaggagttcgagaccagcctggccaacatggcgaaacccca

SEQ ID NO: 387980 - DNA, 261 bp, Homo sapiens
aacgagtctttaaggaagaacactcagctctctaacattaaaagacacaaaggcaggaaaaccaatacattcacactggagggtggagggtgcagggtgcattcgacaggctccttaggctaggagcgcagagtccaaagagcgcagccctgcctcagatatgggttcctgtgctggaacctcagctactaactttctccttcttctttgagatggagtctccctctgtcgcccaggctggagtgcagtggcacgatctcc

SEQ ID NO: 387981 - DNA, 1857 bp, Homo sapiens
  misc_feature (1469)..(1469): n is a, c, g, or t
cacgccgcccctcctttccctttccgctctctccgcctccggaagcgcggggcgccgggagcccgttcagggccgcgggagtgcgccagcgccgcgcgtggggctgtggtggccgcggctctcaggtgaggggcgcgcgagcggctcctggctccctgctcgcggggcgcccgccacgctcctttccgttcgcatccgtctccccgctccggagcccaggcggcggcgagtactcgggatatatttttgccatcatggatcagtttggagatatattagaaggtgaagtggaccattctttctttgacagtgactttgaagaaggaaagaaatgtgaaactaactcagtttttgacaagcaaaatgatgacccaaaggaaagaatagataaagatacaaaaaatgtaaattcgaacactggaatgcaaacaacagaaaattatcttactgagaagggaaatgaaagaaacgtgaaatttcccccagaacaccccgtagagaatgatgttacacaaactgtaagttctttctcattgccagcctcttcaagatcaaaaaaattgtgtgatgttacaacaggacttaaaatacacgtgtccattccaaatagaattcccaaaattgtaaaagaaggtgaagatgattactacacagatggagaggaaagcagtgatgatgggaagaaataccatgtgaagtccaagtccgctaaaccatctactaacgttaaaaaaagcataaggaaaaagtattgcaaagttagctcctcttcctcctcctctttatcttcctcatcttcaggttcaggtacagattgtttagatgcagggtctgatagccatctatctgattcgtctccgtcatctaagtcatctaagaaacatgtatctggtataaccctcctgtcaccaaaacacaagtataaatcaggaataaaatcgacagaaacacagccttcaagtactacaccaaaatgtggccactaccctgaggagtctgaagatactgtgactgacgtaagtcccttatcaactccagacattagccctcttcagtcttttgaactgggcatagcaaatgatcaaaaagtgaaaattaaaaagcaagaaaatgtgagccaagaaatatatgaagatgttgaggatttgaaaaataattcaaaatatttgaaagcagccaaaaaagggaaagaaaaacatgagcctgatgtctcctcaaagtcgtcttcagtgttagactccagtttagaccacagacataaacagaaagtcttacatgacacaatggatctgaatcatctcttgaaagcttttctgcaattagataaaaaaggaccacaaaaacatcactttgatcagccttcagtagcacccgggaaaaactactctttcacaagagaagaggtgagacagatcgatcgggaaaatcagaggcttttgaaagaactgtcaagacaggcggaaaagccnggaagcaaaagtacaattcctagatcggtgatcatcccccaaagttatatcacagtgctctcaacagacagaaggaacaacaaaggattgagagagaaaacttggctttattgaaaaggcttgaggccgtgaaaccaacagttggtatgaaacgttcagaacaactgatggactatcatcgcaatatgggctatctcaactcatcaccattgtcaagacggcagatcatcttgggcattagccattagagttcgaatcaggtacgagggccaggggagagaggggggaagggggacctccagtggcctgaaaattaaccttggagtggttaaatttttatgccattggggggtttaacttgtataacaggcgggttttattaaaaggg

SEQ ID NO: 387982 - DNA, 1624 bp, Homo sapiens
  misc_feature (1236)..(1236): n is a, c, g, or t
tccttgtaatccaagcagtcgcagaaaatagaaaatgatatattagaaggtgaagtggaccattctttctttgacagtgactttgaagaaggaaagaaatgtgaaactaactcagtttttgacaagcaaaatgatgacccaaaggaaagaatagataaagatacaaaaaatgtaaattcgaacactggaatgcaaacaacagaaaattatcttactgagaagggaaatgaaagaaacgtgaaatttcccccagaacaccccgtagagaatgatgttacacaaactgtaagttctttctcattgccagcctcttcaagatcaaaaaaattgtgtgatgttacaacaggacttaaaatacacgtgtccattccaaatagaattcccaaaattgtaaaagaaggtgaagatgattactacacagatggagaggaaagcagtgatgatgggaagaaataccatgtgaagtccaagtccgctaaaccatctactaacgttaaaaaaagcataaggaaaaagtattgcaaagttagctcctcttcctcctcctctttatcttcctcatcttcaggttcaggtacagattgtttagatgcagggtctgatagccatctatctgattcgtctccgtcatctaagtcatctaagaaacatgtatctggtataaccctcctgtcaccaaaacacaagtataaatcaggaataaaatcgacagaaacacagccttcaagtactacaccaaaatgtggccactaccctgaggagtctgaagatactgtgactgacgtaagtcccttatcaactccagacattagccctcttcagtcttttgaactgggcatagcaaatgatcaaaaagtgaaaattaaaaagcaagaaaatgtgagccaagaaatatatgaagatgttgaggatttgaaaaataattcaaaatatttgaaagcagccaaaaaagggaaagaaaaacatgagcctgatgtctcctcaaagtcgtcttcagtgttagactccagtttagaccacagacataaacagaaagtcttacatgacacaatggatctgaatcatctcttgaaagcttttctgcaattagataaaaaaggaccacaaaaacatcactttgatcagccttcagtagcacccgggaaaaactactctttcacaagagaagaggtgagacagatcgatcgggaaaatcagaggcttttgaaagaactgtcaagacaggcggaaaagccnggaagcaaaagtacaattcctagatcggtgatcatcccccaaagttatatcacagtgctctcaacagacagaaggaacaacaaaggattgagagagaaaacttggctttattgaaaaggcttgaggccgtgaaaccaacagttggtatgaaacgttcagaacaactgatggactatcatcgcaatatgggctatctcaactcatcaccattgtcaagacggcagatcatcttgggcattagccattagagttcgaatcaggtacgagggccaggggagagaggggggaagggggacctccagtggcctgaaaattaaccttggagtggttaaatttttatgccattggggggtttaacttgtataacaggcgggttttattaaaaggg

SEQ ID NO: 387983 - DNA, 1744 bp, Homo sapiens
  misc_feature (1356)..(1356): n is a, c, g, or t
cacgccgcccctcctttccctttccgctctctccgcctccggaagcgcggggcgccgggagcccgttcagggccgcgggagtgcgccagcgccgcgcgtggggctgtggtggccgcggctctcagatatatttttgccatcatggatcagtttggagatatattagaaggtgaagtggaccattctttctttgacagtgactttgaagaaggaaagaaatgtgaaactaactcagtttttgacaagcaaaatgatgacccaaaggaaagaatagataaagatacaaaaaatgtaaattcgaacactggaatgcaaacaacagaaaattatcttactgagaagggaaatgaaagaaacgtgaaatttcccccagaacaccccgtagagaatgatgttacacaaactgtaagttctttctcattgccagcctcttcaagatcaaaaaaattgtgtgatgttacaacaggacttaaaatacacgtgtccattccaaatagaattcccaaaattgtaaaagaaggtgaagatgattactacacagatggagaggaaagcagtgatgatgggaagaaataccatgtgaagtccaagtccgctaaaccatctactaacgttaaaaaaagcataaggaaaaagtattgcaaagttagctcctcttcctcctcctctttatcttcctcatcttcaggttcaggtacagattgtttagatgcagggtctgatagccatctatctgattcgtctccgtcatctaagtcatctaagaaacatgtatctggtataaccctcctgtcaccaaaacacaagtataaatcaggaataaaatcgacagaaacacagccttcaagtactacaccaaaatgtggccactaccctgaggagtctgaagatactgtgactgacgtaagtcccttatcaactccagacattagccctcttcagtcttttgaactgggcatagcaaatgatcaaaaagtgaaaattaaaaagcaagaaaatgtgagccaagaaatatatgaagatgttgaggatttgaaaaataattcaaaatatttgaaagcagccaaaaaagggaaagaaaaacatgagcctgatgtctcctcaaagtcgtcttcagtgttagactccagtttagaccacagacataaacagaaagtcttacatgacacaatggatctgaatcatctcttgaaagcttttctgcaattagataaaaaaggaccacaaaaacatcactttgatcagccttcagtagcacccgggaaaaactactctttcacaagagaagaggtgagacagatcgatcgggaaaatcagaggcttttgaaagaactgtcaagacaggcggaaaagccnggaagcaaaagtacaattcctagatcggtgatcatcccccaaagttatatcacagtgctctcaacagacagaaggaacaacaaaggattgagagagaaaacttggctttattgaaaaggcttgaggccgtgaaaccaacagttggtatgaaacgttcagaacaactgatggactatcatcgcaatatgggctatctcaactcatcaccattgtcaagacggcagatcatcttgggcattagccattagagttcgaatcaggtacgagggccaggggagagaggggggaagggggacctccagtggcctgaaaattaaccttggagtggttaaatttttatgccattggggggtttaacttgtataacaggcgggttttattaaaaggg

SEQ ID NO: 387984 - DNA, 1727 bp, Homo sapiens
  misc_feature (1339)..(1339): n is a, c, g, or t
atggaaaattttgctgcaggtgtcagcggcgctggtaattcctgagctcagcaaccccgatggataccattatctccatctacacagcggggaactgaagcacaggagatatatttttgccatcatggatcagtttggagatatattagaaggtgaagtggaccattctttctttgacagtgactttgaagaaggaaagaaatgtgaaactaactcagtttttgacaagcaaaatgatgacccaaaggaaagaatagataaagatacaaaaaatgtaaattcgaacactggaatgcaaacaacagaaaattatcttactgagaagggaaatgaaagaaacgtgaaatttcccccagaacaccccgtagagaatgatgttacacaaactgtaagttctttctcattgccagcctcttcaagatcaaaaaaattgtgtgatgttacaacaggacttaaaatacacgtgtccattccaaatagaattcccaaaattgtaaaagaaggtgaagatgattactacacagatggagaggaaagcagtgatgatgggaagaaataccatgtgaagtccaagtccgctaaaccatctactaacgttaaaaaaagcataaggaaaaagtattgcaaagttagctcctcttcctcctcctctttatcttcctcatcttcaggttcaggtacagattgtttagatgcagggtctgatagccatctatctgattcgtctccgtcatctaagtcatctaagaaacatgtatctggtataaccctcctgtcaccaaaacacaagtataaatcaggaataaaatcgacagaaacacagccttcaagtactacaccaaaatgtggccactaccctgaggagtctgaagatactgtgactgacgtaagtcccttatcaactccagacattagccctcttcagtcttttgaactgggcatagcaaatgatcaaaaagtgaaaattaaaaagcaagaaaatgtgagccaagaaatatatgaagatgttgaggatttgaaaaataattcaaaatatttgaaagcagccaaaaaagggaaagaaaaacatgagcctgatgtctcctcaaagtcgtcttcagtgttagactccagtttagaccacagacataaacagaaagtcttacatgacacaatggatctgaatcatctcttgaaagcttttctgcaattagataaaaaaggaccacaaaaacatcactttgatcagccttcagtagcacccgggaaaaactactctttcacaagagaagaggtgagacagatcgatcgggaaaatcagaggcttttgaaagaactgtcaagacaggcggaaaagccnggaagcaaaagtacaattcctagatcggtgatcatcccccaaagttatatcacagtgctctcaacagacagaaggaacaacaaaggattgagagagaaaacttggctttattgaaaaggcttgaggccgtgaaaccaacagttggtatgaaacgttcagaacaactgatggactatcatcgcaatatgggctatctcaactcatcaccattgtcaagacggcagatcatcttgggcattagccattagagttcgaatcaggtacgagggccaggggagagaggggggaagggggacctccagtggcctgaaaattaaccttggagtggttaaatttttatgccattggggggtttaacttgtataacaggcgggttttattaaaaggg

SEQ ID NO: 387985 - DNA, 679 bp, Homo sapiens
agacagggaacgccgggagcaggaccgggcgcggaggctggggccggggacccggggcggcgggtccgagtgggagaaaggagcggcggagggggcctagagttactcgggctcccgggactccccgaagggcagaaataagtttctaaaaataggcagcggcctgccggaagaagctgtgggcggtgcaggagggatccggaagagacgaggcaggaagaaactcctggtcctttcgcttttaaggaacgtgccacctagacaagtgttccagcctccggtgaaccagtcttcctagtgagagcacgagaagcccgttgtccttcattcctcagctatggatttccctgaaagttgagaactgaccatattctcgatgcctcctccgacctgtgatttcatgactcacatcgcttccccagaacctgcttaacagacgggattcctgagaatggagcagagtttgaattcagagtcctggctttgccataccagcagttataattgtccttctgttgtttgatgacctccctgccctgcttcaaaaggaagagaaatcaaagagttgacgaccctgagcgcaaggcctgggacgttcttccccaaactcgctttaatatcaccttctcaaaagaactcttccctgaacaccttgtctcaagatgttctctagtttgtc

SEQ ID NO: 387986 - DNA, 588 bp, Homo sapiens
agacagggaacgccgggagcaggaccgggcgcggaggctggggccggggacccggggcggcgggtccgagtgggagaaaggagcggcggagggggcctagagttactcgggctcccgggactccccgaagggcagaaataagtttctaaaaataggcagcggcctgccggaagaatgttccagcctccggtgaaccagtcttcctagtgagagcacgagaagcccgttgtccttcattcctcagctatggatttccctgaaagttgagaactgaccatattctcgatgcctcctccgacctgtgatttcatgactcacatcgcttccccagaacctgcttaacagacgggattcctgagaatggagcagagtttgaattcagagtcctggctttgccataccagcagttataattgtccttctgttgtttgatgacctccctgccctgcttcaaaaggaagagaaatcaaagagttgacgaccctgagcgcaaggcctgggacgttcttccccaaactcgctttaatatcaccttctcaaaagaactcttccctgaacaccttgtctcaagatgttctctagtttgtc

SEQ ID NO: 387987 - DNA, 326 bp, Homo sapiens
aggccctgggaagagggtcgccggaccagtggggaaggccgtgcaggagatggagagccgggaaccaagaacctgcttaacagacgggattcctgagaatggagcagagtttgaattcagagtcctggctttgccataccagcagttataattgtccttctgttgtttgatgacctccctgccctgcttcaaaaggaagagaaatcaaagagttgacgaccctgagcgcaaggcctgggacgttcttccccaaactcgctttaatatcaccttctcaaaagaactcttccctgaacaccttgtctcaagatgttctctagtttgtc

SEQ ID NO: 387988 - DNA, 811 bp, Homo sapiens
agacagggaacgccgggagcaggaccgggcgcggaggctggggccggggacccggggcggcgggtccgagtgggagaaaggagcggcggagggggcctagagttactcgggctcccgggactccccgaagggcagaaataagtttctaaaaataggcagcggcctgccggaagaagctgtgggcggtgcaggagggatccggaagagacgaggcaggaagaaactcctggtcctttcgcttttaaggaacgtgccacctagacaagaaggcctgggtgtcagccagaccacacatggatccttgagccatcctatgggaatatgacctgagaggcccttcccattgactcagcagcgggatggagaaaccccagcatatcatggtttcgtggactgaaaatccatccggggtcatctgctggggtcctgcctgtgcctcctcaacactcagagtccctaaggtgatgactgcagctatgaccctgctgagagctttctcctgatgccagggcacacttggcccactcactggacaagacagaagtactggagatgttgtactcacagaaatgttgttcagccaatgacagggaattgatgatgatgttagtatcctctccccttgtactggataaacctgagtgttcttgtgtccgggaggtccccagtgggattgagctccagttgtccacagaggggaatttcttcatcacacctgatttcttggcagccttttcctccctgtgtcactccctaatctgttaacggtgttccctgggatcatcccccaaataaactacctggccttgca

SEQ ID NO: 387989 - DNA, 904 bp, Homo sapiens
agcagtcaggccaggtaagagcccctcgccttaactggtttgtgctgaagagacttcttgacttcctgcataggctcccccaccaccaggatgatgggggactcctgtgcagccccactccctctgtcccaaggccaggatctccattcccagtaactcttgcgaggtccccacatcacccaaggctctggctttgtgcaggttcagagtctgcctctcatgcgtgctgtgaccactgcagactcacagactgaggagcggctcagcccttcagtgatgagacggtgcaacatgtttgtggatcagaggagtcagggtcagcagattaattgatccttaattgttgttggggaagttttcttttcctcttccaagtgaatgctatcaacacacttttccaagagtcattttgaattttcctaatttacaactgcaaagcccaccttcctgtccgttgctgaatatcacaaggtctcctattatcctgaatgtctccagatcggctttctgtgactgaggtggagcaaggtgttttctcctatacttgaatgtcaagagttttcatacagctacctgaatatcatgaagcatcatttttcccatctgatcatcaggaactagcatctcacctaccagagtgtgacaaatgcttattgcaaacacctgaatgttaaaacatttcccatcgcctgcaagtgtcaggaggtcacactcttacctgcatgagggcagccttacctcttctacctgaattgccagaggccctcatcgctccacctacaggttaagaattctcacctccaccacccaagtgtcaccctgtcgcactttctctacctgaaaatcaagaggtcttacatcttccagctgaatgtcaagaggttgtattttacctatatgaatg

SEQ ID NO: 387990 - DNA, 793 bp, Homo sapiens
aggtaagagcccctcgccttaactggtttgtgctgaagagacttcttgacttcctgcataggctcccccaccaccaggatgatgggggactcctgtgcagccccactccctctgtcccaaggccaggatctccattcccagtaactcttgcgaggtccccacatcacccaaggctctggctttgtgcaggttcagagtctgcctctcatgcgtgctgtgaccactgcagactcacagactgaggagcggctcagcccttcagtgatgagacggtgcaacatgtttgtggatcagaggagtcagggtcagcagattaattgatccttaattgttgttggggaagttttcttttcctcttccaagtgaatgctatcaacacacttttccaagagtcattttgaattttcctaatttacaactgcaaagcccaccttcctgtccgttgctgaatatcacaaggtctcctattatcctgaatgtctccagatcggctttctgtgactgaggtggagcaaggtgttttctcctatacttgaatgtcaagagttttcatacagctacctgaatatcatgaagcatcatttttcccatctgatcatcaggaactagcatctcacctaccagagtgtgacaaatgcttattgcaaacacctgaatgttaaaacatttcccatcgcctgcaagtgtcaggaggtcacactcttacctgcatgagggcagccttacctcttctacctgaatgtaagatctcaaccagcccgagggtcaataggttgcacatcatctaagtggg

SEQ ID NO: 387991 - DNA, 2512 bp, Homo sapiens
gagcgggtcgggggccgaagcgcctcccgcagggagtccccgtgaggccgcgctgccgcgttacccgcagcggccgggggtccggggagtgcggggctccgagacagagccaggcgccccccagcggtcggcgcgggccccatggctgggccgggcggagcggaaccggtgaggtgaagccccggggccggcagccggaggcgcgtggccggggcgccggctccatgggcagcggcacacggcggcgcgatgatggacgttaacagcagcggccgcccggacctctacgggcacctccgctctttccttctgccagaagtggggcgcgggctgcccgacttgagccccgacggtggcgccgacccggtcgcgggctcctgggcgccgcacctgctgagcgaggtgacagccagcccggcgcccacctgggacgcgcccccggacaatgcctccggctgtggggaacagatcaactacggcagagtcgagaaagttgtgatcggctccatcctgacgctcatcacgctgctgacgatcgcgggcaactgcctggtggtgatctccgtgtgcttcgtcaagaagctccgccagccctccaactacctgatcgtgtccctggcgctggccgacctctcggtggctgtggcggtcatgcccttcgtcagcgtcaccgacctcatcgggggcaagtggatctttggacactttttctgtaatgtcttcatcgccatggacgtcatgtgctgcacggcctcgatcatgaccctgtgcgtgatcagcattgacaggtaccttgggatcacaaggcccctcacataccctgtgaggcagaatgggaaatgcatggcgaagatgattctctccgtctggcttctctccgcctccatcaccttacctccactctttggatgggctcagaatgtaaatgatgataaggtgtgcttgatcagccaggactttggctatacgatttactctaccgcagtggcattttatatccccatgtccgtcatgcttttcatgtactaccagatttacaaggctgccaggaagagtgctgccaaacacaagtttcctggcttccctcgagtggagccagacagcgtcatcgccctgaatggcatagtgaagctccagaaggaggtggaagagtgtgcaaacctttcgagactcctcaagcatgaaaggaaaaacatctccatctttaagcgagaacagaaagcagccaccaccctggggatcatcgtcggggcctttaccgtgtgctggctgccatttttcctcctctcgacagccagacccttcatctgtggcacttcctgcagctgcatcccactgtgggtggagaggacatttctgtggctaggctatgcaaactctctcattaacccttttatatatgccttcttcaaccgggacctgaggaccacctatcgcagcctgctccagtgccagtaccggaatatcaaccggaagctctcagctgcaggcatgcatgaagccctgaagcttgctgagaggccagagagacctgagtttgtgctacaaaatgctgactactgtagaaaaaaaggtcatgattcatgattgaaagcagaacaatggagatgaaataaacaaggcaaaatagaggtggaaacagaaggaagtcatttgctgagtctgcagaatggaatgcagcttctgtcctttcttgggatgtctaaaacatgacaaacagggtgatctgttgtacacactatcttatgagggagatggtgacttctccttttttctgtggatcagtgctattgtgtgttctcagtttaagatagcagatcatctcagcagtaagcacaccaacagaactgagttccagaaaggaagcagtttctggtgctttgcatatgtccaaatccatgcaagtgggagaaagttccagtgcacacttcccatgcttctgagtctaggcgttgtggtgaatatgcaggaatcattcatgagacagaatgtattttgttgtatgacagaaggcttttccaagcaaactgcggtgagcgtagtgttgaatatgttgcatgtccatgttagaaaacagaatccagtcatcagctaatacaaatgatttcccagagcagtgtttgtttcaagcttctgtccaaatagtttgggcttttctggcagggtctctgtgatttccccacctatgtacttttctgtgttaactcacttattatggtataactcaggaacaggtctcaggatggagagaagcatacaacatgagcaaagctttttctcgtgctctgaagggtcttgagaggggagtgggatgccttctgtgaggaattttatcgcagtgaagctcaagtgggtacccaactgcgttgtaattaacatgattattgggcatgtttttgactctcattttctacaagggctgcagtggggcccaccccaggggctgggcccataactgtatgttatgtggggaaggaagtgtgggggaatgatgggttttccatgaaatgtg

SEQ ID NO: 387992 - DNA, 2610 bp, Homo sapiens
gagcgggtcgggggccgaagcgcctcccgcagggagtccccgtgaggccgcgctgccgcgttacccgcagcggccgggggtccggggagtgcggggctccgagacagagccaggcgccccccagcggtcggcgcgggccccatggctgggccgggcggagcggaaccggtgaggtgaagccccggggccggcagccggaggcgcgtggccggggcgccggctccatgggcagcggcacacggcggcgcgatgatggacgttaacagcagcggccgcccggacctctacgggcacctccgctctttccttctgccagaagtggggcgcgggctgcccgacttgagccccgacggtggcgccgacccggtcgcgggctcctgggcgccgcacctgctgagcgaggtgacagccagcccggcgcccacctgggacgcgcccccggacaatgcctccggctgtggggaacagatcaactacggcagagtcgagaaagttgtgatcggctccatcctgacgctcatcacgctgctgacgatcgcgggcaactgcctggtggtgatctccgtgtgcttcgtcaagaagctccgccagccctccaactacctgatcgtgtccctggcgctggccgacctctcggtggctgtggcggtcatgcccttcgtcagcgtcaccgacctcatcgggggcaagtggatctttggacactttttctgtaatgtcttcatcgccatggacgtcatgtgctgcacggcctcgatcatgaccctgtgcgtgatcagcattgacaggtaccttgggatcacaaggcccctcacataccctgtgaggcagaatgggaaatgcatggcgaagatgattctctccgtctggcttctctccgcctccatcaccttacctccactctttggatgggctcagaatgtaaatgatgataaggtgtgcttgatcagccaggactttggctatacgatttactctaccgcagtggcattttatatccccatgtccgtcatgcttttcatgtactaccagatttacaaggctgccaggaagagtgctgccaaacacaagtttcctggcttccctcgagtggagccagacagcgtcatcgccctgaatggcatagtgaagctccagaaggaggtggaagagtgtgcaaacctttcgagactcctcaagcatgaaaggaaaaacatctccatctttaagcgagaacagaaagcagccaccaccctggggatcatcgtcggggcctttaccgtgtgctggctgccatttttcctcctctcgacagccagacccttcatctgtggcacttcctgcagctgcatcccactgtgggtggagaggacatttctgtggctaggctatgcaaactctctcattaacccttttatatatgccttcttcaaccgggacctgaggaccacctatcgcagcctgctccagtgccagtaccggaatatcaaccggaagctctcagctgcaggcatgcatgaagccctgaagcttgctgagaggccagagagacctgagtttgtgctgagggcctgcacaaggagggtgctgttgagaccagaaaagaggccaccggtatctgtgtgggtgctacaatctccagaccatcacaattggttagcagacaaaatgctgactactgtagaaaaaaaggtcatgattcatgattgaaagcagaacaatggagatgaaataaacaaggcaaaatagaggtggaaacagaaggaagtcatttgctgagtctgcagaatggaatgcagcttctgtcctttcttgggatgtctaaaacatgacaaacagggtgatctgttgtacacactatcttatgagggagatggtgacttctccttttttctgtggatcagtgctattgtgtgttctcagtttaagatagcagatcatctcagcagtaagcacaccaacagaactgagttccagaaaggaagcagtttctggtgctttgcatatgtccaaatccatgcaagtgggagaaagttccagtgcacacttcccatgcttctgagtctaggcgttgtggtgaatatgcaggaatcattcatgagacagaatgtattttgttgtatgacagaaggcttttccaagcaaactgcggtgagcgtagtgttgaatatgttgcatgtccatgttagaaaacagaatccagtcatcagctaatacaaatgatttcccagagcagtgtttgtttcaagcttctgtccaaatagtttgggcttttctggcagggtctctgtgatttccccacctatgtacttttctgtgttaactcacttattatggtataactcaggaacaggtctcaggatggagagaagcatacaacatgagcaaagctttttctcgtgctctgaagggtcttgagaggggagtgggatgccttctgtgaggaattttatcgcagtgaagctcaagtgggtacccaactgcgttgtaattaacatgattattgggcatgtttttgactctcattttctacaagggctgcagtggggcccaccccaggggctgggcccataactgtatgttatgtggggaaggaagtgtgggggaatgatgggttttccatgaaatgtg

SEQ ID NO: 387993 - DNA, 377 bp, Homo sapiens
ctactactaaattcgcggccgcgtcgacctcctggcctcaagcagtcctcctgcctcagcctcccaaagcactgggatttacaggcatgagccaccgtgcttggccagcaactagcttgttaaggatgtttggcccctactcagtggggttggtaagctcacctcatcctttcctttacaggatctgtggcaaatcctagccccctttgaatccttttcagacttcgtttcccacaacactcctgtcagagttagcaggagagtggaaacaagtactagattatttagtagaccctagattttctctacaaatgtaaaatgttatttttactgttgaaaatcagcatatgtgtagtacagaaaatttaggaagtgga

SEQ ID NO: 387994 - DNA, 385 bp, Homo sapiens
actcctgacctcatgatctacccgcctcggcctgggattacaagcatgagccaccgcccggcctggttgtgtttttataagtcagggtcctttcccagacctccacatacagcactcttttttttttttttaaactaaaagtgtttttttgtatggatgggatctcgctgtgttacccaggctagtcttgaactcctggcctcaagcagtcctcctgcctcagcctcccaaagcactgggatttacaggcatgagccaccgtgcttggccagcaactagcttgttaaggatgtttggcccctactcagtggggttggtaagctcacctcatcctttcctttacaggatctgtggcaaatcctagccccctttgaatccttttcag

SEQ ID NO: 387995 - DNA, 326 bp, Homo sapiens
cctcaagcagtcctcctgcctcagcctcccaaagcactgggatttacaggcatgagccaccgtgcttggccagcaactagcttgttaaggatgtttggcccctactcagtggggttggtaagctcacctcatcctttcctttacaggatctgtggcaaatcctagccccctttgaatccttttcagacttcgtttcccacaacactcctgtcagagttagcaggagagtggaaacaagtactagattatttagtagaccctagattttctctacaaatgtaaaatgttatttttactgttgaaaatcagcatatgtgtagtacaga

SEQ ID NO: 387996 - DNA, 607 bp, Homo sapiens
cttcgggtggcccctcagcatgaccgtccctcaaggctccattctctcttgactccaggattctcccattctgaattttgttgagcctctggctttgggtctgctggtgtacttcccccaggtccaggcaagtcaccttgacttaagtgtcttatttacaacttaaaccaggagtgaccctccctacccgacttccccatttcactgggtaactctgtttaccattgctgtctcaagcattaactatctgtggaagcttctgctcacctttatttttgcaggtatctcttctctttacaatactgctgttttgcaccataaatgatcacaatgccaattttaacatagaaaaagattgttcagggtatatttaaattgctttagaaatactaaaaaattatggcttgtaggcatttttacaaaattttaaactgtaatctgtgtttattttaaactgaagatttttatgagcaaattctgctacttcccctttgattcatttctatcactgttgaaatttttgtcccccataattcttcaggttctacatcatccttttcaggatgattttttttttttttttttttttttaattgcgatagagtct

SEQ ID NO: 387997 - DNA, 698 bp, Homo sapiens
cctggactgggttttgtgctggagggtagaaaaaacaaatgctctgaagtacattattgaaacaattgaaaaaactgggatatggcctctggattagatatatataaatattatacacatatatttaaaaatacatactgaaatattaaggggcaaagggatatggtatatgcaacttattcatctgtagttcagaaaaaataaatacacacacagaatgatacagctgtgctgaaatgttgaaattcacaagtctgggtagataaaggatatataggagttgtctggattactctggcgttgtctggattgttctctaagtttgaaataatttcaaagtaaaaggttttttaagtattggagtacagtaaataaatggagcccggctgtctgccaccacttagctgtcttactttggacaagtcactgagcctttctaaccctcagtttccttgcctttcaagtggggataacataatatcagttctttttgcattatagggttgtgtgcatgacaggtattctaactgcaaagatgtgtagacatagctgtgacattttcatctaaacccttccatacctccagggctttgtatggatcataaggctttgttcccttctatgtattagacacttgtgtttataaaccatgaggagatgatactactactaccagtaccattaataataacatcttg

SEQ ID NO: 387998 - DNA, 411 bp, Homo sapiens
acaagctgtgtgaccataggcaagtttgacctttctgagctgccattttctcatggtaaaagagagatactagaggaacctgcctcacaggattgtcatggagaatagaggagatgatacaagtgaagcactaggcagcaccatacttggaactaagggaaagcccgcagtcaatgttcagtattgttacacttgccagattgtgaaagagcgcaggcaacccttgagttgagctcaacgctggagccaagatcaatgacagaaggattttgttttgaaacagcaactaatgaccagagagaggaaatgggtcatgaagctccatggtgcctttcatgaaaatgaatgtaagggagtgattcaggaaaagggaccacgatcaataccagcagactcttcctatgcactggg

SEQ ID NO: 387999 - DNA, 480 bp, Homo sapiens
atctcagctttgccattagctgtaaaactttgggcaagacatttattcttattgacctcatctccagcttgtggatgatcaatgtggaccctgtttctaagagttactgtagaattaaatgatcaattgtgatgaacacatagtaattgctcaattgatattaactagtcatttcttggttccctttcctaagcattatcttcagtctcagataggctcacctcaggctctccacacatgatagcaaaagtgcaaccagcagctcaaaattttttaggtttaaacctgttgtgaagagagctattctgcccccaacaattccaacatacagctcagaaatgggtttcatgcctttgatttgcctgtttcctgttatacatttatctatgacccaagcactgtggcaaggctaatgagattctctgactggcttacataatttcgtctggattaaaggtggagggatcagtcccaacctaa

SEQ ID NO: 388000 - DNA, 435 bp, Homo sapiens
aagctctcaaaaattatttggatgattttttctccctttaggaaagttatgaagagaaagaaaagacagtgatttgtcatcttttaggggagatatatatatatgtgtgtgtcttttaggggatatatatatgtcttttaggggatatgtatatgtgttctaggagataaatacatgtatgtcttttggggtgtatgtatatgtatcttttagggtatatatatatatctcttttaggggatatatatatcccctaaaattatatataaaatatataatttcccatcccccaattggcttatttgactttaatgtttcagcatacttttttgagcctctgctgaatgctgtgcctgtaattgcatagctaagaccttagacagccactgtcagtttaaagtcaatacttaaatacttatagttaatagattactt

SEQ ID NO: 388001 - DNA, 361 bp, Homo sapiens
gttggaacatttggtcttataccttctgtagcagtggttcttaatgaggaatgatcttgccacccaggggatatttgacaaagccagaaaatgtttttggttgttataactggagggcgggtactactgacacaagtgggtagaggccaggaatgttggtaaatatccttcaatgcacaagacagcccccacaacaaaaaaaaaattatctggctcgaattgtcagtagtgcccaagctgagaaaccctgttctgtgcctgtattactctagtgacagttgatcacagctatgttttttaagcactgcagggtcacaaatcatcaaacatacagatgttcagtgtattctgtttactcagg

SEQ ID NO: 388002 - DNA, 192 bp, Homo sapiens
tgctcttcctaccttgatcaccccccaatacataaatacatatttccacttcaagacgaaaggaaagcagactttccttgccatcttgagtagctagcaatgtgcacacagcttttgtgttttgtttttttttttttgagatggagttttgtttttgtggccctgctcttgtggcacagactagagtgcaat

SEQ ID NO: 388003 - DNA, 312 bp, Homo sapiens
ggggaactcattcaccatctaccgccccatgaataaggaaaaactcagacaaaaaaagaaataaaaataaattaggactgggtccatatgtttgtagttaaaaaaagaaagtttcaggctgggcacagtggctcatgcctgtaattcaattccagccctttgggaagctgaggcaggaggatcagttgggcccaagagttcaagaccagcctggaaaacacagctagactccacctccacaaaaataaaaaaattagccagttgttgtggcacacacctgtagtccctgctattcaggaggctgaggcagaa

SEQ ID NO: 388004 - DNA, 202 bp, Homo sapiens
ctggattccttggcctctgtcctgaggtgtgagctcaatggtcaggagtcacagagacatactttgctgctggggaacagagggagcacatacctgttgtcccatgttgcctgtgtatgaataaggcccaggaatccagggccctaagaggcctccctgcagctctcctccccgtccctctgcagcctccctgtccacacag

SEQ ID NO: 388005 - DNA, 765 bp, Homo sapiens
atttggacatcaaacaagagaagaaggacctttaatgaaataacttacattttttctaccaatatcccatcagccgaaactactctctctccccactcctccaacactctggaatataaaacagatttatgagtaaccaccactctgttaggtgcactttgaatttagttctttcaaagagaaacgggaatgggactgtagccacctcaagaaatgatactggcaaaagacacatttggtattcctattttattgccacaatatgctgaattttgtctatattaaggaaaaggtttcagccaacaacctgcgtcaacaaccacacatgtgaggaaagatgtcttctgaagattccagcctccagccagcaagcctttccaagtataaccctaggacacaaatcaaaattactcagaatttgaagagccaggaaaatatcaacttgagtgggaaaaggcaatcaacatatgccctttattgtgcaaaactcgggtaacaggtaaacaagattaacagggaccgctaggatcaagaaatggaagatgcctccctacatacatctgagatgaatccacaaagatatcaatgcctcaagagccttgccgaattccacctgctgtcctgggatctccgccttccccatagaaccaagcgtgggctagtcccctggaggatgagatctcacatagtccataatcaaatgggtctccttcctagccagtaatactgcagacaaacgagagttccaggtgagaccaggagaag

SEQ ID NO: 388006 - DNA, 1098 bp, Homo sapiens
gactacatatttttaaaccttcaagtccctaataaaacatgagccatctgagtgagtccatatgaagcgaggttaggctgaaataattgcttaaagatgtctttcagagaaattaatttggttggtggccacttttaggtggatcaaaagacctttcagatcctcagaaccttgagacataatacagttgtgaggaatgtgttgtaacttggctggccaagttacatgttacagtatctttactgaggtaacttcattagtgtctttggccttttttgtaggtatagatattttttctttttacactaataacttttatgccttttaaaataaatttattttcataaatggtttgcagtgctaaattacatttagattaagaacaggcaggggtggaatatatcaggaatttataataaaattgccttaatctctacaacagtatcttaatttttacttgcggtgactattcttgccacaatattggagaataatgatagatgatatactagatttttcaaagtgtgaaaacctttagactttttttagcaattagtttgacattcgctactatagtaaccaagcactcattatatatgcatcctccaaatgtttcatgcttatttataggaaagttatattaatgagattaataatgtgaaatacagttttcctgcaaaattagcattagagaattgattttagataacagatttttaaagttttagagaaaagtacagtaatacagtaaactgaaagagtatatagatagcaataaaataacataagtggacatgtttatagtaaatactctgaagtaaacaaccgtttttattaactgcatctcattagggaaagtttatatgtcttgttattttttattaacattttatttaccattcagagtgaaaattactaatttgagtattaacaaataactgaataaatggatcattacagttaggttttctcaaattgcaaaatttgccttagcaattatctttgaacatcccgaaccagatttttaaatcccatttttgtttaatagggtaaaaataccatcaaaatgacttctcataccaaagaataagccatcat

SEQ ID NO: 388007 - DNA, 386 bp, Homo sapiens
ctttactgtgctttccttgaattgcaagtctgattacttgcaacattctctttgtattatgttttgtggcttgagtgtgcctaatccagccagaggtaaagctggggaattgtcctcttctttggtcttgaggcacttctgcaggaaaatttagctttagaaaagataaggttaccaaagttctgactgcctagtttgtgagctgggcccctagtgtcatcatagggagctatggtttcattattacacattttgtttttcactaaatatcatagtttttttctctgaaatgctaatgagctgtcatgtggctatatttgccttcaagttactgggaggattgatagtgtctgttacaggcaaaacaaagctctgttttttttaat

SEQ ID NO: 388008 - DNA, 362 bp, Homo sapiens
gggtacaggtttaagtaggatggtcaagaaaggttttatttatacagtaactgttttcacaaagttatgaaaaaagttagggaacagataggcagatacctggtgaagacgattacaggcatgagccactgcacccggctcttcctcttcttataaggacattaatcccatcaggttagcagggcccacactcatgacctgcacccagtaggcctctcctcccatgcttccagcttcagtgaaagacaccagcatcaacttaggacccgggacctgcgtgtcaccctcgactgaattattggagtgttctcaggagggagactaggtaagttagggctgtgagctcagctgctgtccagctt

SEQ ID NO: 388009 - DNA, 1830 bp, Homo sapiens
  misc_feature (789)..(789): n is a, c, g, or t
agttctttggtattagcacaagtaacacaaatcgattaaaatctaagctaaccattatcattttttaccatttgtgttggctcttcatcagatcttagctttaaatgctaaaattcactggctctgagataaccacaaatcagtctctgcttttgttcttaaaatactctttaattttttaaaaggcaaccaacaagagttggggatctcctttagatctgtttgttgaaccaccaattcattagtccagtgaacaaaaatgtatgtagttactgctgtgtggcaggcattcgtctaggcacagaaaatcatgggatgataaaacatttctgtccttacggagcttacattttagtgaacagtgacaggaaatgaagaaaatgactgttaatagtagttaactaggaggctgctttagattgggtggacaggacttgtccctttaaattacttaatcttcacctgaatataaaaaaggagtaaggcatacacatagctgagaagcaagtatttcagggaaaagaaacagcgaaagtcagctgagtgcaaagtgtgctggggaactgtgcagagtctagtgatctttggaaagaagggcaggagggagaggctggaaagagaccatgcaggcccctggcgaggagtttgggattaattacgctcccagtgggaggttgctggagtatttgagacgtctacttgaccatttaaaaataccatattggctgtgacattgagaaagggggtcaccagattgatggagacaaatggcagatgtgggttattgcnaatggagagtcaagactgtgaaggatggagaaaggaaacaatcatgaatctttggtttggattttaaataattaggggatgctggaaccatttactgagatggagaggctgaagaaaagcaggtttaagatttatgtgatgtttaagatcttattaatgcttgtcatcttcagcagttatacgagcaagtctggaactgaaggcaaaggatggggcttgagatttacatttggagttatctgtgtgtggattggaattaatgccatgggattaggccacattgcttaggatggtgtagaaacgcaaattccttcaacatttggaagcagttttattgtcctgctgtagaatttcagataactgagaatctgccactactttgagccgctgcattttctgagctctgatgtcattcagaaaaaatggaaagaaactagtatttgttgaaagcctaatgtgtatgcaaaattgagcaagacactctttacatgttatttcatttaatcttcaccacgattctcttaaaatgtgaagaaactggctcagagttaactaaataagtagaaaagaaggtaatgtgactgagaagtgactccaggatttaaatccaggttgttcagtgttcttttgctttattgggcttgcagttggcagagttgcaatgacatttattttattttgatagctcttgcaaattatatggaattttaaagtgaatataacatctcccatatatatgttttaaaactttcaaaacaatatttgctcatggcaaagacaagaaaacgcctcaacaaggttttaaggtgggatttactctcatccctttctctttaaataccatttcctttccacaaattctagaaatttccaagcctattgtagaagagaaaagatatctttccttacccaccactaagttcatagctgagactcctataacaaaatacaaattaacaagagaaaagcatacaaatttatttaatgtaagttttatgtgacacaggagccttaagaatgaagaagcccctcccccaactc

SEQ ID NO: 388010 - DNA, 1538 bp, Homo sapiens
  misc_feature (497)..(497): n is a, c, g, or t
ctctagagatcctaaagcatactccccgaaaacatttctgtccttacggagcttacattttagtgaacagtgacaggaaatgaagaaaatgactgttaatagtagttaactaggaggctgctttagattgggtggacaggacttgtccctttaaattacttaatcttcacctgaatataaaaaaggagtaaggcatacacatagctgagaagcaagtatttcagggaaaagaaacagcgaaagtcagctgagtgcaaagtgtgctggggaactgtgcagagtctagtgatctttggaaagaagggcaggagggagaggctggaaagagaccatgcaggcccctggcgaggagtttgggattaattacgctcccagtgggaggttgctggagtatttgagacgtctacttgaccatttaaaaataccatattggctgtgacattgagaaagggggtcaccagattgatggagacaaatggcagatgtgggttattgcnaatggagagtcaagactgtgaaggatggagaaaggaaacaatcatgaatctttggtttggattttaaataattaggggatgctggaaccatttactgagatggagaggctgaagaaaagcaggtttaagatttatgtgatgtttaagatcttattaatgcttgtcatcttcagcagttatacgagcaagtctggaactgaaggcaaaggatggggcttgagatttacatttggagttatctgtgtgtggattggaattaatgccatgggattaggccacattgcttaggatggtgtagaaacgcaaattccttcaacatttggaagcagttttattgtcctgctgtagaatttcagataactgagaatctgccactactttgagccgctgcattttctgagctctgatgtcattcagaaaaaatggaaagaaactagtatttgttgaaagcctaatgtgtatgcaaaattgagcaagacactctttacatgttatttcatttaatcttcaccacgattctcttaaaatgtgaagaaactggctcagagttaactaaataagtagaaaagaaggtaatgtgactgagaagtgactccaggatttaaatccaggttgttcagtgttcttttgctttattgggcttgcagttggcagagttgcaatgacatttattttattttgatagctcttgcaaattatatggaattttaaagtgaatataacatctcccatatatatgttttaaaactttcaaaacaatatttgctcatggcaaagacaagaaaacgcctcaacaaggttttaaggtgggatttactctcatccctttctctttaaataccatttcctttccacaaattctagaaatttccaagcctattgtagaagagaaaagatatctttccttacccaccactaagttcatagctgagactcctataacaaaatacaaattaacaagagaaaagcatacaaatttatttaatgtaagttttatgtgacacaggagccttaagaatgaagaagcccctcccccaactc

SEQ ID NO: 388011 - DNA, 485 bp, Homo sapiens
ctcctggcctcaagcaatctttctaccttgacctcccaaagtgctgggattacaggtgtgagccactgtgtttagcctagacttacctttaatagcttttgataagttattttttaatgtaattttgataaaataattgtacctaaaatgtactaatgtgttggtattgtctactatccaatctacgaacaaattttactgattcattcgtaactgaccccagagttggtttgtttgaatcactgtaactgagcctctattataaagatcatacgatgtttgttttacctactttccctttccccttgtccttttcttgctctatgcgtgcttgcttgcatgtcattatttcagtagagggtagtcactaataattgattaacttcatatcctaacctacaggggtgcctggcagattgatgaacttgtttttcttttaaagaaccatgatccttaggttatgcagacctccttgatggtgtcca

SEQ ID NO: 388012 - DNA, 364 bp, Homo sapiens
ataagttaaagagatttatggtacaacatagtgactgtagttaataatgtattttcaaaaaatctctaaaagaatagattttaactgttctcaacacagaaaattaaaagtatgtgaggtaatgcttatatgttaattagctggttttagccattctacagcatatacttacttcaaaacaccatgttgaacaccataaatatatgcagtttttgtcaattaaaaaataaaatttttatgaaaggaacttcaaatgctaaatgaggaatcctgcctgtaaatcatgctctatgattccataagacattctggaaaaagacaactttggaagcagtaaagattagtgcttgctacccagaggaaa

SEQ ID NO: 388013 - DNA, 237 bp, Homo sapiens
tgttgtgacagtctggattttgtcttccttgaggagtgtcaagtcttgtgctggcaggcagttaatttactcacagttctgcttgatcctgttgaggcttagtttggggcaaattaaggtacccctattcgcaaggcatggcctttttggggtttcagctgaatgcttgaggtgttcagcaaggtctggctctgctatttggccagaattccaatgtcttccagagctgaatacctt

SEQ ID NO: 388014 - DNA, 379 bp, Homo sapiens
ttacttaaagaatgggaaggactttggacagaaaagagggagggaccctagatgaaaggctgtggaggcggcaaggaaaatgtacaacttgaaatgtctgggcagtggcaagaccagcctcagggctggaagagaggatgcaaagagggacggggagatggtgagaccaagctgcaggtggggtccgaagtcggggtgcggccagatttaaaaggacactgtaggctccgcctctcttctccctttgcctctactgagagcctcctccttgcttcttgcctctctcttgcccacaggcccctcttcctgcagtctgttggagacctcccatctcagactccctgcttccttctccagacactccttatctctctgtgcc

SEQ ID NO: 388015 - DNA, 354 bp, Homo sapiens
gacagaggagaataaatggaataacttagttttgtgaaagactcacagtatcacttggtttctggacacggttcgagacctggctgtggcttgctgtggccttgagagccatcccacagcagcaatgctgttggaccctttggctgggaccttcaggaccccctgcaacagcactgtgtgccctaacctgctggcatgatgcccctttgttgacagggctgcatacaaggccagcgacaagtggcaggcagtgacgccagcctgatttgctgagggcacacgccatgcttcctgcagtgccagtgctcttctgggtccactttgcagcaggatagatgtgttctagatccaaga

SEQ ID NO: 388016 - DNA, 399 bp, Homo sapiens
ttggtaaagggaagaggggaggagagggaaaagtaagcttgttttttgtttgctcgtttgtttttcaaatttatcttaaaaggtgaggttctgtgttcactgatacatccccttccttcaccgggctcatgaaaagaaatgctgaatcagcaaatagagtgaacgaacaatcaagatgagatggctgctgttgatgtgattctctaggttactacctttcttcctgctgcaaatgctgcatgacactaagcttacaggtaacagagcaccataaggcctgtacttttaaggatgcttatgactttctgcatgcttacctattattgactcaatatatgttctcattgttaaattttctatctaaccatagcctaatttcacaattcaagttaagagcta

SEQ ID NO: 388017 - DNA, 934 bp, Homo sapiens
agtgcttaccccccctcaaaaaaaaaaaagtggggggcaggacaaatggctaagcagtgtttggaccgcaggatgaacaatcaataggcagaaagcaagattgaggcttcctcagcttttggatcgacaatcgacagctgagaggctattttttgctatggttgactaaatatggtcagggaagagagaggcacaagagagcctgtttgcctgggagtgcatgtttcaaatgcttagctgcctataaagctgtaacagtttagccagtggtgactgaggaagaatataagttagcctcgtagtgaccatgtggaagtcctgacctcgcttgcagacttgacctctggatgtgacaaggtgaggttctgtgttcactgatacatccccttccttcaccgggctcatgaaaagaaatgctgaatcagcaaatagagtgaacgaacaatcaagatgagatggctgctgttgatgtgattctctaggttactacctttcttcctgctgcaaatgctgcatgacactaagcttacaggatctagaagcagactacaaaaaaagaagaaattcactctgaagactgaagaaacactaggctgatcttaagtttccgaaatacactctgtaacactacactgattctttgaatctcttgcaaaaagaatcaaaccaggacaaagttcaacagataactggtcaaatgcttaggaatgtctatgtccaccaagaatatggaaccattaatgccatgcttcagttactatcatactatgagaaaacatcaagatcagctttgaaatctagactcatattgatctgcacctttgaaatagagacttcaaaggacagtcttcaaaaatataggacatctagacacttcatcaggttctggaaataacaacgtgctatatctggttttcttttcttttctttcttt

SEQ ID NO: 388018 - DNA, 1249 bp, Homo sapiens
agtgcttaccccccctcaaaaaaaaaaaagtggggggcaggacaaatggctaagcagtgtttggaccgcaggatgaacaatcaataggcagaaagcaagattgaggcttcctcagcttttggatcgacaatcgacagctgagaggctattttttgctatggttgactaaatatggtcagggaagagagaggcacaagagagcctgtttgcctgggagtgcatgtttcaaatgcttagctgcctataaagctgtaacagtttagccagtggtgactgaggaagaatataagttagcctcgtagtgaccatgtggaagtcctgacctcgcttgcagacttgacctctggatgtgacaaggtagcttcactacagctctactatttaatcctggaaactaaaaaccaaaaaaaaaaaaaaaaaaatctaaaagcaagaaagatgcagactatttcctaagaagtcagaagaacccaatgtattctggagggcaaagaaaaacagggtgaggttctgtgttcactgatacatccccttccttcaccgggctcatgaaaagaaatgctgaatcagcaaatagagtgaacgaacaatcaagatgagatggctgctgttgatgtgattctctaggttactacctttcttcctgctgcaaatgctgcatgacactaagcttacaggatctagaagcagactacaaaaaaagaagaaattcactctgaagactgaagaaacactaggctgatcttaagtttccgaaatacactctgtaacactacactgattctttgaatctcttgcaaaaagaatcaaaccaggacaaagttcaacagataactggtcaaatgcttaggaatgtctatgtccaccaagaatatggaaccattaatgccatgcttcaggtaaacttgttacaaaatttagtcttcgataaattagtctctgcaaatgatttaccattgctctacattagtaagctgaatgtttcactaacaaataagaaaataaaatatttcatgtttttacagctaacaacttagtaatacctactcagagtacatacttctttatgtacccatatgaacatacaatgctatggaatgtaaagaagtatgtatttttggtaggcaataaaccaccaagggagaattaaactgagctaaaagaagctcttgcttctttctacgtgaatgaccgtcatatggtaaattaacctagtcatgaacagatgacctttggcaatactaacacc

SEQ ID NO: 388019 - DNA, 1050 bp, Homo sapiens
agtgcttaccccccctcaaaaaaaaaaaagtggggggcaggacaaatggctaagcagtgtttggaccgcaggatgaacaatcaataggcagaaagcaagattgaggcttcctcagcttttggatcgacaatcgacagctgagaggctattttttgctatggttgactaaatatggtcagggaagagagaggcacaagagagcctgtttgcctgggagtgcatgtttcaaatgcttagctgcctataaagctgtaacagtttagccagtggtgactgaggaagaatataagttagcctcgtagtgaccatgtggaagtcctgacctcgcttgcagacttgacctctggatgtgacaagaaatgctgaatcagcaaatagagtgaacgaacaatcaagatgagatggctgctgttgatgtgattctctaggttactacctttcttcctgctgcaaatgctgcatgacactaagcttacaggatctagaagcagactacaaaaaaagaagaaattcactctgaagactgaagaaacactaggctgatcttaagtttccgaaatacactctgtaacactacactgattctttgaatctcttgcaaaaagaatcaaaccaggacaaagttcaacagataactggtcaaatgcttaggaatgtctatgtccaccaagaatatggaaccattaatgccatgcttcaggtaaacttgttacaaaatttagtcttcgataaattagtctctgcaaatgatttaccattgctctacattagtaagctgaatgtttcactaacaaataagaaaataaaatatttcatgtttttacagctaacaacttagtaatacctactcagagtacatacttctttatgtacccatatgaacatacaatgctatggaatgtaaagaagtatgtatttttggtaggcaataaaccaccaagggagaattaaactgagctaaaagaagctcttgcttctttctacgtgaatgaccgtcatatggtaaattaacctagtcatgaacagatgacctttggcaatactaacacc

SEQ ID NO: 388020 - DNA, 2620 bp, Homo sapiens
agcggaggacgccactgccctgtcgccccgcctgtgcagcccaggagctaggcgcggtagctggggctggcttttgaggggcgcgggcagccttctgactgggtcggaggcctgcgggcccgaagcctctgtccctcctgttcttgtccggcgctgcttagcccctccgcgtagtcatcatggatctgattttaaaccgaatggattatctgcaggtgggagtaacatctcagaagactatgaagctaattcctgcctcaagacacagagctacacaaaaggtggttattggagatcatgatggggtagttatgtgctttggcatgaagaaaggagaagcagcagcagtgttcaagactttacccgggccgaagattgcaaggctggaactgggaggggttatcaacacacctcaggagaaaatttttattgctgcagcatctgagattagaggcttcacaaaaagaggaaaacagttcctctcctttgaaacaaacctcactgaaagcattaaagctatgcacatatctggctcagacctctttctcagtgcaagttacatctataaccattattgtgactgcaaagaccaacattattacctttctggggataaaatcaatgatgtgatctgccttccagtggaaagattatctcgtatcacacctgtattggcctgccaggacagagtgctcagagttttacagggatctgatgtgatgtatgcagttgaagttcctggaccccctactgtcttagcactacacaatggaaatggcggtgactctggagaagaccttttgtttgggacatcagacggaaaacttgcgcttatacagattactacatccaaaccagtacgcaagtgggaaattcaaaatgagaaaaagagaggaggtattttgtgtattgacagctttgacattgtgggtgatggggttaaagatttacttgttgggagagatgacggaatggtggaagtgtatagttttgataatgcaaatgaacctgttctacgatttgatcagatgttgtctgaaagcgtcacatctatccagggtggttgtgtaggaaaagacagctatgatgaaatcgtggtgtccacatattcaggctgggttacaggtctgacaacagagcccattcataaggaaagtggaccaggagaagaactaaaaattaatcaggagatgcagaataaaatttcttccttacggaatgagttggaacatttgcagtataaggtattgcaggaaagagagaattatcaacagtcttctcaatcaagcaaagcaaaatcagcagtaccttcctttggtataaatgataaatttacactaaataaagatgatgccagttacagccttatcttagaggtacagactgcaatagataatgtcttaatacagagtgatgttccaatagatttacttgatgtggataaaaattctgctgttgttagctttagcagctgtgattctgagtcaaacgacaacttccttcttgccacttatcggtgccaggcagatactacaaggctggaactcaagattcgctcaattgaaggccagtatggcacactacaagcatatgtgactccaagaattcaacccaaaacctgtcaggtccgccagtaccacatcaaacctctttcactccatcaaagaactcactttattgatcatgacagacccatgaatacactgaccctaacaggccagttcagttttgctgaagttcactcctgggtggttttttgtctgcctgaagttccagaaaaacctccagcaggagaatgtgtgacattttactttcagaacacctttctagatacacaacttgaaagtacctacagaaaaggagagggagtttttaaatctgacaacatttctactatctccatcctaaaagatgtgctttctaaagaagctacaaaaaggaaaattaacctcaacatatcatacgagataaatgaagtatcagtcaaacacactttaaagctaatccacccaaagctggagtaccagttgcttttggctaagaaagtgcagttaattgatgctttaaaagaattacagattcatgagggaaatacgaactttctgataccagaatatcactgtattctagaagaggcagatcacctacaggaagaatacaaaaagcaacctgcacatcttgaaagactctatggttagtggaccattctagaataccttgccatatttcttttcaactggctatttcccaaggatcatgtaagagaagctgggcagaaagataaaaagattacatcagtcatgattcatgaaccagtcatgaatcagttgacaacaaatttattgcacagaatatttctgtattttgtcaagctacttttaatatttaattcttttacttgataaaatgcaagtatattaagaaataagtatactgtgatgaattaatctatatatatgaacaaacctggtataaaatgaatgtaatctatgaacctttagagcttagactgtatttcacacaaataattgtcatgttttgttgctattgtgaattataaaaatgcagcatttaaaatttttaaggcaaaatttaataaaggatatacagtaaaaaaaaa

SEQ ID NO: 388021 - DNA, 1097 bp, Homo sapiens
agcggaggacgccactgccctgtcgccccgcctgtgcagcccaggagctaggcgcggtagctggggctggcttttgaggggcgcgggcagccttctgactgggtcggaggcctgcgggcccgaagcctctgtccctcctgttcttgtccggcgctgcttagcccctccgcgtagtcatcatggatctgattttaaaccgaatggattatctgcaggtgggagtaacatctcagaagactatgaagctaattcctgcctcaagacacagagctacacaaaaggtggttattggagatcatgatggggtagttatgtgctttggcatgaagaaaggagaagcagcagcagtgttcaagactttacccgggccgaagattgcaaggctggaactgggaggggttatcaacacacctcaggagaaaatttttattgctgcagcatctgagattagaggcttcacaaaaagaggaaaacagttcctctcctttgaaacaaacctcactgaaagcattaaagctatgcacatatctggctcagacctctttctcagtgcaagttacatctataaccattattgtgactgcaaagaccaacattattacctttctggggataaaatcaatgatgtgatctgccttccagtggaaagattatctcgtatcacacctgtattggcctgccaggacagagtgctcagagttttacaggttgctgttatttgtatttttctaattttttatattatgtgaaagaatatcaatgaacattatgtacttgagataaattagtggttactgttttaagggcttttataaacatgtggaaacaatttttaaataatttgacatattaatttttttaacttgagtcaaatgtgtgtttgtgtaagtttttaagagaagcatatttggaagaaaaaggattttttttgcctcaccatacacaatttctgagctattatcagaatggagtactttgactacagagaacctttacctggcttttggttttggtttcttcttccatcacctttattttcccaaaaatcaaattaaaggaagaaattgggttggagggaggatgttatataacttgag

SEQ ID NO: 388022 - DNA, 641 bp, Homo sapiens
  misc_feature (1)..(1): n is a, c, g, or t
  misc_feature (16)..(16): n is a, c, g, or t
  misc_feature (22)..(22): n is a, c, g, or t
  misc_feature (28)..(28): n is a, c, g, or t
  misc_feature (35)..(35): n is a, c, g, or t
  misc_feature (44)..(44): n is a, c, g, or t
  misc_feature (54)..(54): n is a, c, g, or t
  misc_feature (80)..(80): n is a, c, g, or t
  misc_feature (85)..(85): n is a, c, g, or t
  misc_feature (87)..(88): n is a, c, g, or t
  misc_feature (95)..(95): n is a, c, g, or t
  misc_feature (103)..(103): n is a, c, g, or t
  misc_feature (117)..(117): n is a, c, g, or t
  misc_feature (130)..(130): n is a, c, g, or t
  misc_feature (136)..(136): n is a, c, g, or t
  misc_feature (146)..(146): n is a, c, g, or t
  misc_feature (163)..(163): n is a, c, g, or t
  misc_feature (168)..(168): n is a, c, g, or t
  misc_feature (176)..(176): n is a, c, g, or t
  misc_feature (180)..(180): n is a, c, g, or t
  misc_feature (188)..(188): n is a, c, g, or t
  misc_feature (196)..(196): n is a, c, g, or t
  misc_feature (214)..(214): n is a, c, g, or t
  misc_feature (219)..(220): n is a, c, g, or t
  misc_feature (223)..(223): n is a, c, g, or t
  misc_feature (227)..(227): n is a, c, g, or t
  misc_feature (229)..(229): n is a, c, g, or t
  misc_feature (234)..(234): n is a, c, g, or t
  misc_feature (243)..(243): n is a, c, g, or t
  misc_feature (252)..(252): n is a, c, g, or t
  misc_feature (258)..(258): n is a, c, g, or t
  misc_feature (266)..(266): n is a, c, g, or t
  misc_feature (270)..(270): n is a, c, g, or t
  misc_feature (302)..(303): n is a, c, g, or t
  misc_feature (306)..(306): n is a, c, g, or t
  misc_feature (322)..(323): n is a, c, g, or t
ntgttgctcttctttntttttncttttnttgtttntttttgttntttttttttnttttttgtctttttggcttcttgttnttttntnnttttttnttttttcntatttttttttttnatgggtttttttnttttgntttttttttngcattcagtttttggtnttttngctttttntttntttgttgngctttctnacgaatttttttgttttnttgtnnttntttntnttttnctttttttnttttttttntttttntgcattgntttntatttttttttttttttttatattatttattnnttntttgtttttgtgcttnntttttgttaagagagttttattttaataaggtcatattgtttttactatgtttaaaaaactttacttctgaaaggaacataattatatctaggtcactagaacgtcattgtgttttttgttggttgccacagcttggggaaaaatagaaaaaaattaatgactgtatttgaatattttgtaatgcactgctatttattatatatatcaacagtagttcaaggtgccatcttaaattaattgcatcttcattaggaaaaataaaaagcataaaacacaatttctggttactatgaataaacgcctaaatgttaagatga

SEQ ID NO: 388023 - DNA, 3791 bp, Homo sapiens
agcggaggacgccactgccctgtcgccccgcctgtgcagcccaggagctaggcgcggtagctggggctggcttttgaggggcgcgggcagccttctgactgggtcggaggcctgcgggcccgaagcctctgtccctcctgttcttgtccggcgctgcttagcccctccgcgtagtcatcatggatctgattttaaaccgaatggattatctgcaggtgggagtaacatctcagaagactatgaagctaattcctgcctcaagacacagagctacacaaaaggtggttattggagatcatgatggggtagttatgtgctttggcatgaagaaaggagaagcagcagcagtgttcaagactttacccgggccgaagattgcaaggctggaactgggaggggttatcaacacacctcaggagaaaatttttattgctgcagcatctgagattagaggcttcacaaaaagaggaaaacagttcctctcctttgaaacaaacctcactgaaagcattaaagctatgcacatatctggctcagacctctttctcagtgcaagttacatctataaccattattgtgactgcaaagaccaacattattacctttctggggataaaatcaatgatgtgatctgccttccagtggaaagattatctcgtatcacacctgtattggcctgccaggacagagtgctcagagttttacagggatctgatgtgatgtatgcagttgaagttcctggaccccctactgtcttagcactacacaatggaaatggcggtaatcaggattttatttttcacaaatcaactatgtgttttaatagtgactctggagaagaccttttgtttgggacatcagacggaaaacttgcgcttatacagattactacatccaaaccagtacgcaagtgggaaattcaaaatgagaaaaagagaggaggtattttgtgtattgacagctttgacattgtgggtgatggggttaaagatttacttgttgggagagatgacggaatggtggaagtgtatagttttgataatgcaaatgaacctgttctacgatttgatcagatgttgtctgaaagcgtcacatctatccagggtggttgtgtaggaaaagacagctatgatgaaatcgtggtgtccacatattcaggctgggttacaggtctgacaacagagcccattcataaggaaagtggaccaggagaagaactaaaaattaatcaggagatgcagaataaaatttcttccttacggaatgagttggaacatttgcagtataaggtattgcaggaaagagagaattatcaacagtcttctcaatcaagcaaagcaaaatcagcagtaccttcctttggtataaatgataaatttacactaaataaagatgatgccagttacagccttatcttagaggtacagactgcaatagataatgtcttaatacagagtgatgttccaatagatttacttgatgtggataaaaattctgctgttgttagctttagcagctgtgattctgagtcaaacgacaacttccttcttgccacttatcggtgccaggcagatactacaaggctggaactcaagattcgctcaattgaaggccagtatggcacactacaagcatatgtgactccaagaattcaacccaaaacctgtcaggtccgccagtaccacatcaaacctctttcactccatcaaagaactcactttattgatcatgacagacccatgaatacactgaccctaacaggccagttcagttttgctgaagttcactcctgggtggttttttgtctgcctgaagttccagaaaaacctccagcaggagaatgtgtgacattttactttcagaacacctttctagatacacaacttgaaagtacctacagaaaaggagagggagtttttaaatctgacaacatttctactatctccatcctaaaagatgtgctttctaaagaagctacaaaaaggaaaattaacctcaacatatcatacgagataaatgaagtatcagtcaaacacactttaaagctaatccacccaaagctggagtaccagttgcttttggctaagaaagtgcagttaattgatgctttaaaagaattacagattcatgagggaaatacgaactttctgataccagaatatcactgtattctagaagaggcagatcacctacaggaagaatacaaaaagcaacctgcacatcttgaaagactctatggcatgatcactgatcttttcatagataaatttaagtttaaaggcaccaatgtaaaaactaaagtaccccttctattggaaattctggacagttatgaccaaaatgcattgatttcattcttcgatgcagcatgacatacaaataaggtaaagtcccaaagaagtggtctgtttaaatgaaaaatgttaaaagagaattagaagttaactgtgtatgtactttaatttcaaatgcttttttatatctaaaaatatttgagatataatggctttttaaagtaatgcttctatttcttttgacaaattgaactttctaaaactaaaagagtctttttatttttaaaacacaagtagaatgatttaaataggattttaatgaatttttggcaagtggctgttttaatttttaaattgagaagtaatatgtggaaaattaaaatatattcaaatgtattacaaggtacataaacacataaacatgtagaccgctttataggcttcaaaatgtatttttatatattaccttatttgatcttcacaactgttgtaaaatttgtcaaatcatataagaaaactgattctcagtgaaatttgtgattaagaggacatgctaatattttgtaaagctgggaccagaacccaagtactggtacttgctttgtgtcctggttactatgtatgttgccagctagtggaaataacctaccaattgttttttctaggagataggattgatttgcaactgatattccttttgcttggtagtgttttatgactctgctgcagtttgtggaaatgctggacttggctcagtgctataaattgtagccaggaaataagaagagcttacacagagtcgggggatcttaattagacatgctgtaaccagtggagctattcagcgtgcttcaagtgaagagtgcagaaatagtgatgccatcttagattttcctacactagtatcttctagatctctttttatcatatatgacattaaggctacagaagttttgtgcattaatcttaattcatatttattaatttcaagggaatattgaaaggttttaaaatggcatacagataatggaaaataagctttatgtttcaagaagggcagactcacgaattttttagaaaacagtgcttcttaatgatatgctattatacttattagttatgtgcaagctttgtatattcttatatttatatataaatataaaaatttgttaaaggcacgtatagttaagagagttttattttaataaggtcatattgtttttactatgtttaaaaaactttacttctgaaaggaacataattatatctaggtcactagaacgtcattgtgttttttgttggttgccacagcttggggaaaaatagaaaaaaattaatgactgtatttgaatattttgtaatgcactgctatttattatatatatcaacagtagttcaaggtgccatcttaaattaattgcatcttcattaggaaaaataaaaagcataaaacacaatttctggttactatgaataaacgcctaaatgttaagatga

SEQ ID NO: 388024 - DNA, 324 bp, Homo sapiens
gaactcttagagaaaacataatttatgaacatttttaggttttccatctcaaccttctttttttttaatattgactatagagtgatgttccaatagatttacttgatgtggataaaaattctgctgttgttagctttagcagctgtgattctgaggtgagtaaaaatataaaagaattcttcacatgctttcatttctattatgccattttgattaaagtctatagatgctgctaggttttgatgtttctttttcaattatttcttatgtaacctttccttcaaaatctgtgtcggttctctttccctgtcctcagtcgagaaa

SEQ ID NO: 388025 - DNA, 3746 bp, Homo sapiens
agcggaggacgccactgccctgtcgccccgcctgtgcagcccaggagctaggcgcggtagctggggctggcttttgaggggcgcgggcagccttctgactgggtcggaggcctgcgggcccgaagcctctgtccctcctgttcttgtccggcgctgcttagcccctccgcgtagtcatcatggatctgattttaaaccgaatggattatctgcaggtgggagtaacatctcagaagactatgaagctaattcctgcctcaagacacagagctacacaaaaggtggttattggagatcatgatggggtagttatgtgctttggcatgaagaaaggagaagcagcagcagtgttcaagactttacccgggccgaagattgcaaggctggaactgggaggggttatcaacacacctcaggagaaaatttttattgctgcagcatctgagattagaggcttcacaaaaagaggaaaacagttcctctcctttgaaacaaacctcactgaaagcattaaagctatgcacatatctggctcagacctctttctcagtgcaagttacatctataaccattattgtgactgcaaagaccaacattattacctttctggggataaaatcaatgatgtgatctgccttccagtggaaagattatctcgtatcacacctgtattggcctgccaggacagagtgctcagagttttacagggatctgatgtgatgtatgcagttgaagttcctggaccccctactgtcttagcactacacaatggaaatggcggtgactctggagaagaccttttgtttgggacatcagacggaaaacttgcgcttatacagattactacatccaaaccagtacgcaagtgggaaattcaaaatgagaaaaagagaggaggtattttgtgtattgacagctttgacattgtgggtgatggggttaaagatttacttgttgggagagatgacggaatggtggaagtgtatagttttgataatgcaaatgaacctgttctacgatttgatcagatgttgtctgaaagcgtcacatctatccagggtggttgtgtaggaaaagacagctatgatgaaatcgtggtgtccacatattcaggctgggttacaggtctgacaacagagcccattcataaggaaagtggaccaggagaagaactaaaaattaatcaggagatgcagaataaaatttcttccttacggaatgagttggaacatttgcagtataaggtattgcaggaaagagagaattatcaacagtcttctcaatcaagcaaagcaaaatcagcagtaccttcctttggtataaatgataaatttacactaaataaagatgatgccagttacagccttatcttagaggtacagactgcaatagataatgtcttaatacagagtgatgttccaatagatttacttgatgtggataaaaattctgctgttgttagctttagcagctgtgattctgagtcaaacgacaacttccttcttgccacttatcggtgccaggcagatactacaaggctggaactcaagattcgctcaattgaaggccagtatggcacactacaagcatatgtgactccaagaattcaacccaaaacctgtcaggtccgccagtaccacatcaaacctctttcactccatcaaagaactcactttattgatcatgacagacccatgaatacactgaccctaacaggccagttcagttttgctgaagttcactcctgggtggttttttgtctgcctgaagttccagaaaaacctccagcaggagaatgtgtgacattttactttcagaacacctttctagatacacaacttgaaagtacctacagaaaaggagagggagtttttaaatctgacaacatttctactatctccatcctaaaagatgtgctttctaaagaagctacaaaaaggaaaattaacctcaacatatcatacgagataaatgaagtatcagtcaaacacactttaaagctaatccacccaaagctggagtaccagttgcttttggctaagaaagtgcagttaattgatgctttaaaagaattacagattcatgagggaaatacgaactttctgataccagaatatcactgtattctagaagaggcagatcacctacaggaagaatacaaaaagcaacctgcacatcttgaaagactctatggcatgatcactgatcttttcatagataaatttaagtttaaaggcaccaatgtaaaaactaaagtaccccttctattggaaattctggacagttatgaccaaaatgcattgatttcattcttcgatgcagcatgacatacaaataaggtaaagtcccaaagaagtggtctgtttaaatgaaaaatgttaaaagagaattagaagttaactgtgtatgtactttaatttcaaatgcttttttatatctaaaaatatttgagatataatggctttttaaagtaatgcttctatttcttttgacaaattgaactttctaaaactaaaagagtctttttatttttaaaacacaagtagaatgatttaaataggattttaatgaatttttggcaagtggctgttttaatttttaaattgagaagtaatatgtggaaaattaaaatatattcaaatgtattacaaggtacataaacacataaacatgtagaccgctttataggcttcaaaatgtatttttatatattaccttatttgatcttcacaactgttgtaaaatttgtcaaatcatataagaaaactgattctcagtgaaatttgtgattaagaggacatgctaatattttgtaaagctgggaccagaacccaagtactggtacttgctttgtgtcctggttactatgtatgttgccagctagtggaaataacctaccaattgttttttctaggagataggattgatttgcaactgatattccttttgcttggtagtgttttatgactctgctgcagtttgtggaaatgctggacttggctcagtgctataaattgtagccaggaaataagaagagcttacacagagtcgggggatcttaattagacatgctgtaaccagtggagctattcagcgtgcttcaagtgaagagtgcagaaatagtgatgccatcttagattttcctacactagtatcttctagatctctttttatcatatatgacattaaggctacagaagttttgtgcattaatcttaattcatatttattaatttcaagggaatattgaaaggttttaaaatggcatacagataatggaaaataagctttatgtttcaagaagggcagactcacgaattttttagaaaacagtgcttcttaatgatatgctattatacttattagttatgtgcaagctttgtatattcttatatttatatataaatataaaaatttgttaaaggcacgtatagttaagagagttttattttaataaggtcatattgtttttactatgtttaaaaaactttacttctgaaaggaacataattatatctaggtcactagaacgtcattgtgttttttgttggttgccacagcttggggaaaaatagaaaaaaattaatgactgtatttgaatattttgtaatgcactgctatttattatatatatcaacagtagttcaaggtgccatcttaaattaattgcatcttcattaggaaaaataaaaagcataaaacacaatttctggttactatgaataaacgcctaaatgttaagatga

SEQ ID NO: 388026 - DNA, 3713 bp, Homo sapiens
  misc_feature (19)..(19): n is a, c, g, or t
ccaatgcaggctggtacgncctggagtaatgggatggcttttgaggggcgcgggcagccttctgactgggtcggaggcctgcgggcccgaagcctctgtccctcctgttcttgtccggcgctgcttagcccctccgcgtagtcatcatggatctgattttaaaccgaatggattatctgcaggtgggagtaacatctcagaagactatgaagctaattcctgcctcaagacacagagctacacaaaaggtggttattggagatcatgatggggtagttatgtgctttggcatgaagaaaggagaagcagcagcagtgttcaagactttacccgggccgaagattgcaaggctggaactgggaggggttatcaacacacctcaggagaaaatttttattgctgcagcatctgagattagaggcttcacaaaaagaggaaaacagttcctctcctttgaaacaaacctcactgaaagcattaaagctatgcacatatctggctcagacctctttctcagtgcaagttacatctataaccattattgtgactgcaaagaccaacattattacctttctggggataaaatcaatgatgtgatctgccttccagtggaaagattatctcgtatcacacctgtattggcctgccaggacagagtgctcagagttttacagggatctgatgtgatgtatgcagttgaagttcctggaccccctactgtcttagcactacacaatggaaatggcggtgactctggagaagaccttttgtttgggacatcagacggaaaacttgcgcttatacagattactacatccaaaccagtacgcaagtgggaaattcaaaatgagaaaaagagaggaggtattttgtgtattgacagctttgacattgtgggtgatggggttaaagatttacttgttgggagagatgacggaatggtggaagtgtatagttttgataatgcaaatgaacctgttctacgatttgatcagatgttgtctgaaagcgtcacatctatccagggtggttgtgtaggaaaagacagctatgatgaaatcgtggtgtccacatattcaggctgggttacaggtctgacaacagagcccattcataaggaaagtggaccaggagaagaactaaaaattaatcaggagatgcagaataaaatttcttccttacggaatgagttggaacatttgcagtataaggtattgcaggaaagagagaattatcaacagtcttctcaatcaagcaaagcaaaatcagcagtaccttcctttggtataaatgataaatttacactaaataaagatgatgccagttacagccttatcttagaggtacagactgcaatagataatgtcttaatacagagtgatgttccaatagatttacttgatgtggataaaaattctgctgttgttagctttagcagctgtgattctgagtcaaacgacaacttccttcttgccacttatcggtgccaggcagatactacaaggctggaactcaagattcgctcaattgaaggccagtatggcacactacaagcatatgtgactccaagaattcaacccaaaacctgtcaggtccgccagtaccacatcaaacctctttcactccatcaaagaactcactttattgatcatgacagacccatgaatacactgaccctaacaggccagttcagttttgctgaagttcactcctgggtggttttttgtctgcctgaagttccagaaaaacctccagcaggagaatgtgtgacattttactttcagaacacctttctagatacacaacttgaaagtacctacagaaaaggagagggagtttttaaatctgacaacatttctactatctccatcctaaaagatgtgctttctaaagaagctacaaaaaggaaaattaacctcaacatatcatacgagataaatgaagtatcagtcaaacacactttaaagctaatccacccaaagctggagtaccagttgcttttggctaagaaagtgcagttaattgatgctttaaaagaattacagattcatgagggaaatacgaactttctgataccagaatatcactgtattctagaagaggcagatcacctacaggaagaatacaaaaagcaacctgcacatcttgaaagactctatggcatgatcactgatcttttcatagataaatttaagtttaaaggcaccaatgtaaaaactaaagtaccccttctattggaaattctggacagttatgaccaaaatgcattgatttcattcttcgatgcagcatgacatacaaataaggtaaagtcccaaagaagtggtctgtttaaatgaaaaatgttaaaagagaattagaagttaactgtgtatgtactttaatttcaaatgcttttttatatctaaaaatatttgagatataatggctttttaaagtaatgcttctatttcttttgacaaattgaactttctaaaactaaaagagtctttttatttttaaaacacaagtagaatgatttaaataggattttaatgaatttttggcaagtggctgttttaatttttaaattgagaagtaatatgtggaaaattaaaatatattcaaatgtattacaaggtacataaacacataaacatgtagaccgctttataggcttcaaaatgtatttttatatattaccttatttgatcttcacaactgttgtaaaatttgtcaaatcatataagaaaactgattctcagtgaaatttgtgattaagaggacatgctaatattttgtaaagctgggaccagaacccaagtactggtacttgctttgtgtcctggttactatgtatgttgccagctagtggaaataacctaccaattgttttttctaggagataggattgatttgcaactgatattccttttgcttggtagtgttttatgactctgctgcagtttgtggaaatgctggacttggctcagtgctataaattgtagccaggaaataagaagagcttacacagagtcgggggatcttaattagacatgctgtaaccagtggagctattcagcgtgcttcaagtgaagagtgcagaaatagtgatgccatcttagattttcctacactagtatcttctagatctctttttatcatatatgacattaaggctacagaagttttgtgcattaatcttaattcatatttattaatttcaagggaatattgaaaggttttaaaatggcatacagataatggaaaataagctttatgtttcaagaagggcagactcacgaattttttagaaaacagtgcttcttaatgatatgctattatacttattagttatgtgcaagctttgtatattcttatatttatatataaatataaaaatttgttaaaggcacgtatagttaagagagttttattttaataaggtcatattgtttttactatgtttaaaaaactttacttctgaaaggaacataattatatctaggtcactagaacgtcattgtgttttttgttggttgccacagcttggggaaaaatagaaaaaaattaatgactgtatttgaatattttgtaatgcactgctatttattatatatatcaacagtagttcaaggtgccatcttaaattaattgcatcttcattaggaaaaataaaaagcataaaacacaatttctggttactatgaataaacgcctaaatgttaagatga

SEQ ID NO: 388027 - DNA, 552 bp, Homo sapiens
agctgggactacaggcacctgccaccacgcccggctaattttttgtctttttttggtagaggtggagtttcaccgtgttagccaggatggtctcgatctcctgaccttgtgatccgcccgcctcagcctcccaaagtgctaggattacaggcgtgagccactgcctttgttacttttcttaatcagttctcatgcgctcatccacccctaagcctggagcctcaggagatcactgatatactgtctatcactagatgattagattggccttttctgaaacgtcatctaagtggaatcatatagtgtactggatacccttcttttttttgatcagtgttatgtttttgagacttgtccttattgcatgtgtgggtagcccattactttttattcctgagtagtattccattgtatggatatgctgtcatttatggctgttttgagtaaagctgctatgaacatccacatacaggtctttgtgtggacatgtgttttcatttcttttgggtaaatacctaggagtagaatttctcggtcatatgagaagtgtgt

SEQ ID NO: 388028 - DNA, 276 bp, Homo sapiens
cttctttccacccctcccctggattggagaagagatacgttattgcccaccacatgggcagtaactccctaggaggtgacagagcaacaggataaaaggaacctgggtccttggataacttcatgaaatagagttgccttttctctgtggctctcccacttaactctggactattatatgagaaataaataaactaaattgtttgaaaaataaataaaagatgaatagggagggagtgactacaaaagttgcttatcaggaattctaattggttta

SEQ ID NO: 388029 - DNA, 1729 bp, Homo sapiens
cgcttcctgcgcctgttcaggtcatcgcttgctctggttcccaggctttggcctctagtggacgagaatcaccgagtctgcggggctagacgctgaccgcccgggccagcacctaggcgggcgggagctgtgcggcccagggttcgcgcgggccgggtagaggctcgagccaggacccccgagcgtgaaccccggagccggcggcgctggggccagaggggccgggcgggaggtgatggcggaggcgaaggggcgacgggacctgggcctggcccgtgtgtgtcctcagaggcctggcgccggccgtcgctgtacggtctatcagccacagtctctgcaagtttccaagagcagcagaaaatgaacacattgcaggtgagttttcctgcttgtgtatatgttcctcaattttattttatgatgcattttaagaggtttgtaaggattcatacttttttttttcttttttttgagatggagtcttgctctgttgcccaggctgcagtgcagtggcatgatctcgcttcactgcaacctccacctcctgggttcaagtgattctcctgcctcagcctcctgagtagcagggattacaggcgtgcgccaccatgcccagctaattttttgtatttttagaagagatggggtttcactatgttggccaggctggtctcaaactcctgacctcaggtgatcttcccacctcagcctcccaaagtgctgggattacaggcatgagccaccaagcccagccaggattcatactttaaaatgggaatgtggaaatagacattatcctgtaaaatatagttagtgtggcagatcagcaccaaaaatgatttgtgaagcttgtatgtatgggtagtatattttaaggctgttgaaattgagccgcacctaggactgatattcttggcagtcatcacaaaaggaaagtgccatctgtattagtccattctcacactgctatagagaaataaccaagactgggtaatttataaagtaaagaggtttaattggctcacgtctgcaggctctatcataggaagcatggctgaggaggcctcaggaaacttacagtcaggtgaaaggtgaagggaaagcgggcgcatcttccatcaccagagcaggaggaagagggaacactggggattacaattgaacatgagatttgggaggcaacacacaccgaaaccatatcaccatccatgacatcgtttgcattgattataaggagaaaccagttttgttacttgtggatttaaaagattttctgggacttggaaaaatttcttcattcaagttggtgtaattgtggatagctttcctaacaacaaccattaattactgtaacttatggcttattcttggtgcttatgtaagcagagggcctgctgcccaaggagaacttggtgcatataatttttccagggacggaaatatcgtgatccaagtaaacaattctgtttttactgttgagtcctagatcatggggggaatgaatgacgtgatcatccgtcaaatatttgttcgtctttttgttcgggttgcacagcaaacaatacagacagttactctcttgtgaagatttcctcatttctgtttctcatttcacttctcagtgttttcgttttgtcctcaataaattaggtattgatgggacgtatttcaaaataataagagctatctatgacaaacccacagccaatatcatactgaatgggcaaaa

SEQ ID NO: 388030 - DNA, 789 bp, Homo sapiens
caaattattaggaaatgtaatttagatttaaaaggcctctgttgtttacaaatgaattctaatcaggtaggtactagcagctcctcagggaggtaaaagctatcatttagaatgtggctgccctttctgggtagctttttgttttttctgatcataatggcatgcaaaaagataatacaagaaagtaccaatgctaaggcttacattggtaaagagagagagaatattactcttcagcaattgttcattgttatcagtactggatttgattacggatataggatttatagctctaaatttggagctctaaagaaacctttagttttgaaataactgtaagaatttgtaactcttgagtttccaatattaaatcattttcccaacttttaaaagttagattctccttttatccataaaatggtcctgaatacttgaagtttattataatcacatatctcatgttaaaacaaaaaaaaagctacaatccctgaactaacaattttctttttggggattctgggcaagagggctgactagaagcagctaatatgcaccaatttcaaggagagaagacagtgtgatcagtaaacactagctcttcaactagatcatccaagagtaaacttcggaattcatgaagaaaacaacacaacccacagagaatggagaagcgtgagatatgacaattgcccacccggagtggtacagagccaggggaggcccccacttcgggaaaatggtcagtgagtgagggtccctggggaccacacttctgccatggaccccttt

SEQ ID NO: 388031 - DNA, 888 bp, Homo sapiens
cgcttcctgcgcctgttcaggtcatcgcttgctctggttcccaggctttggcctctagtggacgagaatcaccgagtctgcggggctagacgctgaccgcccgggccagcacctaggcgggcgggagctgtgcggcccagggttcgcgcgggccgggtagaggctcgagccaggacccccgagcgtgaaccccggagccggcggcgctggggccagaggggccgggcgggaggtgatggcggaggcgaaggggcgacgggacctgggcctggcccgtgtgtgtcctcagaggcctggcgccggccgtcgctgtacggtgagccccagggaggcggatctgggccccgagaaggacacccacctggatttgccccataggcccggcccgggcccctcgggagcagaacagccttggtgaggtggacaggaggggacctcgtgagcagacgcgtgcgccagcgacagcagcccgccccggcctctcaggagccgtggggcagaggctgcggagccccaggagggccggagccctcatgacttcagtgacctgcttctgcccctctaggtctatcagccacagtctctgcaagtttccaagagcagcagaaaatgaacacattgcagagggctgactagaagcagctaatatgcaccaatttcaaggagagaagacagtgtgatcagtaaacactagctcttcaactagatcatccaagagtaaacttcggaattcatgaagaaaacaacacaacccacagagaatggagaagcgtgagatatgacaattgcccacccggagtggtacagagccaggggaggcccccacttcgggaaaatggtcagtgagtgagggtccctggggaccacacttctgccatggaccccttt

SEQ ID NO: 388032 - DNA, 137 bp, Homo sapiens
gctctcaggacttaatcacgtgcattgtgcctggcctcttgtttagaggtttgaaacatgacctcttgacttcctattttagtaaatcaggttaagttcagctctatcccacttcctactttttttttttttttttg

SEQ ID NO: 388033 - DNA, 834 bp, Homo sapiens
gttttttgtttgtttgtttgttttttgagacggagtttcaatcttgttgcccaggctggagtgcaatggcatgatctagtctcaccacaacctccgcctcccgggttcaagcgattctcctgcctgagcctccccagtagctgggactacaggccaggcattccctgccagcagcttaagcaccatgagttttgtcactgtctttgatgtgcctctgaaatgatgagcaactcttggaaaatgccaaacaaaacaaagtgtgaccttccctcaactcacacagcatcggattcttggaaaaccctttgtatattaaaaccttgtggaaaaccctgtgtttatatataagacagaggtgggctccagtctcagatcatcatgacgaaagtgaggtttgcgcagcataaatgtccagcaggacacatggagctcatgtggggtttggggtgatgcttggtcatacaggatctgcccagagccttgtttccctggcagggcccctcatgtgtcaggagcaccacccttccagtcactgaggcaaaccctcctccccacgaatttccagaaagtcctgggggagatactgctcccaaggagatgccctgttccagacccctcccagctctcatgaggccttacatcccactggccacggcagcctcaccctgggactacgaggtgcccacccctgtgggtttggacttggaggctgccaggtcagcacactggcccatgccccagccctcagaagggtggtgccagggttcccgtctgcaagtgcccagccagcctgtaaccttcctggctccctcccctggagcttctgggctcaca

SEQ ID NO: 388034 - DNA, 1495 bp, Homo sapiens
gacatttgctagaagctctctgatgtccaccccctgtgctgaatttgctcctattgctgtttctgagagagagggagaatgtctgtatgtacaaattggtaaacctcaggtttatgaatataagaaagtacaagtcggatagactaatggaaaaaaaactcaaaggatttagagtttagatttgggacccattcttggattaagtcccaaacctgtttacttatctgtaagatgtagctggctaagggtgttgcttctgagcttcaactaagataatatgtcaaagaacatagtaagccatgagatgctatataaatgtggactaatttactctgtgggcaggattatttgtatagatgtgcaaagggccaggtcttcccaaatacagccagctgcatcttagttggtgctattcacacagtatgaggattttattacttttagtttcctcttgctatcctgacagaaattataccaactagagattcacttggattaataaatgtatacttagttatacatttttcgaggactgttgaaatgatggtcatattttagtttaaatggtttccttttagcagcgtactataatgcaagaaaagttaagacactaagcttttaggatcaaatttggattgaaattctaacttcggaacttaccagccaaattaccttgaaaaaattacatagcctttctgaacaacggttttgttttttgctctaataccgtcaaccttaagccttgtgggaaaggtaaactgagaacatatggtttggcacttaacatacgcctagcactgggtagggattgctaaatggtttcctctgctaacaagaatacacagcttggaacagctgcactgaggaaatgagtgtttcagaactccgttttgaaaactggttggaacaagcatgaaagatcaatggacacttatgtcactgtcaaccttgtcttctgaaatatacaataacatagaaaaaagtcaaaaccagcattgaactacccaatctttaatgcaaatgcaatggagagggaaagtaggcaaattggaacacagcccactatttctgggtgatagtagaccctaatgaacagtttagagcagcatcagggcagagagtgaggcagaggtgggaactagaaagaggctgatggaaaatagagtggtgagatgttgcccaaaactgcttttttctttgtttcagagtattacctaggattgattcagtgcttggagcatggcccttctgcttccatgacccagaatttagatttgttccatgatgctgcaagatggccattataggttaagaaacctttggtagactcttctgggaatctaatcataactcatattgcttgtcagtaatatttaagcctaaataatggtcagacttaaacatatcccctttgggaacatgaccaatctgtatttgggaataaacaatatttaaagttttcatattttggtttcccacttaaccaaatgtatat

SEQ ID NO: 388035 - DNA, 309 bp, Homo sapiens
aaaatggaacaaactccaagaatttgtaaaggcacagaccagtgtacccagtgtgctaggatttgtgcagaaaaataagaaaatgcatgtgcgagtgtctgtgtatatgtgcatttgttgtgggtgaacagaatacttccagaatgagacccaatcagccagtcagtgccttggtctcggggaagcagaacctcttggcttggagacagttttgaatgtaggaccctgttcacgtttaaactaaccccaaacaaataatatgtaaatttaaaaagaaaagaaagtcgcgtgggcactggagtctcacgg

SEQ ID NO: 388036 - DNA, 624 bp, Homo sapiens
attttttgagatggtgtcttgctctgtcacccaggctggagtgcagtgttgccatcttggctcactgcaaccttcgcctcccgggttcaagtgattctcctgccctcagcctcccgagtagatgggattacaggtgcacaccaccgtacctggctaattttttggtattttcagtagagacaggatttcagcatgttggccaggttgatctcaaactcctgaactcaggtgatccacccgcctcagcctcctaaagtgctgggtttacagccgtgagccaccgcgcatagccactttagattaactttacttatctactgtcattcagtatctactgaactcctacagcgtgtagtcactgtgctaggcagggctagcaatacagaattgatagactgctgtccttgagttgaatgcttagtttatttatttctattctgtccttgctagataaaagcatttaagctataaagtttcaactaagtagagctgaaagtatctcatttattgattcagcaaatattaattgggcatctcttctgaggccaagcattattctaggtggggatttggcagtgaacaaaataaaacaacaaaagcccttccttcatggagcttgtttac

SEQ ID NO: 388037 - DNA, 344 bp, Homo sapiens
agttagattcaacttgagtatgtgaagagctgtgtttctaaacccctcccccaccctagccccaagcttcatcttagctccactcctgaccctatccagctaaaggtccccacccagctcctgcctatctagtcattgcatatggcaagacttgaaagtcctatctcaaagcagcagaattatcagctacgactgccttgtcatggacagatgagcagaggcctgggaagacagcctggagccccaacttctggtgcacccccttgtgttatctggcacatgatcctgttgctctgggactgattatgggatctgtgtatatcttattcctttctgtctccagg

SEQ ID NO: 388038 - DNA, 421 bp, Homo sapiens
ccggagctctcatgtgaattcgttcaaccaccgtgtggtacgaagagcccatcgtagttctcccaaggtgatgctgcctacgggatacaggtgaatcttctagattagacttgtgagtatgtgaggcttggaagtggctgtcgtcatacctggctaatttttgcacttttagtagagacggggttttgccatgttacccaggccggtctcgaactcctgacctcaagtgatccacccgcctcggcctcgcaaagtgttgggattacagccactgtgcccggcatccattttagctttaaaagagacttttgcagttacgactattgacaataattatcgctgatgatgaactcttggatattagtaacccagacaatgagtcagggttttgctgcccataaacaacacattgttacaaagc

SEQ ID NO: 388039 - DNA, 295 bp, Homo sapiens
tagacggagtctcgctttgttgccaggatggagtgcagtggcatgatcttggctcactgcaacctccgcctcccggttcaagcgattctcctgcctcagcctccagagtacctgggactacaggcacgcaccaccatgcccagctaatttctgtatttttagtagagacagagtttcaccatgttggccaggatggtttcaatcccttgacctcatgatccgcctgccttggcctcccaaagtgctttttgtcgaatttttttttaacaataaacatgaatttataattttaaaa

SEQ ID NO: 388040 - DNA, 423 bp, Homo sapiens
cccgagactgagcaattcacaaaacaaagaggtttaatgggacttacagttccacatggctggagaagcctcgcaatcatgatggaaggcaaggaggagcaagtcacatcttacatggatggtggcaggcaaaaaaaatgagagaacttgtgcaggggaaccccactttttgaagccatcagctctcgtgagacttattcactatcatgagaacagcatgggaaacacttgccccatgattcagttacctcctaccaggtccccccacaacatgtgggaattcaagatgagatttgggtggggacccagccaaaccatatcaccttgttctttgcctttagactttataaaatatttatccagcctcctattctttccttgaatttttcccacttacataatggtgtgttttgagattgaata

SEQ ID NO: 388041 - DNA, 153 bp, Homo sapiens
atctacccacctcggcctcctaaagtgctaggattacaggcatgagccacagtgcctggcctgtatgctctatttctatccatagtgtttagcatgtaaaaagcattcaataaattgctgtcaaaggaacatttttttcaaaaaagttctatt

SEQ ID NO: 388042 - DNA, 226 bp, Homo sapiens
cccgtttcctgtgaaggcctcaaatttgtccaaatacccacttgtaaatactacaaaaagagtgtttccaatctgctctatcaaaagaaaggtttaactctgtgagttgactgcacacatctcaaagaagtttctgagaatgcttctgtctagttttcatatgaagacatttcctttttcactgtaggtctcatagcacaacaaatgtccacttgcagattctaca

SEQ ID NO: 388043 - DNA, 690 bp, Homo sapiens
ttgtagaaacagtgactgtgtggtagttcaagtgtatgctctttctgtatttgaaaataaaagcaccaaagtggagctcacgcaatattaagaattacatgttgtacgggttaccctggatgcccccaggaagggggaagcagtttgaattcttggtgtttcacaagaagtgttcccaggaccgtggtttcacacgatgggaggccagctctgtctccaaccagcagtagcttttcacaacagtggggacagaaccctggcacatcatgaaagttaggaggccaccctgcctccaacagatagaattcagccacccaagtgggagccatactgatcccagcaccggaaatgcagatacggaggcccggatggagaggaaattttgcagtcatactggaggaaaccagggctggaccaaggcacgtgggtgcccgggacaggccaatagtatggtgtttgccaatatttacatagagaaaagactgagcactccacagcataaggcagaagcataaggcagagaaggaggaccattgttagtctagacgggcaattcacttctgcccctaacgtacgtacctcactcggcaaaacagtccccctctcctcagaaggcaatttaatctagactcattgattcaatgccctggcatttgatctaagtattctttcttgcacactctactagca

SEQ ID NO: 388044 - DNA, 180 bp, Homo sapiens
tgttagatgcatttcatcattgcgtatcatagagtatgctaacacaaacctagatggtagagcctaccacacgccaaggctgtgtggtatggcctatcgctcctaggctacagtacagtaacgtgttatacaggtttgtatagcacattactctactgaatattataggcagttgttaca

SEQ ID NO: 388045 - DNA, 814 bp, Homo sapiens
cgagctcaattcgtccgagagcgggagcggggggcccttgttgtataactgtagagaagaacagtcaggcttttggcgtctaagtttcagcctcctgccggcaccagatgctgaccaggccctcccaggtggtgagcaatgctgtttccaggagaggcatcctagggccagagaggccaaggtgccagggacatggccccaactgtcccctaaccaggggtagaggagtctagacccttgacatcaacacctatgaaagctgctgaactccttatctgtggaccctgatgccgagtgcaagtatggcctgtacttcagggacggccggcgcaaggtggactacatcctggtgtaccatcacaagaggccctcgggcaaccggaccctggtcaggagggtgcagcacagcgacaccccctctggggctcgcagcgtcaagcaggaccaccccctgccgggcaagggggcgtcgctggatgcaggctcgggggagcccccgatggactaccacgaggatgacaagcgcttccgcagggaggagtacgaggcaacctcctggaggcgggcctggagctggagcggacgaggacacttcgactccaccgagtcgggtttgtgacaatccatggccccttggaacgtgctgtgcagaggaggccgagtttctcgaactgagagatgccgacgaacgaatgatgtcccactctcactgcagacccgtggccgtctgaaacaaaaccaacctgtgctccagaaactcaagatccaatccagccacaacgtgctgagcccaggccccacccatgaaagatcc

SEQ ID NO: 388046 - DNA, 503 bp, Homo sapiens
gacttctagagacttctggagtctctatccccctagagacttcccctagaatttccttatctgactaaggaaacttctttccaaaagaaatgcaattgtcttaagatccccttcctaggaatctcatcaaataatcagaaaagattaaccaccagagaagaatggagactaaagtcagatgactcttcatctagtcctctgaggcagtgccaagagataacctgggaggctttatctaccaggttaagtttcacccctcaccttccggtaacttgctggcgtcgtttagtttcctaggagaatcatttacaagataatgtctgagcctcctgggcccattcatttcccctaaaaatcattaacaacccctgcattttccccatctccctcttccctatgaagcagatatataagcctcaatcatctggccctttgggtctcatatttaatattgtacccatgtttttgtatgttaataaatttatatgcctttttctcctatt

SEQ ID NO: 388047 - DNA, 497 bp, Homo sapiens
taactaaaaaaaattcctttctcatctgtactttaggagattgcagaatcttgtggcgagggtattaaaactgaccattcaaagtcatagcccatttcttggtacttgcatttctctctgtgtaaaattggtacttcatagccttctgatcctgtatttctgatacttattgatcaattatgattgaaagccaggttgtttaacgctctgtcagtcttcaaatgaacttttatttattaaactgtttattccttctgatttaaataaatttcatttcccaaagatgagtaggtatgaaaaataatactcagaagagattgttcttgtggggagaactgcttctacaggatctagctttgattttgtatctttcaatctttttaaaatcaactttaacgaatttaaacctattttaagtgtacaagtaataagtttgacaattgtatgtgacttctaccacaataaaatatagaacatttttatcattctataagttc

SEQ ID NO: 388048 - DNA, 377 bp, Homo sapiens
ccagatgtcataagataatggaactatgcatttagaagttacaggaagaataattctgcatctcaaattccctttccagctgttctggcaattaagtatgagacatttttaaatgccacaaagtctcagagaatttacatcccagaaccatttttaaggaagttacataaagatgtacttcaataagcctagggtgaaacaccccaaatgtagaatgacatgggaagcaagaaactatggaattaagccagaaatccaatgaacaaagatcccaagatacagctatccaacactcctctaaattagaataggaaacattatttaggtgatggccacgctaaaagcccagactttaccactatgcagtatatccatgt

SEQ ID NO: 388049 - DNA, 424 bp, Homo sapiens
gaactataatttgtgaaatgccaatacctttctatttggataaagttaaaaaaaacaggttaacattctctcaggtctttagatagtgcaaaacagtgacaggtatgggtgaggggatgttggggggagatgggatggaagactctataaagacatagtcccaaacagaccttttctaactatttgggcaaaacatgttctcagattttaaaatactattatgtcaattatcttcatttcatatattatgtataattcagtagatggcaaataacaaacattttcttcagaatacagctagaatagccaaggcttaatcaagcattacacttgtctagttggccagtcacaaatgccacatacagataatgtcttacactacctaatcaactgaagaagaaagcaactactttctaaaactgca

SEQ ID NO: 388050 - DNA, 341 bp, Homo sapiens
cacccacagaaacctatctcattactttgtagtcactattcgtgtatttgaaatgattaggaagtttagaaaaccatactctggctgtaagaatcttagtttgccatatcaatgattccgatgctattcctctccatctactactctgtgtagcacaggaaaacacagctcctgcaacagatgttttgagaatccaaatgcaaggaaaatagaaggggaaagcagtgtttatactttataagattcttatagacctacctttttcttttcaacacatgctacgaagtttattatgcttgatctcctgagatcagtgcatgctaggccctatgcttcgtaat

SEQ ID NO: 388051 - DNA, 549 bp, Homo sapiens
ccgagtagctggggctacaggagcgtgccaccacgcccggctaatttctgtatttttgtagagatggggtttcaccatgttagccaggatggtcttgatctgctgacctcatgatccgcctgccttggcctcccaagtgctggattacaggcatgagccaccgcgcctggccagctgtttttaactatacaattcattggcatacatcacaatgttggccaaacatcactactgttcatctctagaacttttttcatttccctcaactgaaacttgatacccattaaacaataactccttattcccctctaccccagcccttggtaaccgccaatctactttctattttatggattgcctattctagatgtttcatatgaatagaatcatgcagtatttgtccttttgtgcctggaggcctgaaaacactcacttaacttagtgttttcagggttcatctaggtcatagtgtatcagaacttcacggatttatagctgaataatattccattgtatgcgtataccacattttatccatccttattggca

SEQ ID NO: 388052 - DNA, 450 bp, Homo sapiens
gggggagcaagctcacctaagacaggagcaacaggaccaccgttctggccttgggcccagagaccaagttgtatttcatgctgtctaggaaatttcaatgtttttcaatgtatttcaacgtaattcaatatattttaatgtatttcaatgttgtccaggaaataagttatctgtctttaaaatcatcccctttttcctccttttctccttttccaaatgttaagcatttcccatcccactgtctaacagcagctgagcagtaacggtttgctcacctgctttaattccctgcagatgagcggaatcttcctcgcagctcagatgtgtaaggaggcaccctgggatgacagtggccccccagttctactgtctgaccttgaatccttcagggcagatgggagaacttgtgaattatgtgtctgtttggtgcctgacacggagccaggaatg

SEQ ID NO: 388053 - DNA, 323 bp, Homo sapiens
gagacatagtcttgctctgttgcccaggctggagtgtagtcatgccatctcggctcactgcaacctgctccgccccatgggttcaagcgattttcctgcctcagccttctgtgtagctgggactacaggcacctgctaccacacccggctaatttttgtatttttagtagagatgttggccaggctggtctcgaactcctgacctgaggtgatctgcctgccttggcctcccaaagtgttgggattacaggcgtgagccaccgtgcctgggccattaccatctcaatgttagatttccgaacaatgttggccagtcttgctag

SEQ ID NO: 388054 - DNA, 228 bp, Homo sapiens
ttgtggactcgaggaattatatctgcaggggcacctgacacaaggtctggcccttcacccacactgcagcagccgcccttgttaacgctgtccccgtccgcccagtccctgcggtgttccagcagcatcttcagtgtgggtattgcaggcaccaatggaacaggttggggaggagagtttgggaccaagaacacccatgaacccttagaagccaccatagaggtaagg

SEQ ID NO: 388055 - DNA, 386 bp, Homo sapiens
cttgataacatggccctctaaactagaagtcttgggatgaatggtaaaattctaagacaataatatagattactttgccacctagaaactagctatgcttaagggaagtgttggcatgggaggaaccctatcaataattcaagtgattttagattactatccacataactataaaaacaaaacattttaaaacaaaaaattttagcttagttgaaaaaaaagagaacttcggctgggcacggtggctcacacctgtaatcccagcactttgggaggccgaggcgggtgaatcatgaggtcaggagtttgaaaccagcctggccaacatggtgaaacactgtctctaccaaaaatacaaaacagccaggcatggtggtgtgcgcctg

SEQ ID NO: 388056 - DNA, 1081 bp, Homo sapiens
aattgacagtgacattatatctgcaaaataggcttcatacctactgtgttagttttagtttcctaggcctgctgtaacaaagcaccacaaattgggtagcttagaataacagaaattgtttgatagttataaataaaggtcagatgtctaaaaccaaagtgttggcagggccgtccctctgaaggcactgaaaaaaaaatttccagtccttctaatttcttgtggttccttaacttgtggcagcataactccagtcttcacatgaagttcttcctgtgtgtgtatctgagtcctaatataaggagactagtcatattggattggggtccatcctgctctgttaatgacctcatcttagctgctgacatctgtaatgactctattaccaaataaggtcacagtatgaggtagtaggggctaggacttttaacatacgaatattgggaggacacagttcaacccattaacacctacttataccttgattaattatatgaaaaccattcagtgtacaactgcttcaaggattgaaaccttgtatgtagtcccagctactctggaaactgaggtagtaggattgcttgaggcctgaagttcaaggctgcagtatgctgattgtgcctgtgaatagccactgcaccccagcttgggcagcatcagaattatagagacagaaagtagaatgatggttgccaggggttgcaggaagggcagcgagagggaattactgtgtaatgtgtacaaggtttcagtttgggaagaagaaatgagtcctggagatggattacggtgatggttgcacagcagtatgaatgtacttaatactactgaattgtatactcgaaagggttaatatggtgaattttatgtgtattttatcacaataaaaacattgaaaaataaaacaatctttgtatgtatatgtatatatgtgtgtgtatatatgatatatatgattgatatatatatatcagtagtaagaaagggaataaaaactgatgaggcaaaatgccctttagagtgaagaaggccttaccacttggatttacaactttaagtccaagtagacaataatagaaac

SEQ ID NO: 388057 - DNA, 450 bp, Homo sapiens
  misc_feature (18)..(18): n is a, c, g, or t
  misc_feature (43)..(43): n is a, c, g, or t
  misc_feature (63)..(63): n is a, c, g, or t
gaatttaaataggactcnactaaggggaaatttggccctcgangcccaaaaaatgggcacgancggcacgagttttgagacagggtcttactcaggctggagtgcagtggcaggatctcagctcactgcagctcgacctcacaggctcaagcaatcctcccacctcagcctcctgggtagctgcaactacgggcatgcaccaccacgattggctgatttttgtatgtttttgtagagacggggtttcaccatgttgcccaggctggtctcgaactcctgggcttaagtgatccgtccaccttcacctcccaaaaaggactgggattacaggcataaaccaccatgcccagccttgattctattttttaagatgtaatacatttatttgtttgattttcaaacagtacataagtctttcccccaatgctttctccaagccacctagttctt

SEQ ID NO: 388058 - DNA, 414 bp, Homo sapiens
aaccatatggcttctgatggttcttgagtaggagaaaccctacttcattaactataacccagatccattgataactataaaaggataaaccagaaagaagctagtatatttctttttggtttcccttcttatggttatcaatggtgtagctatcatatctcatctactcatatttgacaagtggtgtaaattatgcatttctttgttaatgagtctaataggctaattgctctacattctctctctctctctctctttagcgggtaggaaaggagattcacaaatcatgctactactaccatttccaagacttcttcaatccgcttatatttaaatgcaggaaacactattaaaatcatttatgaactcaatactcaacaaagtaaatactagcctaaaatgctcagaatattt

SEQ ID NO: 388059 - DNA, 412 bp, Homo sapiens
attcaaggagtatacaacttttacattcctatagcacgttagggtttattcaaagtgaggtccttcatttgaccctcagaacagtcatgtgaaataggcagcacaggcatcattacaaatgtgactttacaaatgtgagaaggctgaggctcagagaagtgaaatgatttggctaaggtcaaaagcaagtcacagtgaatgcctggtctggagtccggtgtgttttcatctcagcatgcaaatttaaacccaaagaaagttaggtgcttaaatgctctagggtagctgggctttacgtggctacttaccatagtgtttatttgaatgttagagaaatagcttcaagcaacagaaggcttgacttagagtggtttaaacaaatagggatttaatgtttttgtataattagaag

SEQ ID NO: 388060 - DNA, 2295 bp, Homo sapiens
gccaccccacccagcccagacacaattatagttagcattttggtatacagcatttacttccatttttaaattattttgctttattaattagttggtaattatagaatatatgaatatattcaaatttatattttgccttttggtatgaatatttcatcaggatttattttgtgttgctaccacatttttgtgttattttttgtttttttagattaatgaatgtgttatgaaaaaaatgaataagttttatgaaaaaagaggcaatttctaccagaacactgtgggtgatctgctaaagttcatccggaatttgggagaacacattgatgaagaaaagcataaaaagatgaaattaaaaattggagacccttccctgtattttcagaagacatttccagatctggtgatctatgtctacacaaaactacagaacacagaatatagaaagcatttcccccaaacccacagtccaaacaagcctcagtgtgatggagctggtggggccagtgggttggccagccctgggtgctgatggactgatttgctggagttcagggaactacttattagctgtagagtccttggcaaatcacaacattctgggccttttaactcaccaggttgcttgtgagggatgagttgcatagctgatatgtcagtccctggcatcgtgtattccatatgtctataacaaaagcaatatatacccagactacactagtccataagctttacccactaactgggaggacattctgctaagattccttttgtcaattgcaccaaaagaatgagtgccttgacccctaatgctgcatatgttacaattctctcacttaattttcccaatgatcttgcaaaacagggattatcatccccatttaagaactgaggaacctgagactcagagagtgtgagctactggcccaagattattcaatttatacctagcactttataaatttatgtggtgttattggtacctctcatttgggcaccttaaaacttaactatccttccagggctcttccagatgaggcccaaaacatatataggggttccaggaatctcattcattcattcagtatttattgagcatctagtataagtctgggcactggatgcatgaattccactccttccagaaccaactgcattggttttccatgaccttaaggcagtagttctcaactggggggcaattttgcactgaagagagcatttggcagagtctgaagaagtttttggtgtcacagctttgtggggagcatgctatggcatttagtgggtaaagaccagggatgctgccaaacctgccttgcacaggacagcccctgcaacaaagaattatccagacaaaaatatcaatggtgctgaggttgagaaaacctgacttaaggggctgggatgcttttgaactagcttaaggcccaggactgtggagtgtgtggaccaccccacagaggagggactcagatttatttactcttgctggatctgtagtgatggagttccttctggtgtcagccccacaggaggctcccaggcctccctcacttcccatacccagtctaggagctccttctggctcccaagcacccagagctttcctccgccttttagttttggttcctccactggaatgtaggctcctcacgggcgatggctgtcttttcttgactttgtatcttcactgccaagcaaaaagtctgccaagtgggaatgtttaataaatattcattgaataatgaatgaaccatcttcgtacatgaataataatactgtcttacgtttttctggtgctttataatgtatacattacatctgagtattttattttatttaattttcaaaacaatcctttaaggtcaacattgttatccttattttgctgatgaggaaactaaggttagaaacattttgatttcctctaggacgtatagctaggaagtgttactatcttgatttgaacaaattttctggtgctaagtctgatgttctttccatgaatcattgtggtggttgagatggagctttgtaatgggaataaaacagtaccttaggttctttctgaaaaggaggtatctagcaatggataaatagataccactgaatgaaattaaatgttgattaggaacaaatttaaggcttaaaaaatactttatgagcagcaagattgctttaacttttaaaatgaagctttggttctctgatttgtaatgagcacctggatatgtcaattaaaatgcccatttgtgaagcttactcaataaaactttaaattgtcaaaaaaag

SEQ ID NO: 388061 - DNA, 2075 bp, Homo sapiens
caggaggaaactgctcgggctgcaagcagtcttccaggctttgcggctgccaaaggaataattgagacgtctgagttgagcaggtggaatgtcagaagactgagaacattgttccttcttcatactgctgctctgttgccagagaatcccaatttacactcaaagcttctttgattaagtgctaggagataaatttgcattttctcaaggaaaaggctaaaagtggtagcaggtggcatttaccgtcatggagagcagggatcataacaacccccaggagggacccacgtcctccagcggtagaagggctgcagtggaagacaatcacttgctgattaaagctgttcaaaacgaagatgttgacctggtccagcaattgctggaaggtggagccaatgttaatttccaggaagaggaagggggctggacacctctgcataacgcagtacaaatgagcagggaggacattgtggaacttctgcttcgtcatggtgctgaccctgttctgaggaagaagaatggggccacgccttttatcctcgcagcgattgcggggagcgtgaagctgctgaaacttttcctttctaaaggagcagatgtcaatgagtgtgatttttatggcttcacagccttcatggaagccgctgtgtatggtaaggtcaaagccctaaaattcctttataagagaggagcaaatgtgaatttgaggcgaaagacaaaggaggatcaagagcggctgaggaaaggaggggccacagctctcatggacgctgctgaaaaaggacacgtagaggtcttgaagattctccttgatgagatgggggcagatgtaaacgcctgtgacaatatgggcagaaatgccttgatccatgctctcctgagctctgacgatagtgatgtggaggctattacgcatctgctgctggaccatggggctgatgtcaatgtgaggggagaaagagggaagactcccctgatcctggcagtggagaagaagcacttgggtttggtgcagaggcttctggagcaagagcacatagagattaatgacacagacagtgatggcaaaacagcactgctgcttgctgttgaactcaaactgaagaaaatcgccgagttgctgtgcaaacgtggagccagtacagattgtggggatcttgttatgacagcgaggcggaattatgaccattcccttgtgaaggttcttctctctcatggagccaaagaagattttcaccctcctgctgaagactggaagcctcagagctcacactggggggcagccctgaaggatctccacagaatataccgccctatgattggcaaactcaagttctttattgatgaaaaatacaaaattgctgatacttcagaaggaggcatctacctggggttctatgagaagcaagaagtagctgtgaagacgttctgtgagggcagcccacgtgcacagcgggaagtctcttgtctgcaaagcagccgagagaacagtcacttggtgacattctatgggagtgagagccacaggggccacttgtttgtgtgtgtcaccctctgtgagcagactctggaagcgtgtttggatgtgcacagaggggaagatgtggaaaatgaggaagatgaatttgcccgaaatgtcctgtcatctatatttaaggctgttcaagaactacacttgtcctgtggatacacccaccaggatctgcaaccacaaaacatcttaatagattctaagaaagctgctcacctggcagattttgataagagcatcaagtgggctggagatccacaggaagtcaagagagatctagaggaccttggacggctggtcctctatgtggtaaagaagggaagcatctcatttgaggatctgaaagctcaaagtaatgaagaggtggttcaactttctccagatgaggaaactaaggacctcattcatcgtctcttccatcctggggaacatgtgagggactgtctgagtgacctgctgggtcatcccttcttttggacttgggagaggtaagtaaaactttgtgcagatgccacaggcctccaggatggaaagggtaaggtgg

SEQ ID NO: 388062 - DNA, 4236 bp, Homo sapiens
caggaggaaactgctcgggctgcaagcagtcttccaggctttgcggctgccaaaggaataattgagacgtctgagttgagcaggtggaatgtcagaagactgagaacattgttccttcttcatactgctgctctgttgccagagaatcccaatttacactcaaagcttctttgattaagtgctaggagataaatttgcattttctcaaggaaaaggctaaaagtggtagcaggtggcatttaccgtcatggagagcagggatcataacaacccccaggagggacccacgtcctccagcggtagaagggctgcagtggaagacaatcacttgctgattaaagctgttcaaaacgaagatgttgacctggtccagcaattgctggaaggtggagccaatgttaatttccaggaagaggaagggggctggacacctctgcataacgcagtacaaatgagcagggaggacattgtggaacttctgcttcgtcatggtgctgaccctgttctgaggaagaagaatggggccacgccttttatcctcgcagcgattgcggggagcgtgaagctgctgaaacttttcctttctaaaggagcagatgtcaatgagtgtgatttttatggcttcacagccttcatggaagccgctgtgtatggtaaggtcaaagccctaaaattcctttataagagaggagcaaatgtgaatttgaggcgaaagacaaaggaggatcaagagcggctgaggaaaggaggggccacagctctcatggacgctgctgaaaaaggacacgtagaggtcttgaagattctccttgatgagatgggggcagatgtaaacgcctgtgacaatatgggcagaaatgccttgatccatgctctcctgagctctgacgatagtgatgtggaggctattacgcatctgctgctggaccatggggctgatgtcaatgtgaggggagaaagagggaagactcccctgatcctggcagtggagaagaagcacttgggtttggtgcagaggcttctggagcaagagcacatagagattaatgacacagacagtgatggcaaaacagcactgctgcttgctgttgaactcaaactgaagaaaatcgccgagttgctgtgcaaacgtggagccagtacagattgtggggatcttgttatgacagcgaggcggaattatgaccattcccttgtgaaggttcttctctctcatggagccaaagaagattttcaccctcctgctgaagactggaagcctcagagctcacactggggggcagccctgaaggatctccacagaatataccgccctatgattggcaaactcaagttctttattgatgaaaaatacaaaattgctgatacttcagaaggaggcatctacctggggttctatgagaagcaagaagtagctgtgaagacgttctgtgagggcagcccacgtgcacagcgggaagtctcttgtctgcaaagcagccgagagaacagtcacttggtgacattctatgggagtgagagccacaggggccacttgtttgtgtgtgtcaccctctgtgagcagactctggaagcgtgtttggatgtgcacagaggggaagatgtggaaaatgaggaagatgaatttgcccgaaatgtcctgtcatctatatttaaggctgttcaagaactacacttgtcctgtggatacacccaccaggatctgcaaccacaaaacatcttaatagattctaagaaagctgctcacctggcagattttgataagagcatcaagtgggctggagatccacaggaagtcaagagagatctagaggaccttggacggctggtcctctatgtggtaaagaagggaagcatctcatttgaggatctgaaagctcaaagtaatgaagaggtggttcaactttctccagatgaggaaactaaggacctcattcatcgtctcttccatcctggggaacatgtgagggactgtctgagtgacctgctgggtcatcccttcttttggacttgggagagccgctataggacgcttcggaatgtgggaaatgaatccgacatcaaaacacgaaaatctgaaagtgagatcctcagactactgcaacctgggccttctgaacattccaaaagttttgacaagtggacgactaagattaatgaatgtgttatgaaaaaaatgaataagttttatgaaaaaagaggcaatttctaccagaacactgtgggtgatctgctaaagttcatccggaatttgggagaacacattgatgaagaaaagcataaaaagatgaaattaaaaattggagacccttccctgtattttcagaagacatttccagatctggtgatctatgtctacacaaaactacagaacacagaatatagaaagcatttcccccaaacccacagtccaaacaagcctcagtgtgatggagctggtggggccagtgggttggccagccctgggtgctgatggactgatttgctggagttcagggaactacttattagctgtagagtccttggcaaatcacaacattctgggccttttaactcaccaggttgcttgtgagggatgagttgcatagctgatatgtcagtccctggcatcgtgtattccatatgtctataacaaaagcaatatatacccagactacactagtccataagctttacccactaactgggaggacattctgctaagattccttttgtcaattgcaccaaaagaatgagtgccttgacccctaatgctgcatatgttacaattctctcacttaattttcccaatgatcttgcaaaacagggattatcatccccatttaagaactgaggaacctgagactcagagagtgtgagctactggcccaagattattcaatttatacctagcactttataaatttatgtggtgttattggtacctctcatttgggcaccttaaaacttaactatccttccagggctcttccagatgaggcccaaaacatatataggggttccaggaatctcattcattcattcagtatttattgagcatctagtataagtctgggcactggatgcatgaattccactccttccagaaccaactgcattggttttccatgaccttaaggcagtagttctcaactggggggcaattttgcactgaagagagcatttggcagagtctgaagaagtttttggtgtcacagctttgtggggagcatgctatggcatttagtgggtaaagaccagggatgctgccaaacctgccttgcacaggacagcccctgcaacaaagaattatccagacaaaaatatcaatggtgctgaggttgagaaaacctgacttaaggggctgggatgcttttgaactagcttaaggcccaggactgtggagtgtgtggaccaccccacagaggagggactcagatttatttactcttgctggatctgtagtgatggagttccttctggtgtcagccccacaggaggctcccaggcctccctcacttcccatacccagtctaggagctccttctggctcccaagcacccagagctttcctccgccttttagttttggttcctccactggaatgtaggctcctcacgggcgatggctgtcttttcttgactttgtatcttcactgccaagcaaaaagtctgccaagtgggaatgtttaataaatattcattgaataatgaatgaaccatcttcgtacatgaataataatactgtcttacgtttttctggtgctttataatgtatacattacatctgagtattttattttatttaattttcaaaacaatcctttaaggtcaacattgttatccttattttgctgatgaggaaactaaggttagaaacattttgatttcctctaggacgtatagctaggaagtgttactatcttgatttgaacaaattttctggtgctaagtctgatgttctttccatgaatcattgtggtggttgagatggagctttgtaatgggaataaaacagtaccttaggttctttctgaaaaggaggtatctagcaatggataaatagataccactgaatgaaattaaatgttgattaggaacaaatttaaggcttaaaaaatactttatgagcagcaagattgctttaacttttaaaatgaagctttggttctctgatttgtaatgagcacctggatatgtcaattaaaatgcccatttgtgaagcttactcaataaaactttaaattgtcaaaaaaag

SEQ ID NO: 388063 - DNA, 485 bp, Homo sapiens
tgttctcacgagggggcagcttgggcttgaccgagcaggagcttcatggtcccacacgtagtatgacatgtgacctctgcacattgtttacagttcctaaactgtgatttctttttctgtgaaatagttataatagtaagtggctaccaagtagaaagtggtcatggggggtgaaggttaaacacaataacggacacacagaacttacacagggcattttatgccaagctatattgaatatctatatccctctacctgcccgtcaatgtcatgaatattgacaattcactctagaccctgctagaagaatccaaagaaattgacagtgagctggaagcaatgactgagaaattacagtacctcactagcgtgtactgtacagaaaaaatgtctcagcaagtggcagaactgggacgggagactgaggagttgcgacagatgatcaaaattcgtttgcagaacctccaagatgcagctaaggtaaa

SEQ ID NO: 388064 - DNA, 569 bp, Homo sapiens
tttaataaatcagactcccccttttatacacacagagcactctctactgtttcttcctagtacttgtcacaatttgtaagtcctaaatcatgtgattgcctacttaatgtctcccgcaacctgcccctggtgttctgtaaacttcaagacgatatgttttgctcacctttgaatttttagatcccatacaacacctatcatatcataaatgtttaataaatatttattaaaagaattaataaatgaatgtggccaaacctattcaggtctgcatggttcctccctagagttccatcacacttcacagatctaaagtttcctcccagttgtggaggtttgaagctcaaaactgctggaggtgcttcccaccatagctcgtgaaggccctattggtgttttcttcctagtccgtctctagttgatcatgacagatgggccagtgtgttttgaagaagactggctgatgcctcaccaaattctggggacaggtgcctttctccaggggaattcatgaagagactctccaggggcagggcagaccactgggaaaaacaagacccttgggtttt

SEQ ID NO: 388065 - DNA, 361 bp, Homo sapiens
gaggtattgttgttactgggaggttgaagggaacacaaattcagttataagtcctttttgaatactaagaggggaataattagggaagctaagaggggaataattaggagaagaaaaaaaaacttcaaacaattttccctgtaacatgattttacttgcatttataaactgatttttttttctaagcactcctttgataatgattaagtgtggggttacattattttagggtcgtctaatatttaagatgacttaaaaacctcacacacgttaatcccgaactgtgaaaatttctcatcttatcatccctctgttactatcaattttcctcacgtacagattcttttataattacttcatt

SEQ ID NO: 388066 - DNA, 343 bp, Homo sapiens
ttattgatatatgaattaaatgcattctgctaataagaaacatatttcgaaataagtgttacaaagtaattataatagatttaattcagatgtagcctaaactgtttattatgctactcaatttatgtattaagccctgtacctgtcctgtcccatgctagctgtagtaggggatggacgcatacacaaagataggacagaatccttaacctgagacgtttccatttagctggggaagacaaggaataggtatgaaatggtaacaaaaaaagattacatggcaaaatatgctccacagataataaaatcagtgaacatcagaaagaaaataggttagtgggta

SEQ ID NO: 388067 - DNA, 713 bp, Homo sapiens
ccaggaaactactcgctgtggctgttgataagcggttgagacacaggactgcaggatgaatgcgctgggagtgggatgagagggcaggcagagaggaacctacaggggctaagcccagctcagtatggccacagctaggagaggaaggctgactctcaatccctaaggataagataccacaaagtgagcagcaatcaaactggagctacaaactgaaggctcagacctgggatgcctcccttggggagagatttttttttccctggcccattctttttctcttctgagtcagcaaagaactccttcttcctcttctacggcatggatttgactctgggaggcggctgcccagccgaggaccacgttacccagagccccttgcatccagatacggccactgagttgttcttgctgatggactgtaagtggaaggcacctgtgtctcttctggcccgaggtgattaagaagcaggtttgctttctccgtcttctctcttctcctttctgctggcttgaagtcaacatccagggtgatctgggaagtcacatttggaaaacagcagagcctctattagcctgggtccctgagtgcctgtgcggagcagagatcccccaccccaccctgacacacatgcatacttaccattcagacctgaccaaccttaaagtgtcaatacgagcaagaaataaacatatactgtggctgagccatt

SEQ ID NO: 388068 - DNA, 275 bp, Homo sapiens
attttataattaccctcatgtataccagtttgagtgtcagttttccctgaagatctgagtttccatctgataacattttccttcagcctgaagaactaactttagtttggagtgcaggttgattggggatcaattctagctttctgttgtatgaaatgtctattctaccttcattgttgaaggacagttttgcaggatacagaattatagattgacaggtttttttcttctattaaagacttcactgtctgctggcctccattgtttctgttgag

SEQ ID NO: 388069 - DNA, 837 bp, Homo sapiens
ggcatgagccaccacgcccagcctaatctattaatgttatttcaggataatagaaggaacaatacagaaggttataaaggaaaactggatcagagggggtcacgaaacagtcacagaatttacctacatttacaaaaagctgtagtttgccctcagagggctgaatgaagacgcttgctgaattccaaactaaatttacctttggtttatttcttttaaacactcatcatctaagcatttctgttactccaattcaggggacacaattcccagattcagagctttctgatataacatcagagtaagcaggcccatctgtcagaaaaggagtgatctgctgaatccgcagctgatttctatgcacgttaaagcagcacagaactaggagacactgactttctgtctcctgcccccacagtgctcagtcatcgtaacaggcctaagacatccaccaagcatttcaaatgtcgtcactggtctgtctcctccaacagaatgaccagaccccactacatacggcacagagtggatggttaagaatgcctcccaacagtggactttccagctgagtgccatgaactggccctactgggagccctggcagcacaaggtccagtatccatactgagcagagaggcacggcagcacctgccctcttttgtctccagaacttcttttccccagcgtgggatcttgagccttccagaaatactgtgctgaggattcagctgggcgggggccagggttgggggtggtcacagcttttatttccatacatatacaaataatggagtgttggagcacctagaaatggagcttaagcctgaaaaccttttg

SEQ ID NO: 388070 - DNA, 303 bp, Homo sapiens
ctggccctgagtcagttaaggaagatcttttcttctcttttgtacaatcctatgatgagagctgcaaagtgaactgactaagagcttctgccttgatcattgacctcccaatcctaataatatgttcactggccaaacttcctaatcgatttgtcttttggatataacgttcctcctactgtttgcctgattgagaaatctgctacagaacatgaccggttagcattcccaccaaccccagtgctacactgactgtctttcgatggactttgctccttgctgcctctctgaggtcccagacct

SEQ ID NO: 388071 - DNA, 198 bp, Homo sapiens
aattattttctaaaagagctaattgctgacatatttgaataaactataaaacttagaaagaatgtatgttattttaccaatccttcttagtgtgaaggaatactacatttattcagtaaaaaaaagtgcattcctccatttaaaatgtaaataactattttatgttcccatccatgactactttacaaaattatatgc

SEQ ID NO: 388072 - DNA, 760 bp, Homo sapiens
gaaggcatttgtcccagtggaagaacacagttcactaccaggtaccaggtggttattaagaaagttatacaactttatctcttcagattgaagagctccttcagataaaagccttaagttcagtcaaggtggaaggaacactaaggtctgtcacttctaaatgacagacaatttaaataacttgtgaaatcattagcctcaaagccatctacctagtaatttttcataatcacatccaatgtgtattcttaggaacacacaagcagactccagtttatctttctatctacttcaatatttgatcacaacattttgagaaatatgctcatgactaattttaaaacctctaatttttctttaatggttttatatttcccaaatacacttaaaggggtggggaggagagaaaagtctattaaatacactgaaactttttaatattggttactggattccctaaggagttagtgtaaattcagttcagttgaatgaaacagatatttcttcatctcctactatcagtatggtattgtgctgggattacggggagaaataggaatgaataaagcaccttctctacgcttaaggattctagaatctataaaaaaagtaaggtgcataaccataataaaagctagaatatgatgaataagaacagaaagtcacaaaattctgtcagaatatatcaatgagattttgtctggctgtatcaaggatgacatcatagaggagagagcacttaaacactgccttgaaagat

SEQ ID NO: 388073 - DNA, 128 bp, Homo sapiens
aagaagaaaaggagagtacataagcatattcatctatgaaaaagaaaagcaagcagaaaagatgaaagagaaggaaagtcctaacagtgcaccctcctggagctcctccaggagctgcttccttgatg

SEQ ID NO: 388074 - DNA, 262 bp, Homo sapiens
tttttttgtagagatgaggctctcactatcttgcccaggctggtcttaaactcctggcctcaagcaatcttcccaccatggcctccaaaagtgttggaattataggcatgagccactctgcccagccatagtactattattgtatcactatatcaataaatcagatttgatctctgcatgtaactcatcacatctaaaactgggcatagggaggccgtaaataaatggttaaggtaactaatggcttcaggtaatctgatta

SEQ ID NO: 388075 - DNA, 476 bp, Homo sapiens
ctccccacagccccatttaaaaaaaactgtaagttatatttctctctcctttctgcttgccttctagaagcaacccatctttggtctcacttttttccatttctgcattttatagatggttcttacatgtatgatttcctaaatcattatactatttaattttacttgcttttgaactggataaaagttgctaaggatgtattcttctgtacctgttactgaggtgtcatgtgcctgtaatcctaactactcaggaggattgcttgagcccaggagttcgaggacagcctgggcaacatagtgaagaccccacctctaaaataaacaaaagcaaatgtcacctgtccacacctaacatggggaaaagaactttctagaactgaagctatcgaatttggatttaatcccatagtgaagcctcaaaggggtaaagaaaccaatgactaataaaatctggactttgcaggattacgggt

SEQ ID NO: 388076 - DNA, 403 bp, Homo sapiens
ctatgtagagttgtcaattatagttctgtatttgtcaggacagaccactaaacaaagaacctctggatattagatagttcaagcaaaagtttaattttcactcacactgtatgcctgtgtgctttgtctcagagctcttcatgttactatcactctgaaatccaaactaagacttcagcctcttttgggagcattgccaatgaaaaggcagaggaacaaagtgtggtaaatcattcactttctcttaaagccttcacatagaagagacacacatgtcctggtagaaagctagacatatagatcaatgatacagaattgaaagcccagaattacacctttttatttatgggcaactgaattttgaaaaggttccaagactgttcaatgagggaaagaatagtct

SEQ ID NO: 388077 - DNA, 501 bp, Homo sapiens
cctcctcatcagccctgtgtattttgggtattaagacatatttctgggtcaaaccaaatgggtgaaaggctcttgcctgggccctgcccacaagaggccttgtgacacatctctgcatccactgctttggaggtgtgactctcctcttccatctgcaccatgaccacacagaaaattgtgacatacctctgggttcagcaaccaggtgtgtacccaggtcttacctgcagagaaaactgtgacatataacttggcccagtatccaagtaatgtgactttgttgtctgtgccttgctttcaggagagaattgtaacataaccctggtcaggcaaccaggtgatatgactctctgtctgatccctaccctggaaaaattgtgacatatttctgacccagcacccaggtgatgttactctcctgttttctttctactcacagtttgggttgtgacatataccttagccaagctcacagttgtggtgatgacactaataccacaa

SEQ ID NO: 388078 - DNA, 431 bp, Homo sapiens
ctgcacatgctacctacatcagcccagccatgacagagccacaccaggaccgtgggctctattcgaaggagggatgggtgagagggggcatcccacccaagacctctgattccgggccaatctagcttaatgccggcattgggagttttgccccagtcggcacctgctggatgtgtggaccctggattgaaaggaggcgcttcggctgctggatgtgtggaccctggattgaaaggaggcgcttcggctgctagatgcctggaccctggattgaaaggagggcgcttcggctgctggatgtgtggaccctggattgaaaggaggcgcttcggctgctggatgcctggaccctagagtgaaaggaggcgcttcggctgctggatgtgtggaccctggattgaaaggaggcgcttcggctgctggatgtgtgg

SEQ ID NO: 388079 - DNA, 410 bp, Homo sapiens
gccctggagagagaagtcaggcaagtctgagaagcatctccttcatccttgtagaagaaatcaaatcacatacacacacacacacacacacagagtttccttttctggagtcacttgatcctgccacctggagttgtttggaaccccgtctaggcctttcagcaccctttgggtggtggaggctggcctcctcctagcttgtcaatcacatcttcagtggaatgcacacagcgccctgaggatattgggcttagaatcccagccactcgatgtagaagcaacaacatcttactcattttccttcctgcagggcagagggctgaccatggaagggccacattctgaagaaagcaatgtttgaaaacaacaattgtagaacccttttagattaggaatttctttcttctgat

SEQ ID NO: 388080 - DNA, 230 bp, Homo sapiens
ctcaagcccatgtcgaaaatcctattatctatagcactttacaaacagattgtctgaagtggctttttaatacttgaattttctctcctttttaaaaaagttttattttggccaggtgtggtggctcatgcctgtaatcccaacactttgggaggccaaggcaggtgagaggtcaggagtttgagactagcctggccaacatggtgaaaccccttctgtactaaaaatac

SEQ ID NO: 388081 - DNA, 415 bp, Homo sapiens
ccctccctcccttcctctttctttctttcctttcttttctttcctttctcttgcacatctgcatgagtgctcacccttttctcatatttttcagataatcatgtaagttcctgaacagttctagcttgctaacagttgtggcctctgagtacatacataggatttcacaaatcttcctaggtgagcaggggctctggagttgccaggtggggagatgaaatggtaacctatgacatgtatctaaatgccccagtccctggtgaacaattgtaggattcacccgtctttcttctttgttccttggtgccctttctccttggaaattggaagcatgggcaagttgttctagtcccaactctgccttcaggcttggtgttctcaggcaagtctgaatgtggctgggcctcagttgcct

SEQ ID NO: 388082 - DNA, 416 bp, Homo sapiens
ggtaggggggaggactgttctagattttaaaagctatagaagacacagcaaccaaatacactgcatggaccaggcatggatcctaattggaacaaaccaactgtaaaaggatgtatttgaaatgattggaggaatttgaacagtgactgcacagtagatgatatgaagaaattattgttattttttaggtgtgatcatgattttatggtgatgtttaagtaaaagaggccttatttgttagagatacatgtacgggtatagagaaatatttacggatgaaatgatacgatgtctgagatttgctttgaaaactctagcaggtgtgggagaagcaggtgcatgggtgggggaagggatagatgaaataagtatgcaaaatgttagtctacttttgtccctcctgacccagcaggtta

SEQ ID NO: 388083 - DNA, 965 bp, Homo sapiens
cccacactttctacgcccttcgcgcccatcgatacaaacaaacaaaaaagcctggcaccctgtctcagcactcttccaactttgtccccaggcagtgagtgcttcatggccagagagagataggactgaaccctcgtaccttcaaacatatctaaatctctggtgcagttcagagtggttgatcatactgtaaaactcaaatgtgaagggaaggctggaacctactggaaactgaagatctaacgaaaagaaggaacttttaggaactagcagagacttcaaaatgttgagaactctcttttttcataagagaagataaaaactctgatggtcacactcataaagacaaaaaacaaataaaaaacaaacaaaaactcagaatcacaagagcaaagaaaatgtaggtaaaacaataacagaagaggtaaagaaatttatgtgaattgggacactctggggcacagaacagaagaggagaagaaacatgaaagtaatgctctgcacaaggatgtctgagtgtccttgattccaagggcatttaaaattagccactggatgagaaccatgaaatgccatgactcttacagctcccatgaaagacattggatggaacttatcctaactggaccaaattctaaaaaattttacatgatattataatgagttgaaagttgaaaaaaaaaagctcttctagattaccaagaataaaacacaaatttctagctgactgaattaattctcatctctctatagaaagatcatagaaattttttttatcatgcaaagaaatagctaaaaatttacaaaaatatagacgtgcattaggcagctcatgaataaatgcgttttttccttttttcctccagaattttgtgatgtttatggtacttttcggcttttaaaattttgtatttaatcaggatttattacttcattgtaagtaaatattaaatttgtactccatc

SEQ ID NO: 388084 - DNA, 963 bp, Homo sapiens
  misc_feature (19)..(21): n is a, c, g, or t
  misc_feature (25)..(25): n is a, c, g, or t
aacactggagcggagatgnnngttnatttagggaaggaaggaaaagggctaggcaccctgtctcagcactcttccaactttgtccccaggcagtgagtgcttcatggccagagagagataggactgaaccctcgtaccttcaaacatatctaaatctctggtgcagttcagagtggttgatcatactgtaaaactcaaatgtgaagggaaggctggaacctactggaaactgaagatctaacgaaaagaaggaacttttaggaactagcagagacttcaaaatgttgagaactctcttttttcataagagaagataaaaactctgatggtcacactcataaagacaaaaaacaaataaaaaacaaacaaaaactcagaatcacaagagcaaagaaaatgtaggtaaaacaataacagaagaggtaaagaaatttatgtgaattgggacactctggggcacagaacagaagaggagaagaaacatgaaagtaatgctctgcacaaggatgtctgagtgtccttgattccaagggcatttaaaattagccactggatgagaaccatgaaatgccatgactcttacagctcccatgaaagacattggatggaacttatcctaactggaccaaattctaaaaaattttacatgatattataatgagttgaaagttgaaaaaaaaaagctcttctagattaccaagaataaaacacaaatttctagctgactgaattaattctcatctctctatagaaagatcatagaaattttttttatcatgcaaagaaatagctaaaaatttacaaaaatatagacgtgcattaggcagctcatgaataaatgcgttttttccttttttcctccagaattttgtgatgtttatggtacttttcggcttttaaaattttgtatttaatcaggatttattacttcattgtaagtaaatattaaatttgtactccatc

SEQ ID NO: 388085 - DNA, 495 bp, Homo sapiens
cacccgaccccttgcgcgttccggctccgcgcgcctgccaggccggggccggcggcggaacagcttgggacccgaaacgcctcggcttttctgcggacccgcgcccggccgctgctgccggacgcttgaaaagaggcagagtcttgctttgttgtccaggctggtcttgaacttctgagctcaagtgatcctcccgccttggcctcccaaagtgctgagactacaggcatgagccaccacacctgtccctctcccactcgtattactcagacttaaactaccccaaaaaggctaaagtcctgctaagagtctccgtagaactgatgattcaagaggctcttatgatcacagctggtgattccctgtgttgaattagtgaaaacaggccaggcacagtaatcccagcactttgagaggactgcttaatgtcaggagctcaagcccagcttgggcaacacagatgcctgtctctacataaaacaataaaaattttta

SEQ ID NO: 388086 - DNA, 1343 bp, Homo sapiens
cacccgaccccttgcgcgttccggctccgcgcgcctgccaggccggggccggcggcggaacagcttgggacccgaaacgcctcggcttttctgcggacccgcgcccggccgctgctgccggacgcttgaaaagaggcagagtcttgctttgttgtccaggctggtcttgaacttctgagctcaagtgatcctcccgccttggcctcccaaagtgctgagactacagagagagaatgctaacgagctgtgaaatgaccaaagatctggcagcagaagggaaaagaaaaaataatgggaagaagaggatttatctgactcaactggagatggctcccttcccttatttattgttgcatcctgaagcttcccccatgctgggctcagtgtgaacaaacagcgcgggagaatgcaaccactgcagaggcatatgtttgagatacctggccactggaggtcatctcgtctactatattcaccgcagataaagaatgaaaagagaatacacaaccttgtgattgctagcagtgaaagctcagagttatgacataacaagtggttgatcatactgtaaaactcaaatgtgaagggaaggctggaacctactggaaactgaagatctaacgaaaagaaggaacttttaggaactagcagagacttcaaaatgttgagaactctcttttttcataagagaagataaaaactctgatggtcacactcataaagacaaaaaacaaataaaaaacaaacaaaaactcagaatcacaagagcaaagaaaatgtaggtaaaacaataacagaagaggtaaagaaatttatgtgaattgggacactctggggcacagaacagaagaggagaagaaacatgaaagtaatgctctgcacaaggatgtctgagtgtccttgattccaagggcatttaaaattagccactggatgagaaccatgaaatgccatgactcttacagctcccatgaaagacattggatggaacttatcctaactggaccaaattctaaaaaattttacatgatattataatgagttgaaagttgaaaaaaaaaagctcttctagattaccaagaataaaacacaaatttctagctgactgaattaattctcatctctctatagaaagatcatagaaattttttttatcatgcaaagaaatagctaaaaatttacaaaaatatagacgtgcattaggcagctcatgaataaatgcgttttttccttttttcctccagaattttgtgatgtttatggtacttttcggcttttaaaattttgtatttaatcaggatttattacttcattgtaagtaaatattaaatttgtactccatc

SEQ ID NO: 388087 - DNA, 1167 bp, Homo sapiens
atggtatttatagataggccatattaaaaaacaacacaccccttaggagaaaacgaagaagaggatttatctgactcaactggagatggctcccttcccttatttattgttgcatcctgaagcttcccccatgctgggctcagtgtgaacaaacagcgcgggagaatgcaaccactgcagaggcatatgtttgagatacctggccactggaggtcatctcgtctactatattcaccgcagataaagaatgaaaagagaatacacaaccttgtgattgctagcagtgaaagctcagagttatgacataacagaattggctcatgtgactatggaggctgagatgtcccaagagctggatacccaggagaagcaaagagtggttgatcatactgtaaaactcaaatgtgaagggaaggctggaacctactggaaactgaagatctaacgaaaagaaggaacttttaggaactagcagagacttcaaaatgttgagaactctcttttttcataagagaagataaaaactctgatggtcacactcataaagacaaaaaacaaataaaaaacaaacaaaaactcagaatcacaagagcaaagaaaatgtaggtaaaacaataacagaagaggtaaagaaatttatgtgaattgggacactctggggcacagaacagaagaggagaagaaacatgaaagtaatgctctgcacaaggatgtctgagtgtccttgattccaagggcatttaaaattagccactggatgagaaccatgaaatgccatgactcttacagctcccatgaaagacattggatggaacttatcctaactggaccaaattctaaaaaattttacatgatattataatgagttgaaagttgaaaaaaaaaagctcttctagattaccaagaataaaacacaaatttctagctgactgaattaattctcatctctctatagaaagatcatagaaattttttttatcatgcaaagaaatagctaaaaatttacaaaaatatagacgtgcattaggcagctcatgaataaatgcgttttttccttttttcctccagaattttgtgatgtttatggtacttttcggcttttaaaattttgtatttaatcaggatttattacttcattgtaagtaaatattaaatttgtactccatc

SEQ ID NO: 388088 - DNA, 1221 bp, Homo sapiens
atggtatttatagataggccatattaaaaaacaacacaccccttaggagaaaacgaagaagaggatttatctgactcaactggagatggctcccttcccttatttattgttgcatcctgaagcttcccccatgctgggctcagtgtgaacaaacagcgcgggagaatgcaaccactgcagaggcatatgtttgagatacctggccactggaggtcatctcgtctactatattcaccgcagataaagaatgaaaagagaatacacaaccttgtgattgctagcagtgaaagctcagagttatgacataacagcaccctgtctcagcactcttccaactttgtccccaggcagtgagtgcttcatggccagagagagataggactgaaccctcgtaccttcaaacatatctaaatctctggtgcagttcagagtggttgatcatactgtaaaactcaaatgtgaagggaaggctggaacctactggaaactgaagatctaacgaaaagaaggaacttttaggaactagcagagacttcaaaatgttgagaactctcttttttcataagagaagataaaaactctgatggtcacactcataaagacaaaaaacaaataaaaaacaaacaaaaactcagaatcacaagagcaaagaaaatgtaggtaaaacaataacagaagaggtaaagaaatttatgtgaattgggacactctggggcacagaacagaagaggagaagaaacatgaaagtaatgctctgcacaaggatgtctgagtgtccttgattccaagggcatttaaaattagccactggatgagaaccatgaaatgccatgactcttacagctcccatgaaagacattggatggaacttatcctaactggaccaaattctaaaaaattttacatgatattataatgagttgaaagttgaaaaaaaaaagctcttctagattaccaagaataaaacacaaatttctagctgactgaattaattctcatctctctatagaaagatcatagaaattttttttatcatgcaaagaaatagctaaaaatttacaaaaatatagacgtgcattaggcagctcatgaataaatgcgttttttccttttttcctccagaattttgtgatgtttatggtacttttcggcttttaaaattttgtatttaatcaggatttattacttcattgtaagtaaatattaaatttgtactccatc

SEQ ID NO: 388089 - DNA, 1015 bp, Homo sapiens
cacccgaccccttgcgcgttccggctccgcgcgcctgccaggccggggccggcggcggaacagcttgggacccgaaacgcctcggcttttctgcggacccgcgcccggccgctgctgccggacgcttgaaaagaggcagagtcttgctttgttgtccaggctggtcttgaacttctgagctcaagtgatcctcccgccttggcctcccaaagtgctgagactacagagagagaatgctaacgagctgtgaaatgaccaaagatctggcagcagaagggaaaagaaaaaataatggaatattttctgtctacaattggttgaatctgtggatgtggaaactgcagatacagatggagagccgactatactagctttttgtttcatttttcacttctggtgtgtgtgtgtgtgtgtgtgtgtgtgtgtgtgtgtgtgtgtgtatcgtgtgtgtgtgttttattaatctcgtgtgcgtgtgtgtgagtcttctctcctctttatgtgggattttcactaacattctttatcagcttcttcaggttggatacttgttgccatatatatttttttcatcattctaagaattaatataatagtgggcccgaggcgtggtggtctcatgcctgtaatcccagcactttgggaggccaagatgggtggatcacaaggtcaggtgtttgagaccagcttggccaaagctggtgaaactccatctctactaaaaatacaaaaattagctgggcatggtggtgcgcgctctataatcccagctactcaggaagctgaggcaggagaatcacttgcacccaagaagtggaggttgcagtgagccaagattgcgccattgcaaccccagcctgggcaacacagcgagactccatctgaaaaaaaaaaaaaagaataaatgaatgtattaatcaccaaactgctcttcatcagaaactcttagcagtggtatgttgaggtctccctgcctaccgtatatgtctctgtgcaggaacatcctgtgccgaaa

SEQ ID NO: 388090 - DNA, 656 bp, Homo sapiens
cacccgaccccttgcgcgttccggctccgcgcgcctgccaggccggggccggcggcggaacagcttgggacccgaaacgcctcggcttttctgcggacccgcgcccggccgctgctgccggacgcttgaaaagaggcagagtcttgctttgttgtccaggctggtcttgaacttctgagctcaagtgatcctcccgccttggcctcccaaagtgctgagactacagagagagaatgctaacgagctgtgaaatgaccaaagatctggcagcagaagggaaaagaaaaaataatgggtttgtatattatacattctggataatcagctcttgaatgattaagtgtggaatacgtcttacggggaaaagcagatttttaatactcattttgtcccggcgcggtgggtcacgcctctaatcccagcactttatgggaggccgagacaggcggatcacgaggtcaggagatcgagaccatcctggctaacacggtgaaaccctgtctctactaaaactacaaaaaaattagccgggcttggtggcgggcgcctatagtcccagctactcaggaggctgaggcaggagaatggcgtgaacccaggaagtggagtttgcagtgagccaagatcgcaccactgcaccccagtctgagcgactg

SEQ ID NO: 388091 - DNA, 261 bp, Homo sapiens
gcgattctcctgccttagcctcctgagtagctgggatttcaggtgtgcgccaccatgtccggctaattttgtattattagaagagatggggttttaccatgttgttcaggctggtcttgaactcctggcctcaagtgatcaacccgccttggcctcccgaaatgctgagattacaagcatgagccaccatgcccttgccttatccatccttctaaatgccagatcctccaagtcttcccaaaatacccagccagaaacaga

SEQ ID NO: 388092 - DNA, 252 bp, Homo sapiens
tggagtcagtgcagagatgttcagacttttttaaaaaatcaacatcttagtaagattttgaaattttaactaatttgggcctttgcctttagaccttattatccttaaaattttcactaaaataagtttatccacaattccaacaaagctaaagactgattatcctaatttccctttgtttgccaagtaagggatgaattaagttcctctgtttacccatttacttggtccatatttccctaactgcggagt

SEQ ID NO: 388093 - DNA, 785 bp, Homo sapiens
tcccgggttcaagtgattctcctgcctcagcctcccgagtagctgggactacaggcatgcaccacaactgccagctaatttttgtatttttagtagagacagggcttcaccatgttggccaggctggtctggaactcctgacctcaggtgatccacccaccttagccttccaaagtgttgggattacaggcatgagccactgtgcctggctggaatattttatttttttaatttactagtctcactggataactgagtcttgacttatggaatggcataaactcttgatgcaggcatgaagaataaaattagtttttgtaaactagagaatttgaaactgcttagagaatagaggtaaaaaggaatttccttctttgggtaagagtggatccaaaccatatattctctggctattagcgtctccagaggtgtgtggtcattttttgttatggtgattcccaaagatttgcagtgttggcaagtacccaaaatttatctcagctggtcataaaccttagtgccttttgatggttttgttttatagagttacttattaaagttctatgtaaatcattactgttatccttttaagtttctgtatttaactattaccattttttattttatagtcattacatattggatattatgtagaatgtagttatgtatagagtgttttatctaattatttgttgctgcccttttctgagagttatttaatacagtttgagatggaatttagcatttttgggccttccctcactgtttgtaaataattgattttg

SEQ ID NO: 388094 - DNA, 834 bp, Homo sapiens
gatctttactgggaccaaagtaacctttgattgtctctgactgtggctgtttttccgggagctttatgtgctgggctcaggaaaagttcaacccatcaataggttatcacatatatatactctgggactgattggaccacattttctcactgaattgactgattgatgaattcagttggcagaattaactcttctatgtctacatgaagtgccatttagaaataatcaactcttaatcagcctgggatagtcagtactaaaagcaccttcatgagctgtgaaaaatttaatgcatttatttacatatttagttttaaattttagtatattgttagttgaggtatagtttccaaacaaagagccgtgaaatgtttagtaactgtctctgtacctctggatgaggacagctcagccgggaatggagggggactgggtgaggagaccagaatgtcagtgtggccacgcagcacacttttgttttgtcttctgtccttgagcactggcttgttcctggataaactaggcataataatacctatcctgctgtgtgggtggaaggttaaatgtgataatgatgtgtgtgagatgcctgcacagtgcctggaggtattgaagaattatttgctgccttttctttttctacctaccacttacccgctacccccgggtgctacatgttagaaaacactgtgtaaagtgtggatgcttctgaaaaatctccctgccagcagttagtgccaatagcgtgcagaaaataagatgcaatgatttggcttcttttctgtttggcaataagaagcttatttgcacatagcctgatttctttcaatctgc

SEQ ID NO: 388095 - DNA, 348 bp, Homo sapiens
ttccagtgcacagccacaagcatggcgtcctcttccttgtcctaaaagggcttcccttagatggctttctctcagcacaccatctctgctcttgtcccccgtatcacacacttctcactgggtcctttcaccttcctcttctccagccctggccatcggctgctactgaaggccattctcagtggcccaggagccaaccccctagctgcctcctcagagtttctgggcttcccacccaccctttgcctcccctccatgggttctcctggtgacttcctgccaggcttccattttctctccatccccgtgctttttacctgctcctctgctggccgggcctcctctccc

SEQ ID NO: 388096 - DNA, 445 bp, Homo sapiens
ctgaaatatgttggtagagcgtcttacttattcataattgccctgcttggactgggcaaaaaacttggagagcacagcagtttcgatggtagtaaaatggagacaagttacgaaatccaggtttgagtccagacggaattgctcttgtctccaagcctttgttcatgcttttccttctggctggaccccaacctcattcgcactccatgtcttgcgcttctcccatcccccatgtcccccatcccccatgtcccccatccttcatgtcccccatccccatccacataacacctctttctactccaggttaattctttctaataatgatagtagcggtttattcttttaatttttcgaggaatcccttgctaacccaaaactggaacaggtcgtgtacttttagcatgcgtgtacttattacacaaacaattgtctttttaatagt

SEQ ID NO: 388097 - DNA, 402 bp, Homo sapiens
gtagctgggactacaagttcgtattatgcccagctaatattttaaaattttttgtagagatggggtcttgctgtgttgcccaggctggtctcgaactcctgggatcaggtaatactcctgcctcagcctcccaaagtgctgggattacagatgtgtgccactgcgcctagctaatccatactctagatactatcaaagcacctactgtgtgtcaggctgtgggtgccaggttctgaagtagtgatcacaaaagacctgtcctcatggactgcacattctggggagatcttgctgtcccatccctcccttgcccacatgagaccttgctaaatggccacagcattctttcctgtctaccttaccatcattctcaacacagtactccaggaagcctgcgcagtc

SEQ ID NO: 388098 - DNA, 378 bp, Homo sapiens
ttacgggtagggaaaggagacctggctaggaaaggtggtcttgttagaagctttctgagagaatggatgttaaatgtttaagacctttaaaggtgtcagacaggctctcatttaaccttttctagattccagacaagggaagtcctggctgcattaatggagattctccatagacgcagatttctttcaaaaaagacagctttgcagcaccacttctgtttgctggccctctgatagccatctcaaaatatgtcaaataaatataatttgaggtaaaacatttttatttccttcaaccactacctttccttcttccccagccagtccttaagcagtcatttaaaaaattagaaactttcacctaactgaattcttaat

SEQ ID NO: 388099 - DNA, 760 bp, Homo sapiens
cgccggttggggggaagtaattccggttgttgcaccatggcgtccatggggaccctcgccttcgatgaatatgggcgccctttcctcatcatcaaggatcaggaccgcaagtcccgtcttatgggacttgaggccctcaagtctcatataatggcagcaaaggctgtagcaaatacaatgagaacatcacttggaccaaatgggcttgactacagatgatggtggataaggatggggatgtgactgtaactaatgatggggccaccatcttaagcatgatggatgtggatcatcagattgccaagctgatggtggaactgtccaagtctcaggatgatgaacattggagatggaaccacaggagtggttgtcctggctggtgccttgtgagaaacgaagcggagcaatggctagaccgaggcagtgcacccaatcagaatagcgactggctatgaggcaggctgctcgcgtgactactgaacacctggacaagatcagcgatagacgtcccttgttgacataaaggacacgaaacccctgcagttccgacacagcaaaaaccaagctgggctccaaaagtggacacacagaggatcaccgaccagcatggcatgaagaatggccgggaagtgccgagcagcacatggagacacgagactggaggcgcagagacgaagactgaagagacataaacaaagatagaagggaaagaggggaggcacgccatggagaaactaaacggcataagggcgcgaagagg

SEQ ID NO: 388100 - DNA, 437 bp, Homo sapiens
gaggtgggaaacagcagttgcaggaaccataagtggctccgtggagctgacgtggtggaggacagacatcacctgggcttgggcttgatgggtcaaggggtcttaggtgctaagctcaggagggatggcaacccagaaaccttgaaggtggataaggaaggggagatggggtcttaggaatatgtgtctggtggcgcgtgtggaaaatgacggtgctaaggctgggaggacttagaggccagtggggaggcccaggtgctgatgccactgtggacattcctgagcctctcagctacctgaggccgcacttccacccaaaaagagtccttggctgggccgggtgtggtggctcacacctgtaattccagcactttgggaggccaaggcaggtggattgcttgaggccaggagctcgaaaccagcctggccaacatggt

SEQ ID NO: 388101 - DNA, 332 bp, Homo sapiens
agtttcaaaagggtttgtgtttaaatactggtaagaggtcaacaaggatttcctgatcccacttatgttgaaaaatcagcttgtgttttagaagaggtaagaatctcttctaaatgtgttaatcaatcccctccaatacagtgtgataggaatattcaatcctattctctttatgattttgcacagacttccttttcaaatgtatcagcccagggatttgtatcattacaaatttgtgaatatggatgcagatttgttggaaactatgtggaaaatatgagaagtctaagagatatccaagttatttgctaattataacaaaactgtagcaa

SEQ ID NO: 388102 - DNA, 634 bp, Homo sapiens
taattgtcttatatatctaagtgaaatcgtaacatccatcatttctttactggtttatttcagttggcataatattctcaaagtgtatcttcaaatgtgacgatttttttcaaggctgaataatattccattgtatcaaatatgtcttcaggttcctatgttatgtattttagatatagattcataaatggaatcactttatttaataatttatattatttgaagtacatttataacattataaaataattggtacatctttattttccaccgacaatcaacccaactaacttttgtatttttagtagagacgggatttcaccatgttggtcaggctgggtctcaaactcctgacgtcaggattcacccacctctggccttcccaaagtgctgggattacaggcttgagccaccacgcccggccaagggttttatttttattgcatcatcaacagatttggtgttttcaaaaaattgatagtggccatttaaatgagtgtgaggggattttgttttttattatgacttttatgcatttctctacaaattagttttgagtgtcctttcaaatttttgaagaaaatttatttcaatttgtctatttctaaataaagttattcaatttgattgttca

SEQ ID NO: 388103 - DNA, 311 bp, Homo sapiens
ttgatttctaccattcctactactggtttgcatagaaagagagaagccagaagtctggtaagaattcctaccagtctaccagcatgcctggctgctggcttctgggttccctttccctgagcagccctagcgaccctgcttgccacaccctggggaccaagccacaacaccaaggaaaaatcatcttttttccatttcatggaaactttgaactagacaaaagtcattttctgttagaaagttaaggtttgtactgcatgttgccatgtgtgtcctgagaagggggagtagataaagaagttgtctacata

SEQ ID NO: 388104 - DNA, 375 bp, Homo sapiens
cacccccaactcttcaccaagtaggggccctggcttgcaattgcagaagagctttcccatccctgggtgagcatacctactggtagtggctccgtgattccctggggaggggctcccagaggtaaccaaccaaccctgtgctactgctatggccacagttctgcttctgctgccctcaaactggggaagaaacaaagagcctgagggctttactcacgcttctagcactacacagtcaccatataaagaggagcccagtctctcttccttgtgaacccttgacccccaactcttcaccaagtggggcccccagcttgggccagcagcacagtggccccacccctagctgaacattccagtagcagctgctccgcg

SEQ ID NO: 388105 - DNA, 539 bp, Homo sapiens
ctacccaccggactgatttttttccgcctcaatgaattcactaaattggcatattatgttggtgtcatgtggatataggttagctaacttaggtaaatttcaggcaatactttcctcttccaaaaatgacccacaacagagatgtggtgtgttttaacgctgctcttaattgttcaaacactcgttcatttgacaatcttttaacaatacctgaacacctcagtaaaactaaacagtcacaggggaaaaagctcaacttttaaactaagggagaaagatgtagtatctgtcatagaccagcagtaaatacatgtaacagatgtgaccagacctgatctaacaagttctttagaatgtatcattttagtggcccaactttaaaacgactttttaaaaagatgtcaaagctaggatgtttatcttttcctcacaagagtcaaaagtaaccaaataaactgtccttctgctatatcagaaaattaagtccatactcatcaataaattatagactctttagatgattttctttttttggtaac

SEQ ID NO: 388106 - DNA, 270 bp, Homo sapiens
ggagcagggctgggagtcagtgggagattgggagtccaagtctggacatgttacatatgctatgtctattacagatctgagtataaatgtgaagtggagttttaccacgtgattctgaagttcagagaagaggtacaggttagagataaagatttgggagtcacaaatataaagatgtatgacttgatgagattaccaaggaagtggagattaatagcaaaaagaaaagtttcaagcttcaagccccgaagcattctaatgtttacagct

SEQ ID NO: 388107 - DNA, 383 bp, Homo sapiens
tatttttagtagagacggggtttcaccatgttggccaggctggtctcaaactcctgaccttgtgattcgcccgccttggcctcccgaagtgctgggattacaggagtgagccactgcgcccagccctcatctagtatcttttccaacaattctactccattcatttttcagaatgaagctgcatatatgttagaccatttgatcctatgccatagaactctgatgaaaggtttttttaattaacgattttcttttcctgtgtgctttatttttgataatttttattgtcttctctttgggttgctcatctttttttttttcctgttttgtccaagtaaccattaagcccatccagtgaattaatcattccccagataactgta

SEQ ID NO: 388108 - DNA, 494 bp, Homo sapiens
actgcctagttgcaggaaaacaagctcaggactccaacttattctatgttatgttgattaggtttctcctcgtagtgagagacatgggcaccagtaactaccagagacacaaaacctcacagctgaacctcaggtcttgcctgtagtaccttatgcagctatgtgagacggaatgatcctagatgacctcaattacatgtctggaccttcgctggagtgtctggacattctttgtctgtgcagtgtctctctccatgtgatttatcatcttcaaggaggctaaactgtgcttatttgcagaataagagtgttgggattctaaaagggcatattctattggttaaagaatgccatccaagattcaaaaggaaagggaatagatttattggatagcatggtgactatagttaatgacaacatattgtaattttgaaaaatgttgagtatacctattaagtgttctcaccacaaaatgataatgatgtgaagggatg

SEQ ID NO: 388109 - DNA, 669 bp, Homo sapiens
ccccgcaggctgccctggtgccagggcccccaggcaggagctaattcccgccagccaggaagtatccatcaccctcaactgccctgccccacagcacaaatagcttgggaggaaaggacagccctgattgtggggcaagttatctcattagtcctatgaactatctgcaggctccacactgcaggctgacgacactgtttttataaatctgtattgcatggagcagcaactggtaacctgtattgattgcaatttctctttttgaattgggaggtccctgggggccagttgaggtacttcgaggccctggcatcctgaagctaccccaggaaacagacttgagctgtgacagactaagtagctcttctcttccaagagagacaacgatttttttctgaccctgtggccaaagcctggtctcaatgcaaagcctcaccctattcgcttcctcctccctctgactccatatcccccattgcctactgggaccttccttgcagaggaaatgggggaggcaaagcaggaaaccccttcctcagcttctggttttcctgcttcaggaaggcatctgactccaatagtggaaaagcagctcccaaccccatgtgaatacctatgcactacatacgcatcatagacctgcctcccatttagtattaagatctttaa

SEQ ID NO: 388110 - DNA, 1113 bp, Homo sapiens
  misc_feature (568)..(568): n is a, c, g, or t
  misc_feature (594)..(594): n is a, c, g, or t
  misc_feature (602)..(602): n is a, c, g, or t
aaaaactcctttttgcaatagaagagacagagggatttggacaagaatgaatgtggcttcttattttggaggagctcttgcatttaaataccccagccaagaaagattgcacagatagtgtatataagctgttcattctgtacagtgaattttccgaacctctcaaagtatgttttccgttcttccacagaaatatgcaaaacagttcatccttttctactttatttattgttcccttgaaatgactgaccaggaaaaagatcatccttaaattttgaagcaagtgagagactttattaaaaatacatatatatctatataaacatagatgatagtggctctagttttatagagctccaagtgtattaaacatgacagccattcattcataaagatctggatttgctttaccttgttaatattatctaggggaaaaagtgcaaattgctccatgttctactctcccttatgtaacatctcctgagggtgtttagttgcatggctgttcagaaaggtattaagggcttaggccaaatcttactttgagtatgttaaaaaaaaaaaaaangctgctggcttttctgaagacaggtncttgaacntgtcagtttgttttaaataaatacaatagttgaaaatttttctctgttacatcagtaatattgttaaagtaatggatagaaccataacttacacatgaaagtcatatactagatccaatactatttagtttattatcgaaattggaaggattcattgagcagcatagaagtttgtttacatgttactttgagatgctaggtatttgtggaattaaaaagaatcaggctcttttgtactttgtttttaaatctgtgatgcttttcaaatttaattcataataaattgatgcaatttcatacttaggaacatacaaaaggtaatgtaaactctgccacttttttgtgttcaaaattttggtttttatgaagccagatggattgaagagttacataagcatttgaatgctctaatataaggctaatgattttctgttagtgtttgaatatcttcattcctctcaaattcataacagttctatttaactgaattaaataaccatatgaaaaatcg

SEQ ID NO: 388111 - DNA, 1092 bp, Homo sapiens
  misc_feature (627)..(627): n is a, c, g, or t
  misc_feature (633)..(633): n is a, c, g, or t
gtagaacttaaagtataatttaaaaaaaaaaaagtgcttcctgggaaagcaactgaaacttatttttaaaatttatgtcaggacattattctgtttttcctgtgaatgccttagtttttcttcagccactttgtagcctccctatacctcttaaaattcataaattctatattcaagttgctcttaatttctccctaatactattttctttcttctgttactaataaagtagcggttttcccataatagtagaaccatagggttagtttgcacccaaggaatggcaaacgttcttgatatttgattattagcattttcaaaaacaaccagttgaacacccagcagctatagtttttattggtgcccctaagcttcacgaccaatctgacccagcaggattcaagcataaaattgccttaagtcttcctacaattggaggacaaagaagagggagtaactaccctattgacaagtcacaggtcatttcttgtttactgggtggcatcgctaaggtctttttagttaaagcatctaaagtaatacacattcattactgtgaaactgccgattttttttcctttggtcctgcttcattaaaagtgttgtttttgttgttgttgtttttgngatgangtcttgctctgttgcccaggctggagtgcagtggtgcgatcttggctcactgcaacctccccctcccaggttcaagcaattctcctgtctcagcctcccgagtagctgggattacaggcacgtgccaccatgcctggctaatttttgtatttttagtaaaggcagggtttcaccatgttggccaggctggatcctgacctcaggtgatctgcccacctctgcctcccaaagtgctgggattataggcgtaagccaccgcacccagccaaaaagtgttttaataagtggttttatacttcctggtgttgagtctgtaaattttaaacatttcctcccagtgtggttaatattttcatgtcacgtgactggattcacagcttgtagtttcaaatgtttctgtctttaaaaactctcttatattttacttttaaaactatttttatctaccagtgggtcagt

SEQ ID NO: 388112 - DNA, 323 bp, Homo sapiens
gcagggtgttgggaaccatggcggcaggtgcaggaactcagggctgaccacagcggagctgggtgggttgaacagtgtctccccattcacatatacccaggaacctcagaatgtggtcttatttgggaatagcgtctttgaagatgtaaataagaattgggatgagataattattggattaggatggaccctaaatcaataacagtgtctttgtgagagacaaagaaaggacacagagacatggagaaggtggtcacgtaaagatggaggcagagattggagtgacacatctgcaagcaaagaaatgccaaggattgtcacaa

SEQ ID NO: 388113 - DNA, 339 bp, Homo sapiens
aaaaaaagatcaaaggacaatttatagtaaaacacacccttgctcctgtattttgcttcacactgtgttcccttttctcatgtccttggttttcccaggcgggcttccacagggcttggctcattcactctggctagagaatttcctaacattttgtttattaatactactagtagttccattactatgaatagctgcaatttacagagcctctaactggtatcctccttgagtgcaggtcctgtgtggcccctagaccccagctcaggtccagcccatggatgctttcaatatgtgtttttagcataaatgaagagatctatttagtgccaggcattg

SEQ ID NO: 388114 - DNA, 133 bp, Homo sapiens
ggggcttggttgggtaagagtttccagatctaaatggagacaggactgggatataggagcttgtacggataaacaacacaaacaccttgggtaagtgatacaccaagagagatcaaaatagggtaggaacacg

SEQ ID NO: 388115 - DNA, 250 bp, Homo sapiens
cattctacccatctttgcattgaagccaagcacacatatgaccagtgtttctgcaaagtgtacactaaaatcataagcagctcttaaaacaacaaaaatatgttgggctggcaatgttaaatttacaaacttccccagataattccaatgtataaccatgaactaagtactcagactagaaacaagtgttcagagaaaatagcccatagattcttgtcttggcatccttgccaatacatcagcagccctg

SEQ ID NO: 388116 - DNA, 320 bp, Homo sapiens
  misc_feature (265)..(265): n is a, c, g, or t
ttcatattcagaagctaaaataatctttgaaacaagttctttaaaactgatagctttcaccatggcctatctgtaaaagttataatacaagttctcattccttggtacttatttttaataatgactattaaaagtctacatgattgtgttggtattttcagggtctttttggtgataggactttagggaagactgggttgacccaggtataacttttctaaaaatgttgacattgtaaaaataggaggccgaggcaggtggatcncgaggtcaggagatcaagaccattctggctaacacggtgaaaccccgtctctact

SEQ ID NO: 388117 - DNA, 135 bp, Homo sapiens
ggacctctattcatttgttttatttgcttaattttattacatgaaactttttgtacaacacatttgagaaccctgggtttagaacaacttagaccctaagttttcggtctcagtttccttttcctttgatagatc

SEQ ID NO: 388118 - DNA, 252 bp, Homo sapiens
gatgcagaagatgaggccatgtcctcaaaaaggggagagacagatgcatattgattacagtggagtcagaggagttttagtgcaggcgtgcacagtaaccacaatggggccagcctggtgaggacagtcatggaatccctgtgaatgaactcttagaagggtcatggaggaggtgagctggggtgtagatgaaggaggtgagctggggtgtagatgaaggagtgtgagctggggtgtagatgaaggagtgtg

SEQ ID NO: 388119 - DNA, 410 bp, Homo sapiens
aaaatcactttctgaagaaagaaagagattgggctgagtgtggcatctcagcctataatcccagcactttgggaggctgaggcaggaggatcgcttgaacccaggagtttgagaccagtctgggcaatatagcgagactccctctctacaaagatttttttttttaaattagctgggcatggtggtgcatgcctgtagtcctagctactcgggaaggctcaggggatcccttgagctcaggaggttgaggctgcagtgaactatgattgagccactgcactacagccagggtgaccgcaagaccctgtctccaaaaataaataaataaaaataaaagaaagaaaaagaaaatggctaagaggagaggcaggggaagatgcctcttttggaaatggggtgttgccatactg

SEQ ID NO: 388120 - DNA, 1452 bp, Homo sapiens
ctcctgccaccacccgtggctaatttttttgtatttttagtagagacagggtttcaccatgttagccaggatggtctcgatctcctgacctcgtgatctgcccgccccagcctcccaaagtatcagatgattttaacaactatgcttccatgacttgctgggctagatgatatgactgtaaaatgcctaacccatggtttagcatcaagtaagcaaattgtaaatggtagcactgctctgcctatgactatttagtcttgtgctttaaactcaaatatttgttggcctactgaagtcaccacacagagaaagatgcttttcattctcagtaaagaactttgggagataactggggcaggcagcaagagaacagatgtcatatgtctagcatcagcaaactcatcagaactgatgggcagctcactttgcttagaacctgcaccagcatacacacggggctgcttcccagtcacactgctcctgggaaggtaggggggctgctgttctgcaattagcgcggttctttacctcctattaccgaactgccagagttcatttgtgttcagttaggtagatgaccaattcttgttcattcctattttcttttgctcactaatgtgtttaacgttcactaacctaccaaatgtgatttattagcgactttttctttgaagatggagtggaggaatcctagcgctttctgcaacatgctactgctgttatggaacagtgcagatatggaagtgcatcagccggggatggggagaggctagggcagtacatgtgaatggagaggtagccccaccagtgtgttttctgaaatacagtcccgcagagggcagtcttgggaaattactgttctcacacactcttcttgaccctacccctccagcacctcccttgctatccaagggttgggatttttaaaaagaaaaacaaattttaaaaaaagcagtgtgaatcttttgccatcttgtaagggtgaaaagccccctaccaagtcgggatgaacattcatgcgtgtgcttgagggcttgggaaaaagacagggcttggccccacagtgcaggtaggcccagtgatcctataataggggccaggagatgggaggtcccctgtgggcaggagttcaagtatgtggtattatatgactggtgcttgatgaacccagggagagggcaccaaaaacaatggtatttaattgtaaaatctccaccccctgaggatatgttttcaggtctgggtgactaattagactgggaaacaagggcaggaacgatggccctgtgcttgctctgcccgctgcctctgtggatgtgtgggctgctggcttcagtcctgcttttctttctgatggtattgtttatgctatgtgtttttgcaggaggcctgaggtgggctgggttctcctcctatggcagggcttcactctcctcctccttctctgttggg

SEQ ID NO: 388121 - DNA, 1533 bp, Homo sapiens
ccttgcgacacatacatcacacaaaagatcagataaaaagtacatatacagttcatacaataatcttatgtatgtaaaaccccgttacgatgtcggcgacggggcccatcagtaactattacgtggactcgctcatctctcacgacaatgaagacctcctagcgtccaggtttccggccaccggggctcatcccgccgccgccagacccagcggtttggtgccggactgtagcgattttccgtcctgtagcttcgcgcccaagccggcagtgttcagcacgtcgtgggcgcccgtgccctctcagtcgtccgtggtatatcacccgtacggcccccagccccacctcggcgccgacacgcgctacatgcggacttggctcgagccgctgtccggcgccgtctccttccccagcttcccggccgggggccgtcactacgccctcaagccggacgcctaccccgggcgccgcgcggactgcggcccaggggagggccgcagctacccggactacatgtacggctcgcccggggagctgcgcgaccgcgccccgcagacactgccctcgcccgaggcggacgcgctcgccggcagcaagcacaaagaggagaaggctgacctggaccccagcaaccccgtggccaactggattcacgcccgctccacgaggaagaagcgctgcccctacaccaagtaccagacgctggaactggagaaggagtttctcttcaatatgtatttaaccagggaccgtcggtatgaggtggcccgggttctcaatctcaccgagcggcaggtcaaaatctggtttcagaatcgaaggatgaagatgaaaaagatgaataaagagaaaaccgacaaggagcagtcctaaaccctacccagcctgctgcctcagcacagccaagggaaaaacaaaaaccccacaaaataccccaacacaggcgggggagagacgaaaaagaaaaggaaagagcaagatagacaaaagccaatcagcttaaaaagaaaaacaaggaaggggaaaagaaaactcttgcgatttgggagggttcagtgttgagatattggtgttttagagttagttctacccagcgaggaggaggcggggagagaaactgcgttctctttccccagcgcaaccgaaataaatgacacatacaaatgtgatttttttcctcctttcttcagagaagccagtacttgaatcgctatatttctatttttttttccctgtatcgtatttggtccaggtcatccctccccgggcctggggcgctctgcgtgcagattttgtacaaaaaaaaaaaagacacacacacatacatgataatgattcccagcccaggagctgaggggtgagggctggggaccatgccgcgggctaggtcgggcccgtgcaggccggcgccttgggctgtacatagtgttccctctcatccccagggttcgtccccagcgtccgtcctgtaacgtgcttctgtttgttatggtagaacagccctgtgttaatatattgaagtcacttaaccaga

SEQ ID NO: 388122 - DNA, 792 bp, Homo sapiens
agcagcccgactctatgtaggatcccctgcctgctgtcgctaccgagcggcaggtcaaaatctggtttcagaatcgaaggatgaagatgaaaaagatgaataaagagaaaaccgacaaggagcagtcctaaaccctacccagcctgctgcctcagcacagccaagggaaaaacaaaaaccccacaaaataccccaacacaggcgggggagagacgaaaaagaaaaggaaagagcaagatagacaaaagccaatcagcttaaaaagaaaaacaaggaaggggaaaagaaaactcttgcgatttgggagggttcagtgttgagatattggtgttttagagttagttctacccagcgaggaggaggcggggagagaaactgcgttctctttccccagcgcaaccgaaataaatgacacatacaaatgtgatttttttcctcctttcttcagagaagccagtacttgaatcgctatatttctatttttttttccctgtatcgtatttggtccaggtcatccctccccgggcctggggcgctctgcgtgcagattttgtacaaaaaaaaaaaagacacacacacatacatgataatgattcccagcccaggagctgaggggtgagggctggggaccatgccgcgggctaggtcgggcccgtgcaggccggcgccttgggctgtacatagtgttccctctcatccccagggttcgtccccagcgtccgtcctgtaacgtgcttctgtttgttatggtagaacagccctgtgttaatatattgaagtcacttaaccaga

SEQ ID NO: 388123 - DNA, 1870 bp, Homo sapiens
ggcctgcataggacctcatacccttccccaaacttctggctgtcacctgcattgtcactgtgtccaaaagcagcagccgggagcgcaccaggatgtcatgaccaccccggaacacaccagaccaggagcaacgtgtgggtgtgcttgttatccggcacttcgtctgacctctcacaagggtgcattcccaagaacttcacaatattacccaacagcctcttcaagtgtcttgatggtagagcaaggtgaacgtttcctccttgctcagattcatcccctacctcatcccaggctgcttcgaagttgcagtgttcatgacctttgtgaatgtgatcagctacagtgacttccagatcttccagcacatactcatcctcatagccttcgtgcatcagaataatcttatgtatgtaaaaccccgttacgatgtcggcgacggggcccatcagtaactattacgtggactcgctcatctctcacgacaatgaagacctcctagcgtccaggtttccggccaccggggctcatcccgccgccgccagacccagcggtttggtgccggactgtagcgattttccgtcctgtagcttcgcgcccaagccggcagtgttcagcacgtcgtgggcgcccgtgccctctcagtcgtccgtggtatatcacccgtacggcccccagccccacctcggcgccgacacgcgctacatgcggacttggctcgagccgctgtccggcgccgtctccttccccagcttcccggccgggggccgtcactacgccctcaagccggacgcctaccccgggcgccgcgcggactgcggcccaggggagggccgcagctacccggactacatgtacggctcgcccggggagctgcgcgaccgcgccccgcagacactgccctcgcccgaggcggacgcgctcgccggcagcaagcacaaagaggagaaggctgacctggaccccagcaaccccgtggccaactggattcacgcccgctccacgaggaagaagcgctgcccctacaccaagtaccagacgctggaactggagaaggagtttctcttcaatatgtatttaaccagggaccgtcggtatgaggtggcccgggttctcaatctcaccgagcggcaggtcaaaatctggtttcagaatcgaaggatgaagatgaaaaagatgaataaagagaaaaccgacaaggagcagtcctaaaccctacccagcctgctgcctcagcacagccaagggaaaaacaaaaaccccacaaaataccccaacacaggcgggggagagacgaaaaagaaaaggaaagagcaagatagacaaaagccaatcagcttaaaaagaaaaacaaggaaggggaaaagaaaactcttgcgatttgggagggttcagtgttgagatattggtgttttagagttagttctacccagcgaggaggaggcggggagagaaactgcgttctctttccccagcgcaaccgaaataaatgacacatacaaatgtgatttttttcctcctttcttcagagaagccagtacttgaatcgctatatttctatttttttttccctgtatcgtatttggtccaggtcatccctccccgggcctggggcgctctgcgtgcagattttgtacaaaaaaaaaaaagacacacacacatacatgataatgattcccagcccaggagctgaggggtgagggctggggaccatgccgcgggctaggtcgggcccgtgcaggccggcgccttgggctgtacatagtgttccctctcatccccagggttcgtccccagcgtccgtcctgtaacgtgcttctgtttgttatggtagaacagccctgtgttaatatattgaagtcacttaaccaga

SEQ ID NO: 388124 - DNA, 463 bp, Homo sapiens
ttgggacaacctactggcatttgaaattgatccaaaaggtgtaacagtttacagccagatgataatctttttatttggtgattaggaatttgagactaggagagagaaagtgacttggtcaagatcacacagctagtaatcgcaggtatgagaatagatttaggtacatgatgctcaactctgtggtaatcttgttgctacacagaccttgtctcattgtcttcattgatattgaagggtttcctagtttctccacttcttgattttcaaagttgtgtttcaacatcatggtcagtaggatgaaagccatcgttctggattcatggaaagcctttggttttgcctgctttagtgacttgttcaggatattcagtccttagtattaagcaactcctctttcagcttcaaagattttggataactccaaaacctttgtagtataaaaccatgcagttcaaaggcc

SEQ ID NO: 388125 - DNA, 323 bp, Homo sapiens
tccaattcctctcctccctttctctttgaactccctccaaaccagcttttaagtcagcattctactccagctgctcttgccagggtcgccagtcggtaaacgcagtcaccagttctcaggcctcctatttgacctcaacacagcatgtgaacacagctgagcactgtctcctcttcggaaccctgtcctaagttgacttgctggacaccacactctcctggttcttctcctacctgaaaggcggctccttcttatcatctttgctggtttctcttggtgtcaatatttaaagtttgcagagggaccccgggttcagtcccttg

SEQ ID NO: 388126 - DNA, 865 bp, Homo sapiens
ttctgagattaaccttttcggtgacgcggggagccatattgaaacctggaaacgatgaggctgcacggctcaccgtcttggataatggcaaagatggcctgcaagtgcgtgactctcgttatggaaatctctgtcctggagaggtgcttacgaaaagcgccatcttactctaggcaggtgcctggagtgtcctacgaggacgaggaccatattgaatcgtgacggattttcttacaggagtcacttcctaactgtagtctcctggcagaaaagaggcaacctccagccggtagtcccagacgaggtacctgcagagaatgatgtatgatctggtcatagacaccgtggatttcaactctccagagtctaaacgctgaaaacacccaacttgatttagtgccttacactctttatctccgatttttcaggacgacacctgttaaaatgttttgccacactttcggcgtgtattccgattatctttttggaaaatttgatcctgttaaatagactatacgtgggatcaacccaattcctgataaaatcggaagcataatgaactatctaatggcctatattagctcccagttctattataatgataaatgctaccgaactctcaccataaatatgctttttctgcgccccaaaggtaaacttaaccacaacaccctgacagtacagatagcaagtggcaaaactgagacagaaactcaagcctgcctcattacaacagcagcagtcttcaccgctgctggagctggcaaggtcaccaagtctgcccagaaagctcagaaggctagatgaatatcatccctaatacctgccaccccactcttaatcagtggtggaagaacggtctcag

SEQ ID NO: 388127 - DNA, 144 bp, Homo sapiens
tggccttccaaagtgctgggagtgcatgagtcaccacgcccagcttccttttctcttttcatgtggatcctgtgtgcaacagtgtgccttagagactgtggtgaaagaacacttgatgtttcaggaaatcgatctcagggcagt

SEQ ID NO: 388128 - DNA, 401 bp, Homo sapiens
ggtcttctgaatgtttggatagccaatggctttgcagcccagcctggccactacatgaggccgatgactttaacaaacttatttcaggccagtgtaaatgcagtgttcaaaaatcccacctaagaaggatgggaacacggaggtttgtgtaggtaacatgcaggtgtgtgcacatgtacccaagaatgcacacacacatacatggacacaactgcaattgatacaaaaggctgaactgtgctgattcttacaggtacttggttctggcccagtctggaaaaaaagaaaagatccttagtctaaacatgcatacaaaatagaattcccaccatgctttgatgttatctatttataattttcaatgtttcaatgttttgtggtcttaaaaattacaaggatta

SEQ ID NO: 388129 - DNA, 547 bp, Homo sapiens
agactcctgggctggaagctctagcaagtgaggctcacctggcgagcagtggtggaggttggtgggatcacctgctctgctgtccaggtgcttcccaggataacaggagtctaagcttgatgggtgatttcagaaaaagtaggatcactgggtccaaagctggagcaagaattgtttgcttggctaccagtggtggtgggtggtgtcacttgccctgatatctgagtgcttccagggacatgcaattgcttttaaaatgagggtaagaacagagaaaatatgctgtaataatatatatatatattttaataattgccttcatacttccctttacttctttggtttttcaaatgtagatttgaaactacagcctgatgtcactagcttttagcctgaagaacttcctttagcatttattttaaggcaggtatgatagcaacatattgttccagctttggcatatctgggattaattttgtttcattttcattttgtaaaagacagtttcatttcttgtttctgttcttcattgtttctaataagaagt

SEQ ID NO: 388130 - DNA, 363 bp, Homo sapiens
gttttaactctcttcgtgagagcagcaatttttagtcacaattaaaggacaactcttggaaatttattttactttatttttatctaacttttatttttaagttgagaggcacatgtgcaggtttgttacataggtaaacttgtgtcatggggctttgttgtacagattgtttcatcatccaagtattaagcctggtacccattagttatttttcgtgatcctctccctcctcccaccttccaccctccgttagaccccagtgtgtgttgttcccgtctgtgtgtccatgtgttcttgtcagttagctcccacttacaagtgaggacatgtggtatttggttttctgttcctgcattcgtttgc

SEQ ID NO: 388131 - DNA, 377 bp, Homo sapiens
caccaaggaagccaaaactcttgacagagcacactgaataggcaccacgcctgtcttacaaatgggaaaatcaaagtccccccacgagttggcgtcagtagcgttcacatcccagactgatcctgacatttatttttacaaaacaaaccatctcaaaacttggtggcatcaatattcattctgtgcacagaactcttgtttggacagggcttcatccggatagctccactgggcattagcgggtgcccccaaggccggtgggagtcacagaaggctcctacgtccaggccacagctctggccggaccccctcacagcatgtgtgtggatcccacgggccagctggaagctgggcacctttcctgaccaggcgtggaa

SEQ ID NO: 388132 - DNA, 286 bp, Homo sapiens
taattatattaactataaatggtctgagcatatcaattaaatgacagattgtgagacaggaccagaaaaactttcccaacttgatgctgtcaataagaaatccatttcaaatatagtgatataggtcagttacaagtaaaataatagaaaaataaatccaaagcaaacagatagaaaagaacagaaaataatgaaaccaaaaacaggaaaattatggagaaaataaacccaaagctagttatttgaaaagatcaataatatcaataaacttctggcaagacttaga

SEQ ID NO: 388133 - DNA, 1021 bp, Homo sapiens
cggagcgattagagcgaagtgcttcggtcaggcagtatctttgaaaataatttggccaatgaaagccctggcattggatgaaagtgctagctgctgggaatgctacccctccttttggttctctttcaagtccttcaggttcaaacaatacagaagtgtataaagtaagaattggaagtctcttcgctgctctaatctcactcctcagaggtgatcactggacctgagtgagcagaaggcttttcagaattacagcctgaactatttcttgagcaatttgggaactcatttctaaagcagtcctcagattcacacaacgtagtttgtgacggagtatgcccagagcagtgtggaagatgatcaaagtatgacatttcttctaccccagaggctggcatttctgcaggcacaaatgagcttggttttcaagcactgctctttgaacacaaggaattcctttaatgatcacgccggactatatagactttggaatcagactctttgaattccagctctgccatttaccaactttgacactttggggttttggaaatctggattgtagcagggcattgtggatctgcctgttggtggagaaccctagactgcatgcagccatgcacatgatctggagacacagcagagacaaggtctttgtctgttgctcaggacggagtgtagtggtgccatagcacactgtaatcttgaatttctggactactggcatacaccaccatgcttaggttcgggccacaacatccgtgactttaccggttttggtctcttccttgtaactttcggctccaggatgctgcgcactcctctctgcactatctatcagaacgttgctctgcgtgcttgaaagtttcgccaaacagaagtacacaaaaacaaacagaggcgaaacacaaatcccctcagccctggaggaaaaggccttgaagctcttccagtgcagaggccacgcagaggacatgctcctacctgtgcacatcggccacgcctggggtgcctcctggag

SEQ ID NO: 388134 - DNA, 1052 bp, Homo sapiens
actccccaatcccttccagcctcagagcccgcctggcaggactactgagcaaggccttggaaaatcggagcgattagagcggttcaaacaatacagaagtgtataaagtaagaattggaagtctcttcgctgctctaatctcactcctcagaggtgatcactggacctgagtgagcagaaggcttttcagaattacagcctgaactatttcttgagcaatttgggaactcatttctaaagcagtcctcagattcacacaacgtagtttgtgacggagtatgcccagagcagtgtggaagatgatcaaagtatgacatttcttctaccccagaggctggcatttctgcaggcacaaatgagcttggttttcaagcactgctctttgaacacaaggaattcctttaatgatcacgccggactatatagactttggaatcagactctttgaattccagctctgccatttaccaactttgacactttggacaacgtctcattctgtcacccaggctggagtgcagtggcacaattatagctcactgcagcctcaaacacctgggctcaagcaatccttccacctctgcctcctgagtaattgggactacaggcatgtgccaccacacccagctaatttttaatttttaatttttttgtagagatggcggtcttgctatgtcacccaggctggtcttgaacacctggcctcaagtgatcctccggccttggtctctcaaagctctgggattacagacatgagccactgcacccggctctatctccccttcctatgtgtgttagctctagaacaagagaagccttgttgagattcctggctgcccaccccccatcacctctctgactttgggcaagttgcctggcctctctcagcctttattttctttttgtgaaatggggataataatagtacttgcctcataggcaaaatgttgtgagaactaaacgagaaaatgcatgtaaagcacttggcacttagttctttttatgattataatgataatcagacacaataaattatgtctcacatcacatgc

SEQ ID NO: 388135 - DNA, 313 bp, Homo sapiens
gacatttcttctaccccagaggctggcatttctgcaggcacaaatgagcttggttttcaagcactgctctttgaacacaaggaattcctttaatgatcacgccggactatatagactttggaatcagactctttgaattccagctctgccatttaccaactttgacactttgggtaagtccttttaacctctttaagcctcagtttccttttctgcaaacaggaataatgataactaacaataataataataatcctttctcattgattaaaaataaactgagctgcaactgctattcgtatgctctcaacat

SEQ ID NO: 388136 - DNA, 338 bp, Homo sapiens
gtttccacattttatgctcacattcacatagatctaagtggccgaaacatttaactaaatggactattcatacaatcttatttccgggctggtcatctatgtcaatgataacagtagcattcatcgcatggctatgaatctgaatctttaaaaaaaaaaagagagagaaagaataattatttaaatctaaactatgctcagactagtgatttaaaagcttttttaattaaaaagtaatttaagttcattttcaaaggttcaaacaatacagaagtgtataaagtaagaattggaagtctcttcgctgctctaatctcactcctcagaggtgatcactg

SEQ ID NO: 388137 - DNA, 453 bp, Homo sapiens
tgaggtggggagaggaaggtgtcagtgctacccaatctagtctttgggattgtttgattaagcttcctaacatgattctactaccaggtcatccccttgctccaatgccagtgacaaccctctggtgcagggtctgactattacttaggtccctgtaccactctaccccttcactggcaactcctctccagccaggacactctgctccagctgctaacagattttagcatagcattatttctcaacatacaaggcccacatatgcacacagaccttgcaggggtcaaaaaatacaaaaccgacaatgttgctgaaggaataacatgcctgacattcagtttaagcactgctgctcaaaaataacctaggttggaagtggcctccagagctttgttgatcttccccaggatctcacttgcgtacgtgaacctcagtgcctggctgctccttatg

SEQ ID NO: 388138 - DNA, 407 bp, Homo sapiens
ccatcattttaatatgccctttttccaggcatttttctatggctctgtgcagatttgagagtgtttcataaaattaagatattctatgtggatggtttttattctgattttaagacaaaacattatatcattattttcctacattgttaaaaattctcttgggaggctgaggcaggcggatcacctgcggtcaggagttcaagaccagcctggcccacatgatgaaaccctgcctctactaaagatatcaaaaaaacatagctgggcgtgatggtagtgcctgtaatcccagctacttgggaggctaagccaggagaattgcttgaacccaggaggcggaagttgcagtgagctgacacggtgccactgcactccagcctgggtgacagagtgagactccatctcaa

SEQ ID NO: 388139 - DNA, 217 bp, Homo sapiens
gctcgcctgagtcctcataacatctttattgctaattaagaaaaggcggcttccttcagctgaagcagctctgagccagatgccaaaggggcaaggactagatttcagccagcctcccttaccagatgtcacgtcagctgagcacattttcagaggacatgccacctgtataacctccatgacctgtggagtctggtggccctgactccacactggc

SEQ ID NO: 388140 - DNA, 330 bp, Homo sapiens
atagcattttcatagctataacaacaaataaagcctacagagtgctttagggcttgcaaattgttttcagcaataggaaaactcatcggataagaagttcttcatgaactaaaaaaaatgacaaagatgattattttgctcaactagcaatttattccaaaaagataaagtgccctttctatgtactcccataggacgtacatgaactttcatgtattgcatttctcctagcacagcacttaccacaatgaatgtaactatctgtctacttaccggtattctctataaactataggctcataaagggagaagctgtgattcttattcacc

SEQ ID NO: 388141 - DNA, 509 bp, Homo sapiens
cttggtttgctctcttcctctctgatttctcctactctaaatctacagatttgtctttctagtcctactccataaatgatagtgttccccaggggtctgttatcaacctatcctttcttctcaggtgatctcatttatttcttcactaccacctagttttcaactttccccatatgcccattactacctgtcttagtttggttttccccagaagtatatcctgaaacagggatgtagatgcaaatcatttgttttggcagtgatgcctggaaacgccatcaggggagtggggaagggagacagggaagagaaaggagcccataaagtaaacattattaagcaagattccacaatgggcgaaaagagcttagtcctgctgggaagctccagggaacagcgtaaaacatactctagagttatcccaggcaaagggcaaatgagctgcagcatttgcacacaatccctgagagtcattttttgagggctactcccagaaagcattaattcct

SEQ ID NO: 388142 - DNA, 1836 bp, Homo sapiens
gactcggccccgcccacgtcatggcgcccgaggagaacgcggggaccgaactcttgctgcagagtttggagcgccgcttcctggcggcgcgtgcactgcgctccttaccctggcagagcttagaagcaaagttaagagactcatcagattctgagctgctgcgggatattttgcagaagacgtgctgtatagcccagaagccatcgtgtcgctggtcggggtcctgcggaggctggctgcctgccgggagcaccagcgggctcctcaagtctatgtggcccttaccgtctgcaacccagagacgtgccagctgttcaccactgagctatgccgggctgggatcagatgggaagtggaacctcgtcatgaccagaaactgtttccctacgaagagcacttggagatggcaatgctgaacctcacactgtaggactcacatacgactccaacgggattgtgagaatcaagtcactctcgtgggaagagtttttatatgggaaagcggataaaactttcattggactggaatgtttggagaatgttaatttccaaatcaggaaccacaaactgccctctaataagacatcggctatctaagcatgtgggtgctccctttctgccagcaattctggttcttaagaaaatcaccatcaatcagacatgaaatctctggctccaaaaatagcattttctttgtgcaaataaaaacgtgtgtatcaagtatgatgttcccccaatgtggacacactcggttccccacaaagccaagcccgctgcagctgccacatccctggacacatttggttcctcacaaagccaagcccgctgcagctgccacatccgtggacacactcggttcttcacaaagccaagcccactgcagctgccacatccctgggcttacagtgcagcaggtgcttttttcaagacaggaatcaaaatgttaggaacacggcggaaagatgacacctggagagcaaacgcaggatgaggagtactgcagaggtcacacggaagtcgcagaacagtaatccgctagcaggggcatggggcgtgaagaacagaagaagataggaagtgtttccgagcctccagaaaagaaatcagagccaagcacagcttcccgggtcacagaaccaattcatttaccaggcggcaccactgccgtcatttcaccttctggccactgggaggcgctgctcgaaagggtttgccctgagactccgagaagaagctgcgggaaggacagcaggggtcccggggttttagcctctggcccaggagttatgtgtccataaccaaatggagcacactctgcacccatctctcatcccatcggagctgctgcgattcccgcaggttcttccggaactggtttagcttgcccgcaggatcaggaaagtttgagaaaagcatctgcaaaaaaataaagagcagagcttaactcatttcctgtccccaccccatcccaggtcaccacctggctgaccccaggtccccgacccaacaacaaaccctcccaagttcctaactccctcacttggactcgagactcttcacgccccagcagcgctccgcctccaacttgacatcacgctttctgtcccactttcccacacttcgtgccctggagcacctcccggcctctacacgctgtatgttcccctgcgagcaccctcctcttggcctctggccaagtcccacccatctgtgggtaacaagggggtgttggtgttcttttcagccttgctaaactgtctgaatcaaggatcacaaactacagcctgcaggccaaatccagcccacagcctgtgtttgtaaataaagttttattgg

SEQ ID NO: 388143 - DNA, 1807 bp, Homo sapiens
  misc_feature (14)..(14): n is a, c, g, or t
  misc_feature (17)..(17): n is a, c, g, or t
tgcaggctgtaccnccncggggtatgggatatcggtttggagcgccgcttcctggcggcgcgtgcactgcgctccttaccctggcagagcttagaagcaaagttaagagactcatcagattctgagctgctgcgggatattttgcagaagacgtgctgtatagcccagaagccatcgtgtcgctggtcggggtcctgcggaggctggctgcctgccgggagcaccagcgggctcctcaagtctatgtggcccttaccgtctgcaacccagagacgtgccagctgttcaccactgagctatgccgggctgggatcagatgggaagtggaacctcgtcatgaccagaaactgtttccctacgaagagcacttggagatggcaatgctgaacctcacactgtaggactcacatacgactccaacgggattgtgagaatcaagtcactctcgtgggaagagtttttatatgggaaagcggataaaactttcattggactggaatgtttggagaatgttaatttccaaatcaggaaccacaaactgccctctaataagacatcggctatctaagcatgtgggtgctccctttctgccagcaattctggttcttaagaaaatcaccatcaatcagacatgaaatctctggctccaaaaatagcattttctttgtgcaaataaaaacgtgtgtatcaagtatgatgttcccccaatgtggacacactcggttccccacaaagccaagcccgctgcagctgccacatccctggacacatttggttcctcacaaagccaagcccgctgcagctgccacatccgtggacacactcggttcttcacaaagccaagcccactgcagctgccacatccctgggcttacagtgcagcaggtgcttttttcaagacaggaatcaaaatgttaggaacacggcggaaagatgacacctggagagcaaacgcaggatgaggagtactgcagaggtcacacggaagtcgcagaacagtaatccgctagcaggggcatggggcgtgaagaacagaagaagataggaagtgtttccgagcctccagaaaagaaatcagagccaagcacagcttcccgggtcacagaaccaattcatttaccaggcggcaccactgccgtcatttcaccttctggccactgggaggcgctgctcgaaagggtttgccctgagactccgagaagaagctgcgggaaggacagcaggggtcccggggttttagcctctggcccaggagttatgtgtccataaccaaatggagcacactctgcacccatctctcatcccatcggagctgctgcgattcccgcaggttcttccggaactggtttagcttgcccgcaggatcaggaaagtttgagaaaagcatctgcaaaaaaataaagagcagagcttaactcatttcctgtccccaccccatcccaggtcaccacctggctgaccccaggtccccgacccaacaacaaaccctcccaagttcctaactccctcacttggactcgagactcttcacgccccagcagcgctccgcctccaacttgacatcacgctttctgtcccactttcccacacttcgtgccctggagcacctcccggcctctacacgctgtatgttcccctgcgagcaccctcctcttggcctctggccaagtcccacccatctgtgggtaacaagggggtgttggtgttcttttcagccttgctaaactgtctgaatcaaggatcacaaactacagcctgcaggccaaatccagcccacagcctgtgtttgtaaataaagttttattgg

SEQ ID NO: 388144 - DNA, 257 bp, Homo sapiens
taattgcctttccatctaatggcccaaatggtcaaatggcatctactagtctcatatgaccgctgcctctctggcctcgccctgctgctgaggtcagcatgacctggaactgtccgctggtccctttcagtaacctgaagctttcaccgtagacgtgctgtatagcccagaagccatcgtgtcgctggtcggggtcctgcggaggctggctgcctgccgggagcaccagcgggctcctcaagtctatgtggccctta

SEQ ID NO: 388145 - DNA, 1686 bp, Homo sapiens
gactcggccccgcccacgtcatggcgcccgaggagaacgcggggaccgaactcttgctgcagagtttggagcgccgcttcctggcggcgcgtgcactgcgctccttaccctggcagagcttagaagcaaagttaagagactcatcagattctgagctgctgcgggatattttgcagaaggccgggctgggatcagatgggaagtggaacctcgtcatgaccagaaactgtttccctacgaagagcacttggagatggcaatgctgaacctcacactgtaggactcacatacgactccaacgggattgtgagaatcaagtcactctcgtgggaagagtttttatatgggaaagcggataaaactttcattggactggaatgtttggagaatgttaatttccaaatcaggaaccacaaactgccctctaataagacatcggctatctaagcatgtgggtgctccctttctgccagcaattctggttcttaagaaaatcaccatcaatcagacatgaaatctctggctccaaaaatagcattttctttgtgcaaataaaaacgtgtgtatcaagtatgatgttcccccaatgtggacacactcggttccccacaaagccaagcccgctgcagctgccacatccctggacacatttggttcctcacaaagccaagcccgctgcagctgccacatccgtggacacactcggttcttcacaaagccaagcccactgcagctgccacatccctgggcttacagtgcagcaggtgcttttttcaagacaggaatcaaaatgttaggaacacggcggaaagatgacacctggagagcaaacgcaggatgaggagtactgcagaggtcacacggaagtcgcagaacagtaatccgctagcaggggcatggggcgtgaagaacagaagaagataggaagtgtttccgagcctccagaaaagaaatcagagccaagcacagcttcccgggtcacagaaccaattcatttaccaggcggcaccactgccgtcatttcaccttctggccactgggaggcgctgctcgaaagggtttgccctgagactccgagaagaagctgcgggaaggacagcaggggtcccggggttttagcctctggcccaggagttatgtgtccataaccaaatggagcacactctgcacccatctctcatcccatcggagctgctgcgattcccgcaggttcttccggaactggtttagcttgcccgcaggatcaggaaagtttgagaaaagcatctgcaaaaaaataaagagcagagcttaactcatttcctgtccccaccccatcccaggtcaccacctggctgaccccaggtccccgacccaacaacaaaccctcccaagttcctaactccctcacttggactcgagactcttcacgccccagcagcgctccgcctccaacttgacatcacgctttctgtcccactttcccacacttcgtgccctggagcacctcccggcctctacacgctgtatgttcccctgcgagcaccctcctcttggcctctggccaagtcccacccatctgtgggtaacaagggggtgttggtgttcttttcagccttgctaaactgtctgaatcaaggatcacaaactacagcctgcaggccaaatccagcccacagcctgtgtttgtaaataaagttttattgg

SEQ ID NO: 388146 - DNA, 492 bp, Homo sapiens
aaactaaatttctagcttaagatgaaggtgtagttcctgcactgaatagccttcatctgtagatttgtgaaatgttgcagttttacatctaagcaccttataaggaattctatcttagacaagattagatcctgtggcaatctttatttgaaaagcttcatagtttgctccaagtgcatggaaatgtgtcttatttctcttgaatgccctttaggtcttaacagaattcacagtgccaaggagtcaaaaactatatttcaaattatatacattcctgacatattatttgagcagattaaaactgatggatagagcaatttaggcaccttgaaagtagctacttgaaaaatgccaactttttcttatctccattcacttaaacaaaaatgggccaggtgcagtggctcatgcctgtaatcccagcactttaggaggccgaagcagatacatagcttgagcccaggagtttgagaccaacctgggcaacatggc

SEQ ID NO: 388147 - DNA, 790 bp, Homo sapiens
atcaccagagtcgaaaggaagatgcctgggagcctgcagtcgaagttttaagcaaacgtcacagcaaaaacagccttaaaagaagagaagacaaaatgtaaccaaagcttaccagaccacaggagggtcatcaccggagtcagaaggcggacgcccgggatcctgcagtcggacttgggtcatgccccagcatacgacaacacagcagccttcagctcctccttcgtgttccagggatacatgtgcagaattgttacataggtaagttgtgtctcatgggggtttggtgtacaaataatgttgccacccaggtaattagtgtggtcccaccctccatcttcaaatagaccccagtgtctgttattccctcatttgagcccatgcgtactcaatgaattgcatctacttataagtgagaatgtggggtattgggttttctgttcctgaattaatttttcaaacctaatggcctccagctccacccgtgtttctacagaggccacggtcttattctttttgtggcttcatagtgttccatggtatataatgatgttctttttttctagttattgtttttgatttaaagtttgttttatcttatatgagaatagaaacacctgcttgcttttggtttctctttacttggaatattttcttccgtctctctactttcagtctatatgtgtctttagtggtgacgtgtttcttttcagcagcatacagttaggtcttgtttttagaatccattcagtccatttgtataattgaagtgacaaatttattttcattc

SEQ ID NO: 388148 - DNA, 617 bp, Homo sapiens
tgagtgataaaggaaacggagaagaacgttccaagcaggagaaacggtcagaggcattgcggggagtgagtgaggacctctgctcaggctgcatgtggagtaagcggaggctggtgtggggagcagcaggaccaaggtaaagagctaggttggatccacactgggagggtctggaataccaggctaaggcatttggagttcatcctgaagacttgggaatctagttttgaggtgtgtctactatctcttaattgagacaccatggaccctgagccactatttgaattaacactgatcaagtgattggaaaacacataatataggatatttacgtttcttatagtgtgtgcagaaatttgatacctgtatctgttatgagaacctggggtagtgatgatggtaatgacgtaagggaaggtgacaaagaaagtatctatcattatgctaagtgaaataagccaggcatagaaagacaaacatcagatgttctcacttatttgtgggagctagaaattaaaacaattgaattcataaagatggagagtagaaggatggttaccagaggctgggaagagtagtggggggctgagtagaggtggaaatggttaatgggtaca

SEQ ID NO: 388149 - DNA, 123 bp, Homo sapiens
gagagagcattttagtcctacgaaaaagcacaagcagaaatgggcaaatgtgagaagggtatgtgtaaagacacactgtgttaatttcagtagagggaggagggataggaagacagtgggaag

SEQ ID NO: 388150 - DNA, 635 bp, Homo sapiens
gaaatggggaaaggtaaatattccatagggctctggcagtaaggaagggaaaaaagatgggaggccagtcatgcagccatcggccatgtggctacagcttccttcttccacctgcccagtccttattctcctgtcttcaggcaggctctcactggttggggttctggatccagagcggcaactctaacctctgttcctgaggctcttcaacccttggtgggactctgattagagtagcagcttcttcagcccaccgttccgcggggcattgtgccccaggtgttctctggttcctcctgtacctttcctggccacaccagggtgtggtaacaatcacaggacaccctgagtctcagggtcggtcatcagcctgacattctgacccccttttctgtctcttcctaatgccacagggagcctcaaatggcacggtagaaatctcagcttctaaagggattatgacattgtgccctgtggcttccttccctcctttcattccttctttccttccttccttccttccttccttccttccttccttccttccttccttccttccttccttttcctctcctctcctttcttcctttttgagatggagttttgctctttttgcccaggctggagtgcaatgg

SEQ ID NO: 388151 - DNA, 348 bp, Homo sapiens
acgcctcttctgactttgcataattcctaaaaacacagcttattattcaaaacatattttgctttttaacctgtgtcaggaacatcctttaaaaaaaattgtgggattttttaaaaagtcagtgatgaagactttttttctctctcttcagtagaccaggtatttaaaataccattaaagattagaataattaaatgaaatctgattctttttgtctattgttgacagtttaacattttaagcatacaaaaataacgagagggttttttggttttttttttttttctttgcaatgttaggatcatgtttcgtttcagtctttaaaaataacattaaaactttatatat

SEQ ID NO: 388152 - DNA, 660 bp, Homo sapiens
gaagtcctgcttgtgaaagtttgccacaaaaaaagaaaggtaatgtcaacaaaatgatattggtagattaaatggaataatttgcttaattggacatctttatgcatatatattgtattttaaagcttagttttaaattttgaaagcttaagaaatgtgttgatggcctaattataaaactgataacctcttttgccaactcgcatatctgtgtagtttttctagtcttttaataagtgtctgtacaaaactttctcataggagtctggaaatggagaagctatgttttagcatctggcataaattcagttgctgttctaccatttcaatctgttagcgtatttcttagctgtttgtacccattgacattttaggtaagggctaagagagagttttttccacaagattatcctttgtaacactgctctcaggcaaagaaattttgttgtcagcgttattagccattcacttattagtacattgcttcaaatttttataaggtgaagttatttcaccatagaaacaagtgttaagatgtttcctggtcaaccgatcaaagccaacatatgtacctttagttgcctcaagtcctcgagtgtttcaagaggagtaggagctggtctgggtccagggtcccagtgctgatattcttccaagacc

SEQ ID NO: 388153 - DNA, 558 bp, Homo sapiens
gtcgagtcggcctggggggaaccacactgcactgctgtggtgtctgagtttgaaagtgtcaacttcacataagtcactgcactgctgtcaactctgagttcaaaactgtccactgtggataagtcactgcaccactgtcacctctgagttcaaaactgtcaactgcggataagtcactgcaccgctgtcgtctctgagtttagttcaaaactgtccactgcggataagtcactgcactgctgtctcctgagttcaaaactgtcaactgtggataagtcactgcaccgctgtcatctctaagtttagttcaaaactgtccactgtggataagtcactgcactgctgtctcctgagttcaaaactgtccactgcggataagtcattgcactgctgttgtctctgagttcaaaactgtcaaccgtggataagtcactgcactgctgtcgtctctgagtttagttcaaaactgtccactgcagataagtcactgcactgctgtctcctgagttcaaaactgtccactgcggataagtcactgcactgctgttgtctctgagt

SEQ ID NO: 388154 - DNA, 752 bp, Homo sapiens
atgattgaaaaactctatctttaaattgatatatctaatttaacctagaatgtgtcagagtctatcatgtatctgcttaaaactattttccaatcatataaaagttttaagttaagatcaaggacatcttctataccctcccctgcatcttatccaacaattgcctgggttagtttaacttcccaagtatttctccagtggctcaccactgccacaactatagtccagtaagcaccgtcaccttttgcctaatgtaccagagcagcatctaacctcttctagctcttggccctttaaactgttctacccacagtagccaggataatctttacaaaacatcaatatgatcatatcactagcctgcttgaaaccttcggatgatttcaagttgctctgagagtcaaatccagtattctaatgctctctgtatctggcccttgcttaactctccagcttcatattttactcctctatcaccctcattcactctgctacactagccttctagtcatttcctcaagctgccagttcttttttgctgtagaacagagctgttcaatagtacattctatgaagatggaagtactctatatctatagtgtctggtttgctcccgctagccccgtgttgctgttgggcacttgaaatgtggctaatgcaactgagaagctgatttttaatttagttttaattacggtgaatgtaaatagccacgcatgggtagtgtattggacaatgcatttctagtgctt

SEQ ID NO: 388155 - DNA, 133 bp, Homo sapiens
tctgaattttcctagggttctggaaaattaattccacaagacatttaaacaacccatttccttcctgcacagtgtccatcttgctagggagacacaaaatcacctgcttagggttcaggaggactaggaaaca

SEQ ID NO: 388156 - DNA, 400 bp, Homo sapiens
gagcatggtggctacagttaataataacctattgcatattgaaaattgctaaaaatatagatcttaaattttcttatctcacacacaacaaaagtttgtgaggtgagagatatgttaattagcctgatttcatgattttgcaaggtatgcatatatcaaaacatcaagttgcataccataaatatatccaatctttatttgtcagttataccttaataaaactgagaaggaaaaatctttaccaaatagacatactttaaaatatatatgtggaattttcagataattgaacaataggacaaaaaaaatgaaagaaataattttaaagagataaactttggaaagctattgaaaaaagataagataaaacttgacattgacaaaaaatagctatatatac

SEQ ID NO: 388157 - DNA, 421 bp, Homo sapiens
ccggactgcagaagctggcggatattgtccagattgtgttcagtgtagacccctccgagaatggccctggttccctggcagggctgggggcctataaagtgcacatccatcctgatgccagtcaccagagggtggttcagccatctgatgcctggagcaccactgcagcagaaagcgagggaaggtgctgagctactggtgcttcagtcctggccacagcatgcgcaagctggtctgtcagggcatctgctttatcatcctcaccagtggcacactggcccccgggtcctcctttgccctggagttgcagatccctttcccagtctgcctggagaacccacacatcatcgacaagcaccagatctgggtggggatcatccccagaggccccgacggagcccagttgagctccgcgtttgac

SEQ ID NO: 388158 - DNA, 232 bp, Homo sapiens
ccactcccttgcttaaaaccctcccaagtcttctccattgcacttaaaattaaaaccaccatcctttccttggctgacaaggtcccacctggtcaagacccttcctacatttgcagactcatctcccaccatgctctgtcctctaccccactccagcccctctgtccatgctgtggacacagcaggcatggattcctcatcttttcgtggctgatttctttgatgcatccca

SEQ ID NO: 388159 - DNA, 428 bp, Homo sapiens
ttgtcagcaaaattaataagtcctttcaaaattttaaaatttcaatcctattattataataaaagcaattatctcaattaggcctatgtttggggaagttaatgtagaaaaagacggattttacagataagaaattttgtaagtgtttctttcagaagtatcagatagtgataatccctcttttaattatttcaaagaacaaaaataagagtagaagctatttaaaattttcctagatcaccctaagggtgcaggacctgggaacatgctgggagagtcaatccccttaggaattctgtttctaaggcaggggtctcaggcaccatcacatgcatacatacccaatggatgtgtcacccgctcacccatacataacattccttacagaacaatctgtgagtagacgctttctccagcaaactttctat

SEQ ID NO: 388160 - DNA, 1226 bp, Homo sapiens
  misc_feature (456)..(456): n is a, c, g, or t
  misc_feature (1089)..(1089): n is a, c, g, or t
  misc_feature (1126)..(1126): n is a, c, g, or t
gaattaatcagtgaaatgtgagatgaaacattaggaaaggagaatgaactggatgtgagcagagacaaaaaagtaaaaagctaggacatgtaaacaagattttgagttgtgtaaacaaaattagagcaaccattaaacagatacaattccctcttttgatttataaaaaatcacacagattgctcatgaaaatttgttaggaaatgtacttggaacccttaagggaggcagccacactgagtcatctctcttaatttgtagcttttcgtctgctcagagggtttcagtgtagaaaggaaactttgcagatagggaaaagtcagtattgacctagagataggcttatgtattttcttgtgcctggaaatttgtccaatcacttttaattcataggtaaggctaaagctttgagcattagtttaaataatttgcttaaataaaactataactagcttnacataaacatcaacagaatagagctcacttttattttcctttttatcttcttttccttcctgtaacacaggaaaagcatatcaaattattatctccattttatatgcaataaaaatttcctataaattttgtgcacaattatgatcacatctcctatttttacaattcatactttgagatccacttgtcttattagctggaaatctaatttccccagttgatcttatttatagagacttttttactgtagaagggctgtgtcatactaacttccataaccaagaggaatagaactggagtttgatctaatccaactagcagaagaaaaaagaaagaaatgaaaaatttttcaataatttcattaaagcagaaaagagaaactgaaaacaaaaaaacaatttaaatagaagacaaaaatacaaaaaaaaaaatcccaatatatttgtaatgacaataaacatgaatggattaactttttctagtaaaagacaaagactctcagcctggtttttaagaatgtccaaagacactcctaaattaaacaataaaaagatcagtttaaaagttagaaatgttaagaaacaaaacagacaaatgttaacaaaatgaaagcaaggcataaaagcattaatnccagacaaagcacatttcaagaataaaagatgttaangacaaaaaagatgttttaaactcactaaaggtacaattcaccaggaagatataagaggcatcaagttgtatgtacataaaatcatagcttcaaaatatac

SEQ ID NO: 388161 - DNA, 369 bp, Homo sapiens
ccctccgggcacctctacccaggatgctgctgtgcagttcctctggctagggcccacctccctagagctgaggccacatggtagggtcacctaatggaagggaggaaggcctcagggtccggggtcccctgccactgcccagctcttccagctgacagctccacatcttgggagtgggctctgatgcatgatgggtcaggggcttctcagttttctacagcccaaatactgcccagctccggaggctcctatcccaccaggagcaggtataacacaaatttttcccaaagatcatgtggtacctgctgagtggacgacaccctcaactctttcccagaggcccagggtcccatggggcagggaaacagg

SEQ ID NO: 388162 - DNA, 294 bp, Homo sapiens
ggggatactaatgcatgctaaagtttgagaaccactgacttaatatacagtttccaacccggatgacactagaaacaactacgggactttacaaaaatatgggtgtcctggcttcccccagagccactagggtagtggaaacaaatgtcactatcaaatggatctgggtttgaattctggttttgtcactcaccagctatgtgccttgtggaggctccatcttctcatctgtaaagtaaaagtcatcggacctgccttgtaggaaggtgtaggaggggaaggttcagcaatgcc

SEQ ID NO: 388163 - DNA, 230 bp, Homo sapiens
ataccagtaccatgctgttttgataattatagccttgtagtatagtttgaattcaggtaatgtgatgcctccagatttgtcctttttgcttagtattgctttggctatgcaggctcttttttggttccatatgaattttaggatttttttttctagttctttgaagaatgatgatggtattttgattctaagtgtgttgaatctgtagattgctttttccagtatggtca

SEQ ID NO: 388164 - DNA, 349 bp, Homo sapiens
cgcacctgtagtcccagctagttggaaggctgaggcaggagaatcgcttgagtgcaggaagtctaggctgcaaatgaattatgatcacatcactgcactacagcctggctgaaacagtgatactctggctcaaaaaaaaccaataaataaataaataaataaattgcatttacttcttctgaagtagtacttgtctttcattcatgtgtttatcttgccccacaaatttaaactttaatccaccacctgcaaagagtgatgggcatttatacagagcttagattgatagggaaaaggaaggaagtctaccctgtgttttattctcagtaccaattcagtgaattcttta

SEQ ID NO: 388165 - DNA, 825 bp, Homo sapiens
tttcgttatgtgatatccctctacaggatgagttttaatggatgctggtgctaacatcgtatgaaattgaggtaggaggcgggactctgacaccagaccagattgaggactagctaatcatcatactttacataaggaatccgtaggattggagagttgattgtttcaaataaggctggtttccttatttggttatttccttagaataataactccaaatctgattatttccttagaatacattcttatgagtagaactgcagctcaaactaaatttggtgctgtccagtggtatggcgatggacttcagaacatcctccactcttgccctcaccccacaagaaccctttactcgggatccattctcacgcagtcttcctccccgaccgccccgcgcgtccgctcggcgggatgacaaagaccgcctcgggtggggtggtgagcagtaccggcctcctccagcagggggcgctgtgggatccgccgctgtccgggacgaaccagcaagccgctctcggtccacacacgctctgtctgcctgccccgagtcccccgggaggccgcggggtttggggaagtgtttctaggagacggcgctcaccggctgcacctgcgccgttgacgccaccggggccggcagacagacccgcggcgctggctggtggagggagttcccgcttgctctctgtcgctgtcaccgccctgtttctgtagccgtatggtacgcctgtgagaccggctgccggctgacgtctccttgcgatggagcatatccggacgaccaaggtagtcgggcgcgggatcgccagtcttcaggggccctgc

SEQ ID NO: 388166 - DNA, 4628 bp, Homo sapiens
tttcgttatgtgatatccctctacaggatgagttttaatggatgctggtgctaacatcgtatgaaattgaggtaggaggcgggactctgacaccagaccagattgaggactagctaatcatcatactttacataaggaatccgtaggattggagagttgattgtttcaaataaggctggtttccttatttggttatttccttagaataataactccaaatctgattatttccttagaatacattcttatgagtagaactgcagctcaaactaaatttggtgctgtccagtggtatggcgatggacttcagaacatcctccactcttgccctcaccccacaagaaccctttactcgggatccattctcacgcagtcttcctccccgaccgccccgcgcgtccgctcggcgggatgacaaagaccgcctcgggtggggtggtgagcagtaccggcctcctccagcagggggcgctgtgggatccgccgctgtccgggacgaaccagcaagccgctctcggtccacacacgctctgtctgcctgccccgagtcccccgggaggccgcggggtttggggaagtgtttctaggagacggcgctcaccggctgcacctgcgccgttgacgccaccggggccggcagacagacccgcggcgctggctggtggagggagttcccgcttgctctctgtcgctgtcaccgccctgtttctgtagccgtatggtacgcctgtgagaccggctgccggctgacgtctccttgcgatggagcatatccggacgaccaaggtcgaacaagtaaaattacttgaccgattcagtaccagcaacaagtcattaacaggaacactgtatcttacggctacacatctattatttatcgactctcatcaaaaagaaacctggatattacaccaccatattgcctcagtagagaaacttgctttgactacttctggatgcccccttgtgatacagtgcaagaacttcagaactgtgcatttcattgttcccagagaaagagattgccatgatatttacaactctttgctacaactgtcaaaacaagcaaaatatgaagatctctatgcattttcttataatcccaaacaaaatgattcagaacgactacaaggctggcagctcattgatctcgctgaggaatataagaggatgggagtgccaaactcacactggcagttgtctgatgccaaccgggactacaagatttgtgaaacttaccccagagaactttatgttccccggatagcaagcaaaccaataattgttggtagttccaagttccggagcaagggaagattcccagttctttcctactatcatcaagataaggaggctgccatttgtcgatgtagtcagccactctctggattcagtgccaggtgcctggaggatgaacatttgcttcaagccattagtaaagccaatccagtcaatcgctatatgtacgtcatggataccaggccaaaactgaatgcaatggccaacagagcagctggaaaaggttatgaaaatgaagacaactattccaatattagatttcagtttgttggaattgaaaatattcatgtcatgaggtccagccttcagaaattattggaagtcaatggcactaaagggctttctgtcaatgatttctactccggtttggagagctcgggatggcttcgccatatcaaagctgttatggatgctgcagtcttcttggccaaagcaataacagttgaaaatgcaagtgtgtcggtgcattgttccgatggttgggataggacttcccaggtttgttccctgggttctcttttattggattcctactacaggacaatcaaaggattcatggttttaatagaaaaggattggatctcttttggacataaattttcagagaggtgtggccagttggatggtgacccaaaggaagtctcaccagtgtttactcagttcttggaatgtgtgtggcatttgaccgaacagtttccacaagcctttgaattcagtgaagcatttcttcttcagatccatgagcatattcattcatgccagtttggaaacttccttggaaattgtcagaaggaaagagaagagctcaagttgaaggagaagacttattccctgtggccatttcttttggaagaccaaaagaagtacttaaatcctctctacagttccgaatctcacagatttacagttttggagccaaatacagtatctttcaattttaagttttggaggaacatgtaccatcagtttgatcgaacactgcatcctaggcagtctgtatttaatataattatgaatatgaatgagcaaaataaacaattagagaaagatattaaagacctagaatctaaaattaaacaacgcaaaaataagcaaacagatggcatcctcaccaaggaattgttacattcagttcatcctgaatcacctaacctcaaaacttccctgtgttttaaagagcagactctgctacccgtaaatgatgctcttcgaactatagagggcagcagcccggcagataatcgttatagtgaatatgcagaagagttttctaaatcagaacctgctgtggtcagcttagagtatggtgtggcaagaatgacttgttagactcatagagttttttctgcaatgattgcagtacaagaaaaggattattgtgaggatggtctgtaagcataaccaaaaggaatttgtctaataacaattttagggtttaacagtaggctaatagttgaaggaaggataataactacccttgtgagagaaatatgtcattttaattgcatttccagcaaggaatgacattcagttctgtaagaaatgagtggtatttgatgtatttactcaaaacacaatttgcactgtacactagtgaattgacgtttatgatttatgttaattcagccaaacataaataaccttccttaagtacaatttaacttcaagaaaacaaaatttgacaacatagtttcttaataaatgatatggcatgtactttcaattatgtagctttgtaactatgaatatttacatattttgccttttagtgatatttaatgttaaagtgccatgaaaaatatttctaagaaagccttaaattcccagtggattctttacccttaagttttacagcctacaacaagattttttgttttgtttttcttctggtcagccttgttttgtttgtaaagaattgtgctctcattactgctgggggtgcatgctacaatacttctatataaacacttgtagaagtacactgttcacgtttagcctgccccacttttgtattcaaaattaatgaaactgaaggtttattctgatcataatttgtttagtgctacatttgataatttattatttacagcttagaatattgatttcttgaatacgtataagcacatttgactgtcttttatatatggattactgcattccattgattcttattttgtggttggctttatttctttcacaactgtgtaagtttaaagagctaaagctctaaaactgttctgagaaacaatgaatagtacatgtatatgtatatttttaaactgccttattgctcaatgagttgctgttcctggagtatctaactttcagtttactcaaaaacttttgggtaaataaaaaagggaagtacagatagtttaggttgtgcatggttgcatgaattttgaagtcatttctatgtggagcattatttttcttcttgttaaatatagaaaaaaaaagagattctagtacaaagttactgtttaacaaaagcaacataaactctgggaaagatttcattttgccatgttatatttactgtttattctgtgtactagtacatatctttaaattaccaaaaaacaagaaacaaaacataaaaaccccaaaactatcacttggaattagcaatatcacccaactggctttaaaattgaaaatttaaataacatggtggcatgaagtacaattcgagtattaggcaatttgcatagtgttcctcatgctactttctgttacacctctattatattagttttgaatataaacatctttttcagaccaaaaaaaactttattgtatgagagcttatcttatcctgtttatttttccaatgcttttctgtaatacattatgtaatttaaaaaatattcctttttaaacagcaacagaaatgcactataaaatatagtatgtgattaaccaatcctgcttccatatttaagcactgggaatggaaacttaatctctgtgactacaaagggaagtttttgtgccttggtgttccagtcactgattgtggttttagaatcttctgtggctgacttcttgtattcaactctggtttattatcttaatcttcaacttcagacatacatttgtgtgtttatatgctcacaggtggactgagaaatcagttacatcttaagtgacctacagggtatatgttggcaaaagcagactgtgtatatgtcttataaagttgaatttatgttcagtgtgtttggaagtgtatagcatgtaaattatttcatatatgatttaaaggtaattaaatgttcacattttactttgaatgtttttcttctggataaaacaaatggaatcaa

SEQ ID NO: 388167 - DNA, 4652 bp, Homo sapiens
tttcgttatgtgatatccctctacaggatgagttttaatggatgctggtgctaacatcgtatgaaattgaggtaggaggcgggactctgacaccagaccagattgaggactagctaatcatcatactttacataaggaatccgtaggattggagagttgattgtttcaaataaggctggtttccttatttggttatttccttagaataataactccaaatctgattatttccttagaatacattcttatgagtagaactgcagctcaaactaaatttggtgctgtccagtggtatggcgatggacttcagaacatcctccactcttgccctcaccccacaagaaccctttactcgggatccattctcacgcagtcttcctccccgaccgccccgcgcgtccgctcggcgggatgacaaagaccgcctcgggtggggtggtgagcagtaccggcctcctccagcagggggcgctgtgggatccgccgctgtccgggacgaaccagcaagccgctctcggtccacacacgctctgtctgcctgccccgagtcccccgggaggccgcggggtttggggaagtgtttctaggagacggcgctcaccggctgcacctgcgccgttgacgccaccggggccggcagacagacccgcggcgctggctggtggagggagttcccgcttgctctctgtcgctgtcaccgccctgtttctgtagccgtatggtacgcctgtgagaccggctgccggctgacgtctccttgcgatggagcatatccggacgaccaaggtcgaacaagtaaaattacttgaccgattcagtaccagcaacaagtcattaacaggaacactgtatcttacggctacacatctattatttatcgactctcatcaaaaagaaacctggatattacaccaccatattgcctcagtagagaaacttgctttgactacttctggatgcccccttgtgatacagtgcaagaacttcagaactgtgcatttcattgttcccagagaaagagattgccatgatatttacaactctttgctacaactgtcaaaacaagcaaaatatgaagatctctatgcattttcttataatcccaaacaaaatgattcagaacgactacaaggctggcagctcattgatctcgctgaggaatataagaggatgggagtgccaaactcacactggcagttgtctgatgccaaccgggactacaagatttgtgaaacttaccccagagaactttatgttccccggatagcaagcaaaccaataattgttggtagttccaagttccggagcaagggaagattcccagttctttcctactatcatcaagataaggaggctgccatttgtcgatgtagtcagccactctctggattcagtgccaggtgcctggaggatgaacatttgcttcaagccattagtaaagccaatccagtcaatcgctatatgtacgtcatggataccaggccaaaactgaatgcaatggccaacagagcagctggaaaaggttatgaaaatgaagacaactattccaatattagatttcagtttgttggaattgaaaatattcatgtcatgaggtccagccttcagaaattattggaagtcaatggcactaaagggctttctgtcaatgatttctactccggtttggagagctcgggatggcttcgccatatcaaagctgttatggatgctgcagtcttcttggccaaagcaataacagttgaaaatgcaagtgtgtcggtgcattgttccgatggttgggataggacttcccaggtttgttccctgggttctcttttattggattcctactacaggacaatcaaaggattcatggttttaatagaaaaggattggatctcttttggacataaattttcagagaggtgtggccagttggatggtgacccaaaggaagtctcaccagtgtttactcagttcttggaatgtgtgtggcatttgaccgaacagtttccacaagcctttgaattcagtgaagcatttcttcttcagatccatgagcatattcattcatgccagtttggaaacttccttggaaattgtcagaaggaaagagaagagctcaagttgaaggagaagacttattccctgtggccatttcttttggaagaccaaaagaagtacttaaatcctctctacagttccgaatctcacagatttacagttttggagccaaatacagtatctttcaattttaagttttggaggaacatgtaccatcagtttgatcgaacactgcatcctaggcagtctgtatttaatataattatgaatatgaatgagcaaaataaacaattagagaaagatattaaagacctagaatctaaaattaaacaacgcaaaaataagcaaacagatggcatcctcaccaaggaattgttacattcagttcatcctgaatcacctaacctcaaaacttccctgtgttttaaagagcagactctgctacccgtaaatgatgctcttcgaactatagagggcagcagcccggcagataatcgttatagtgaatatgcagaagagttttctaaatcagaacctgctgtggtcagcttagagtatggtgtggcaagaatgacttgttagactcatagagttttttctgcaatgattgcagtacaagaaaaggattattgtgaggatggtctgtaagcataaccaaaaggaatttgtctaataacaattttagggtttaacagtaggctaatagttgaaggaaggataataactacccttgtgagagaaatatgtcattttaattgcatttccagcaaggaatgacattcagttctgtaagaaatgagtggtatttgatgtatttactcaaaacacaatttgcactgtacactagtgaattgacgtttatgatttatgttaattcagccaaacataaataaccttccttaagtacaatttaacttcaagaaaacaaaatttgacaacatagtttcttaataaatgatatggcatgtactttcaattatgtagctttgtaactatgaatatttacatattttgccttttagtgatatttaatgttaaagtgccatgaaaaatatttctaagaaagccttaaattcccagtggattctttacccttaagttttacagcctacaacaagattttttgttttgtttttcttctggtcagccttgttttgtttgtaaagaattgtgctctcattactgctgggggtgcatgctacaatacttctatataaacacttgtagaagtacactgttcacgtttagcctgccccacttttgtattcaaaattaatgaaactgaaggtttattctgatcataatttgtttagtgctacatttgataatttattatttacagcttagaatattgatttcttgaatacgtataagcacatttgactgtcttttatatatggattactgcattccattgattcttattttgtggttggctttatttctttcacaactgtgtaagtttaaagagctaaagctctaaaactgttctgagaaacaatgaatagtacatgtatatgtatatttttaaactgccttattgctcaatgagttgctgttcctggagtatctaactttcagtttactcaaaaacttttgggtaaataaaaaagggaagtacagatagtttaggttgtgcatggttgcatgaattttgaagtcatttctatgtggagcattatttttcttcttgttaaatatagaaaaaaaaagagattctagtacaaagttactgtttaacaaaagcaacataaactctgggaaagatttcattttgccatgttatatttactgtttattctgtgtactagtacatatctttaaattaccaaaaaacaagaaacaaaacataaaaaccccaaaactatcacttggaattagcaatatcacccaactggctttaaaattgaaaatttaaataacatggtggcatgaagtacaattcgagtattaggcaatttgcatagtgttcctcatgctactttctgttacacctctattatattagttttgaatataaacatctttttcagaccaaaaaaaactttattgtatgagagcttatcttatcctgtttatttttccaatgcttttctgtaatacattatgtaatttaaaaaatattcctttttaaacagcaacagaaatgcactataaaatatagtatgtgattaaccaatcctgcttccatatttaagcactgggaatggaaacttaatctctgtgactacaaagggaagtttttgtgccttggtgttccagtcactgattgtggttttagaatcttctgtggctgacttcttgtattcaactctggtttattatcttaatcttcaacttcagacatacatttgtgtgtttatatgctcacaggtggactgagaaatcagttacatcttaagtgacctacagggtatatgttggcaaaagcagactgtgtatatgtcttataaagttgaatttatgttcagtgtgtttggaagtgtatagcatgtaaattatttcatatatgatttaaaggtaattaaatgttcacattttactttgaatgtttttcttctggataaaacaaatggaatcaaaaaaaaaaagtcgacgcggccgcg

SEQ ID NO: 388168 - DNA, 1568 bp, Homo sapiens
tttcgttatgtgatatccctctacaggatgagttttaatggatgctggtgctaacatcgtatgaaattgaggtaggaggcgggactctgacaccagaccagattgaggactagctaatcatcatactttacataaggaatccgtaggattggagagttgattgtttcaaataaggctggtttccttatttggttatttccttagaataataactccaaatctgattatttccttagaatacattcttatgagtagaactgcagctcaaactaaatttggtgctgtccagtggtatggcgatggacttcagaacatcctccactcttgccctcaccccacaagaaccctttactcgggatccattctcacgcagtcttcctccccgaccgccccgcgcgtccgctcggcgggatgacaaagaccgcctcgggtggggtggtgagcagtaccggcctcctccagcagggggcgctgtgggatccgccgctgtccgggacgaaccagcaagccgctctcggtccacacacgctctgtctgcctgccccgagtcccccgggaggccgcggggtttggggaagtgtttctaggagacggcgctcaccggctgcacctgcgccgttgacgccaccggggccggcagacagacccgcggcgctggctggtggagggagttcccgcttgctctctgtcgctgtcaccgccctgtttctgtagccgtatggtacgcctgtgagaccggctgccggctgacgtctccttgcgatggagcatatccggacgaccaaggtcgaacaagtaaaattacttgaccgattcagtaccagcaacaagtcattaacaggaacactgtatcttacggctacacatctattatttatcgactctcatcaaaaagaaacctggatattacaccaccatattgcctcagtagagaaacttgctttgactacttctggatgcccccttgtgatacagtgcaagaacttcagaactgtgcatttcattgttcccagagaaagagattgccatgatatttacaactctttgctacaactgtcaaaacaagcaaaatatgaagatctctatgcattttcttataatcccaaacaaaatgattcagaacgactacaaggctggcagctcattgatctcgctgaggaatataagaggatgggagtgccaaactcacactggcagttgtctgatgccaaccgggactacaagatttgtgaaacttaccccagagaactttatgttccccggatagcaagcaaaccaataattgttggtagttccaagttccggagcaagggaagattcccagttctttcctactatcatcaagataaggagggtggcaattgtcgatggagtctagccacctctctgggaatcagggcccaagtgccctggaagggagaaaacatttggcttctaggcccatataggtaaaaggccaaatccaaggtcatacggtgtaaatagtacccgctcagagggatacccaagccctaaaaccgaatatggcaaaggggcccaacagaaacaagtcgggacaaaagggttct

SEQ ID NO: 388169 - DNA, 4588 bp, Homo sapiens
tttcgttatgtgatatccctctacaggatgagttttaatggatgctggtgctaacatcgtatgaaattgaggtaggaggcgggactctgacaccagaccagattgaggactagctaatcatcatactttacataaggaatccgtaggattggagagttgattgtttcaaataaggctggtttccttatttggttatttccttagaataataactccaaatctgattatttccttagaatacattcttatgagtagaactgcagctcaaactaaatttggtgctgtccagtggtatggcgatggacttcagaacatcctccactcttgccctcaccccacaagaaccctttactcgggatccattctcacgcagtcttcctccccgaccgccccgcgcgtccgctcggcgggatgacaaagaccgcctcgggtggggtggtgagcagtaccggcctcctccagcagggggcgctgtgggatccgccgctgtccgggacgaaccagcaagccgctctcggtccacacacgctctgtctgcctgccccgagtcccccgggaggccgcggggtttggggaagtgtttctaggagacggcgctcaccggctgcacctgcgccgttgacgccaccggggccggcagacagacccgcggcgctggctggtggagggagttcccgcttgctctctgtcgctgtcaccgccctgtttctgtagccgtatggtacgcctgtgagaccggctgccggctgacgtctccttgcgatggagcatatccggacgaccaaggtcgaacaagtaaaattacttgaccgattcagtaccagcaacaagtcattaacaggaacactgtatcttacggctacacatctattatttatcgactctcatcaaaaagaaacctggatattacaccaccatattgcctcagtagagaaacttgctttgactacttctggatgcccccttgtgatacagtgcaagaacttcagaactgtgcatttcattgttcccagagaaagagattgccatgatatttacaactctttgctacaactgtcaaaacaagcaaaatatgaagatctctatgcattttcttataatcccaaacaaaatgattcagaacgactacaaggctggcagctcattgatctcgctgaggaatataagaggatgggagtgccaaactcacactggcagttgtctgatgccaaccgggactacaagatttgtgaaacttaccccagagaactttatgttccccggatagcaagcaaaccaataattgttggtagttccaagttccggagcaagggaagattcccagttctttcctactatcatcaagataaggaggctgccatttgtcgatgtagtcagccactctctggattcagtgccaggtgcctggaggatgaacatttgcttcaagccattagtaaagccaatccagtcaatcgctatatgtacgtcatggataccaggccaaaactgaatgcaatggccaacagagcagctggaaaaggttatgaaaatgaagacaactattccaatattagatttcagtttgttggaattgaaaatattcatgtcatgaggtccagccttcagaaattattggaagtcaatggcactaaagggctttctgtcaatgatttctactccggtttggagagctcgggatggcttcgccatatcaaagctgttatggatgctgcagtcttcttggccaaagcaataacagttgaaaatgcaagtgtgtcggtgcattgttccgatggttgggataggacttcccaggtttgttccctgggttctcttttattggattcctactacaggacaatcaaaggattcatggttttaatagaaaaggattggatctcttttggacataaattttcagagaggtgtggccagttggatggtgacccaaaggaagtctcaccagtgtttactcagttcttggaatgtgtgtggcatttgaccgaacagtttccacaagcctttgaattcagtgaagcatttcttcttcagatccatgagcatattcattcatgccagtttggaaacttccttggaaattgtcagaaggaaagagaagagctcaagttgaaggagaagacttattccctgtggccatttcttttggaagaccaaaagaagtacttaaatcctctctacagttccgaatctcacagatttacagttttggagccaaatacagtatctttcaattttaagttttggaggaacatgtaccatcagtttgatcgaacactgcatcctaggcagtctgtatttaatataattatgaatatgaatgagcaaaataaacaattagagaaagatattaaagacctagaatctaaaattaaacaacgcaaaaataagcaaacagatggcatcctcaccaaggaattgttacattcagttcatcctgaatcacctaacctcaaaacttccctgtgttttaaagagcagactctgctacccgtaaatgatgctcttcgaactatagagggcagcagcccggcagataatcgttatagtgaatatgcagaagagttttctaaatcagaacctgctgtggtcagcttagagtatggtgtggcaagaatgacttgttagactcatagagttttttctgcaatgattgcagtacaagaaaaggattattgtgaggatggtctgtaagcataaccaaaaggaatttgtctaataacaattttagggtttaacagtaggctaatagttgaaggaaggataataactacccttgtgagagaaatatgtcattttaattgcatttccagcaaggaatgacattcagttctgtaagaaatgagtggtatttgatgtatttactcaaaacacaatttgcactgtacactagtgaattgacgtttatgatttatgttaattcagccaaacataaataaccttccttaagtacaatttaacttcaagaaaacaaaatttgacaacatagtttcttaataaatgatatggcatgtactttcaattatgtagctttgtaactatgaatatttacatattttgccttttagtgatatttaatgttaaagtgccatgaaaaatatttctaagaaagccttaaattcccagtggattctttacccttaagttttacagcctacaacaagattttttgttttgtttttcttctggtcagccttgttttgtttgtaaagaattgtgctctcattactgctgggggtgcatgctacaatacttctatataaacacttgtagaagtacactgttcacgtttagcctgccccacttttgtattcaaaattaatgaaactgaaggtttattctgatcataatttgtttagtgctacatttgataatttattatttacagcttagaatattgatttcttgaatacgtataagcacatttgactgtcttttatatatggattactgcattccattgattcttattttgtggttggctttatttctttcacaactgtgtaagtttaaagagctaaagctctaaaactgttctgagaaacaatgaatagtacatgtatatgtatatttttaaactgccttattgctcaatgagttgctgttcctggagtatctaactttcagtttactcaaaaacttttgggtaaataaaaaagggaagtacagatagtttaggttgtgcatggttgcatgaattttgaagtcatttctatgtggagcattatttttcttcttgttaaatatagaaaaaaaaagagattctagtacaaagttactgtttaacaaaagcaacataaactctgggaaagatttcattttgccatgttatatttactgtttattctgtgtactagtacatatctttaaattaccaaaaaacaagaaacaaaacataaaaaccccaaaactatcacttggaattagcaatatcacccaactggctttaaaattgaaaatttaaataacatggtggcatgaagtacaattcgagtattaggcaatttgcatagtgttcctcatgctactttctgttacacctctattatattagttttgaatataaacatctttttcagaccaaaaaaaactttattgtatgagagcttatcttatcctgtttatttttccaatgcttttctgtaatacattatgtaatttaaaaaatattcctttttaaacagcaacagaaatgcactataaaatatagtatgtgattaaccaatcctgcttccatatttaagcactgggaatggaaacttaatctctgtgactacaaagggaagtttttgtgccttggtgttccagtcactgattgtggttttagaatcttctgtggctgacttcttgtattcaactctggtttattatcttaatcttcaacttcagacatacatttgtgtgtttatatgctcacaggtggactgagaaatcagttacatcttaagtgacctacagggtatatgttggcaaaagcagactgtgtatatgtcttataaagttgaatttatgttcagtgtgtttggaagtgtatagcatgtaaattatttcatatatgatttaaaggtaattaaatgttcacatttta

SEQ ID NO: 388170 - DNA, 5660 bp, Homo sapiens
tttcgttatgtgatatccctctacaggatgagttttaatggatgctggtgctaacatcgtatgaaattgaggtaggaggcgggactctgacaccagaccagattgaggactagctaatcatcatactttacataaggaatccgtaggattggagagttgattgtttcaaataaggctggtttccttatttggttatttccttagaataataactccaaatctgattatttccttagaatacattcttatgagtagaactgcagctcaaactaaatttggtgctgtccagtggtatggcgatggacttcagaacatcctccactcttgccctcaccccacaagaaccctttactcgggatccattctcacgcagtcttcctccccgaccgccccgcgcgtccgctcggcgggatgacaaagaccgcctcgggtggggtggtgagcagtaccggcctcctccagcagggggcgctgtgggatccgccgctgtccgggacgaaccagcaagccgctctcggtccacacacgctctgtctgcctgccccgagtcccccgggaggccgcggggtttggggaagtgtttctaggagacggcgctcaccggctgcacctgcgccgttgacgccaccggggccggcagacagacccgcggcgctggctggtggagggagttcccgcttgctctctgtcgctgtcaccgccctgtttctgtagccgtatggtacgcctgtgagaccggctgccggctgacgtctccttgcgatggagcatatccggacgaccaaggtcgaacaagtaaaattacttgaccgattcagtaccagcaacaagtcattaacaggaacactgtatcttacggctacacatctattatttatcgactctcatcaaaaagaaacctggatattacaccaccatattgcctcagtagagaaacttgctttgactacttctggatgcccccttgtgatacagtgcaagaacttcagaactgtgcatttcattgttcccagagaaagagattgccatgatatttacaactctttgctacaactgtcaaaacaagcaaaatatgaagatctctatgcattttcttataatcccaaacaaaatgattcagaacgactacaaggctggcagctcattgatctcgctgaggaatataagaggatgggagtgccaaactcacactggcagttgtctgatgccaaccgggactacaagatttgtgaaacttaccccagagaactttatgttccccggatagcaagcaaaccaataattgttggtagttccaagttccggagcaagggaagattcccagttctttcctactatcatcaagataaggaggctgccatttgtcgatgtagtcagccactctctggattcagtgccaggtgcctggaggatgaacatttgcttcaagccattagtaaagccaatccagtcaatcgctatatgtacgtcatggataccaggccaaaactgaatgcaatggccaacagagcagctggaaaaggttatgaaaatgaagacaactattccaatattagatttcagtttgttggaattgaaaatattcatgtcatgaggtccagccttcagaaattattggaagtcaatggcactaaagggctttctgtcaatgatttctactccggtttggagagctcgggatggcttcgccatatcaaagctgttatggatgctgcagtcttcttggccaaagcaataacagttgaaaatgcaagtgtgtcggtgcattgttccgatggttgggataggacttcccaggtttgttccctgggttctcttttattggattcctactacaggacaatcaaaggattcatggttttaatagaaaaggattggatctcttttggacataaattttcagagaggtgtggccagttggatggtgacccaaaggaagtctcaccagtgtttactcagttcttggaatgtgtgtggcatttgaccgaacagtttccacaagcctttgaattcagtgaagcatttcttcttcagatccatgagcatattcattcatgccagtttggaaacttccttggaaattgtcagaaggaaagagaagagctcaagttgaaggagaagacttattccctgtggccatttcttttggaagaccaaaagaagtacttaaatcctctctacagttccgaatctcacagatttacagttttggagccaaatacagtatctttcaattttaagttttggaggaacatgtaccatcagtttgatcgaacactgcatcctaggcagtctgtatttaatataattatgaatatgaatgagcaaaataaacaattagagaaagatattaaagacctagaatctaaaattaaacaacgcaaaaataagcaaacagatggcatcctcaccaaggaattgttacattcagttcatcctgaatcacctaacctcaaaacttccctgtgttttaaagagcagactctgctacccgtaaatgatgctcttcgaactatagagggcagcagcccggcagataatcgttatagtgaatatgcagaagagttttctaaatcagaacctgctgtggtcagcttagagtatggtgtggcaagaatgacttgttagactcatagagttttttctgcaatgattgcagtacaagaaaaggattattgtgaggatggtctgtaagcataaccaaaaggaatttgtctaataacaattttagggtttaacagtaggctaatagttgaaggaaggataataactacccttgtgagagaaatatgtcattttaattgcatttccagcaaggaatgacattcagttctgtaagaaatgagtggtatttgatgtatttactcaaaacacaatttgcactgtacactagtgaattgacgtttatgatttatgttaattcagccaaacataaataaccttccttaagtacaatttaacttcaagaaaacaaaatttgacaacatagtttcttaataaatgatatggcatgtactttcaattatgtagctttgtaactatgaatatttacatattttgccttttagtgatatttaatgttaaagtgccatgaaaaatatttctaagaaagccttaaattcccagtggattctttacccttaagttttacagcctacaacaagattttttgttttgtttttcttctggtcagccttgttttgtttgtaaagaattgtgctctcattactgctgggggtgcatgctacaatacttctatataaacacttgtagaagtacactgttcacgtttagcctgccccacttttgtattcaaaattaatgaaactgaaggtttattctgatcataatttgtttagtgctacatttgataatttattatttacagcttagaatattgatttcttgaatacgtataagcacatttgactgtcttttatatatggattactgcattccattgattcttattttgtggttggctttatttctttcacaactgtgtaagtttaaagagctaaagctctaaaactgttctgagaaacaatgaatagtacatgtatatgtatatttttaaactgccttattgctcaatgagttgctgttcctggagtatctaactttcagtttactcaaaaacttttgggtaaataaaaaagggaagtacagatagtttaggttgtgcatggttgcatgaattttgaagtcatttctatgtggagcattatttttcttcttgttaaatatagaaaaaaaaagagattctagtacaaagttactgtttaacaaaagcaacataaactctgggaaagatttcattttgccatgttatatttactgtttattctgtgtactagtacatatctttaaattaccaaaaaacaagaaacaaaacataaaaaccccaaaactatcacttggaattagcaatatcacccaactggctttaaaattgaaaatttaaataacatggtggcatgaagtacaattcgagtattaggcaatttgcatagtgttcctcatgctactttctgttacacctctattatattagttttgaatataaacatctttttcagaccaaaaaaaactttattgtatgagagcttatcttatcctgtttatttttccaatgcttttctgtaatacattatgtaatttaaaaaatattcctttttaaacagcaacagaaatgcactataaaatatagtatgtgattaaccaatcctgcttccatatttaagcactgggaatggaaacttaatctctgtgactacaaagggaagtttttgtgccttggtgttccagtcactgattgtggttttagaatcttctgtggctgacttcttgtattcaactctggtttattatcttaatcttcaacttcagacatacatttgtgtgtttatatgctcacaggtggactgagaaatcagttacatcttaagtgacctacagggtatatgttggcaaaagcagactgtgtatatgtcttataaagttgaatttatgttcagtgtgtttggaagtgtatagcatgtaaattatttcatatatgatttaaaggtaattaaatgttcacattttactttgaatgtttttcttctggataaaacaaatggaatcaagttgtagttgttttttttttcttctcacctaggcaagtagacttgcccattacattaacataacagcataaggtttgaggagtttattttccaaaagttgttgataaataatacctgtttcatacaaaaataatttccagaatatttaaaataggtatagtgggctaaaaggcccatcagatgtaggtaataatgtcattaagttttcattttgttcctgtcacttgcttatattacaatcactatttttttgtgcccttgccaacttgatggaaggcagggtccattgagtacaaacattcgaggtgaaatgtctctccaaaggcagatctggatgtaaatatgaggaagaaaataactggctgacaagaggataattttattgagggtgttttgaaaaggtcagctaggctagaagtagctcagggaatcttgagtaaagatgaagggaactcttttaaaacaaattcaatttatttggtcgggtagcagagcagggaggtggtgtcagtcaagcctgttttgaaacattttttgcagaaggtcagctttaaaatattgaaaaatttccagttgacatgctaagttggattaaatgctgatcatttataaaactatatagttgctgcaaaagtaattggggcttttgccattgaaagtgatgacaaaaaccgcaattacttttgcaccaacctaatactacagttgcagacttttattagtgacgctgatcttcattagtcaagttttagttattttgttggcttttccatgtagaattccaagtgacattaacatactttgattaaagaaaatttggagactgtttaagatatatgtctagatatcaatgtaaactataagctttaggaacttacatctagaagaaagcctggaatctagaataattatctcaaaaaaaagtatatataccattgtacttgatataagaaaatgtaaacatgaaaccttgacattttaataaacagtatttgtgctactctagttatttctaggaaagtaaaatatcca

SEQ ID NO: 388171 - DNA, 1387 bp, Homo sapiens
tttcgttatgtgatatccctctacaggatgagttttaatggatgctggtgctaacatcgtatgaaattgaggtaggaggcgggactctgacaccagaccagattgaggactagctaatcatcatactttacataaggaatccgtaggattggagagttgattgtttcaaataaggctggtttccttatttggttatttccttagaataataactccaaatctgattatttccttagaatacattcttatgagtagaactgcagctcaaactaaatttggtgctgtccagtggtatggcgatggacttcagaacatcctccactcttgccctcaccccacaagaaccctttactcgggatccattctcacgcagtcttcctccccgaccgccccgcgcgtccgctcggcgggatgacaaagaccgcctcgggtggggtggtgagcagtaccggcctcctccagcagggggcgctgtgggatccgccgctgtccgggacgaaccagcaagccgctctcggtccacacacgctctgtctgcctgccccgagtcccccgggaggccgcggggtttggggaagtgtttctaggagacggcgctcaccggctgcacctgcgccgttgacgccaccggggccggcagacagacccgcggcgctggctggtggagggagttcccgcttgctctctgtcgctgtcaccgccctgtttctgtagccgtatggtacgcctgtgagaccggctgccggctgacgtctccttgcgatggagcatatccggacgaccaaggtcgaacaagtaaaattacttgaccgattcagtaccagcaacaagtcattaacaggaacactgtatcttacggctacacatctattatttatcgactctcatcaaaaagaaacctggatattacaccaccatattgcctcagtagagaaacttgctttgactacttctggatgcccccttgtgatacagtgcaagaacttcagaactgtgcatttcattgttcccagagaaagagattgccatgatatttacaactctttgctacaactgtcaaaacaagcaaaatatgaagatctctatgcattttcttataatcccaaacaaaatgattcagaacgactacaaggctggcagctcattgatctcgctgaggaatataagaggatgggagtgccaaactcacactggcagttgtctgatgccaaccgggactacaaggcgcctgccaccatgcccagccaatttttgtatttctagtagagacagggttttaccgtgttggctagtctggtcttgaactcctgacgtcaagtgatccacccgcctcggcctcccaaagtgctaagattacaggtgtgagccactgcgccctgcttgttct

SEQ ID NO: 388172 - DNA, 327 bp, Homo sapiens
ggagaggaaggattgggaggagcctgcagtctgtggtggggactgtctccaccttagaacaagtgggattgagcaacaaggatacccagggatttgggtccacattaagcccagtcttcacccgactgcttccctgtgacccaggggatctttagtgatgactttcaacagatttgagaaggaaaatggagatgccactagatggaaggcctgaggatggtgtctcactcctccaagctgtatcccttacctatctacccatgagcttgccagcaacctccccccgctcccacatctgtcatttcctttaactgcccacagatcttc

SEQ ID NO: 388173 - DNA, 424 bp, Homo sapiens
cgggtgtgagtaggaatccagtgactcagaattcctgagctgaccaaatcctggggctacactctgacctcagatgccctcagaaaggccccttccttggagtagcaaggggtgcttaagaaagtgagtcagaagttgtcactaattagctgggtgatcttaggtagagctcatcacctctctgggctcagtttcctcatatattaagtaacgaaggtgagttaaaaagtctgcttagaacttttcctcatttactgctcaatgagtcagtaatgtcagaactcgggctaaaaggaatagtagagacctaaatcagatttatttcaaacatgtaactaactcaacagagaagcgcaattctgctgaccatctatgagaattttctggaattgtctcaatttaaaatactgtagtttattttcct

SEQ ID NO: 388174 - DNA, 268 bp, Homo sapiens
gtcattgttgggcctttaggttgattctgtgtctttgctgcagtgaacattcacaatcacaagcgtgtgtctttatggtagaatgatttatatttgtctgggtatataaccagtaatgggattgctgtgcaatcccctttttctacgtgggttgaattgactgacttctaaagacaagactatgacagaagtgatggtttgtcacttttgagatgaggttacaaaatactgcaggttccgttttagatgcagtgactctttctggcct

SEQ ID NO: 388175 - DNA, 3343 bp, Homo sapiens
ctgagactggacctgaggagacctcagcctcggtgctcgggccgccccgcctctgccggaaagtccgcgccgccgctgccgccaccgtccgcagcccgagcgccccggagccgcaggccgccgccgcgcagagacgccgcggctgcgactaggcgcgcccagccgcacgtggcggacccgcccccaggcccgcagtgtcctggaccccgcaggcctccgctctcctgtcctcggccccgtccccagggccgcgatgagcttcctgagccgacagcagccgccgccaccccgccgcgccggggcggcctgcaccttgcggcagaagctgatcttctcgccctgcagcgactgtgaggaggaggaagaagaggaggaggaggagggcagcggccacagcaccggggaggactcggcctttcaagagcccgactcgccgctgccgcccgcgcggagccccacggagcccgggcccgagcgccgccgctcgcccgggccggcccccgggagccccggcgagctggaggaggacctgttgctgcccggcgcctgcccgggcgcggacgaggcgggcggtggggcggagggcgactcgtgggaggaggagggcttcggctcctcgtcgccggtcaagtcgccggcggccccctacttcctgggtagctctttctcgccggtgcgctgcggcggcccaggagatgcgtcgccgcggggttgcggggcgcgccgggcgggcgaaggccgccgctcgccgcggccggaccacccgggcaccccgccacacaagaccttccgcaagctgcgactcttcgacaccccgcacacgcccaagagtttgctctccaaagctcggggaattgattccagctctgttaaactccggggtagttctctcttcatggatacagaaaaatcaggaaaaagggaatttgatgtgcgacagactcctcaagtgaatattaatccttttactccggattctttgttgcttcattcctcaggacagtgtcgtcgtagaaagagaacgtattggaatgattcctgtggtgaagacatggaagccagtgattatgagcttgaagatgaaacaagacctgctaagagaattacaattactgaaagcaatatgaagtcccggtatacaacagaatttcatgagctagagaaaatcggctctggagaatttggttctgtatttaagtgtgtgaagaggctggatggatgcatttatgccattaagcgatcaaaaaagccattggcgggctctgttgatgagcagaacgctttgagagaagtatatgctcatgcagtgcttggacagcattctcatgtagttcgatatttctctgcgtgggcagaagatgatcatatgcttatacagaatgaatattgtaatggtggaagtttagctgatgctataagtgaaaactacagaatcatgagttactttaaagaagcagagttgaaggatctccttttgcaagttggccgaggcttgaggtatattcattcaatgtctttggttcacatggatataaaacctagtaatattttcatatctcgaacctcaatcccaaatgctgcctctgaagaaggagacgaagatgattgggcatccaacaaagttatgtttaaaataggtgatcttgggcatgtaacaaggatctccagtccacaagttgaagagggcgatagtcgttttcttgcaaatgaagttttacaggagaattatacccatctaccaaaagcagatatttttgcgcttgccctcacagtggtatgtgctgctggtgctgaacctcttccgagaaatggagatcaatggcatgaaatcagacagggtagattacctcggataccacaagtgctttcccaagaatttacagagttgctaaaagttatgattcatccagatccagagagaagaccttcagcaatggcactggtaaagcattcagtattgctgtccgcttctagaaagagtgcagaacaattacgaatagaattgaatgccgaaaagttcaaaaattcacttttacaaaaagaactcaagaaagcacagatggcaaaagctgcagctgaggaaagagcactcttcactgaccggatggccactaggtccaccacccagagtaatagaacatctcgacttattggaaagaaaatgaaccgctctgtcagccttactatatactgagctactcctttcccacctccccctgaacactgtgacaagaggaagctaggttgaaatcactgatagaatccagtttgcaattactttctcgattggtgtcagtagttttactgattaggacttttattgtgaattacagttgaaagctgtattttgatgattgctatgtcaggctttcatctaatcttaccagtctgtcttctgtaggatgtgtcactgttggatgttacaccagcctttccagggttaaccactgtggtggtgtgctgcttatagtttgctgttgcattgtaataaaaggtgtctttccctgtagtgacctgtaaaaagtactcaagggctttattacagacataccctccctttgaaaagggacatgctaaaagactcattactactcagccttcaatgtacctgtgtgtccatcttatatttcttttttttttaattgtgaattagacttgtatatcccactgggagcactttgtaggcattgcatgaaccatgggatgatgattctgtggaggtattgccttgtgaatttgctgctattttagttttgtctttgctgtaaacttgtagcattaaacaatcattgttgttaataggtcttctttttgaaacaattatgtgaaatgtatagctgcttttgatgaaaagcagctatttgccttttttttttttcctttgaactttgaagctagtgcattggaaaaatgcaccctttccctcctttggaatgctgtattaatgtagtataataattactggttttgtaacttgttctggtaatgtccttcccggactctttttaaatgtctccccctaagttttatacttgattgtattattagtctgtttttaaatgttttgcccggtttttctcttcaatatttgtgtatataaaccgatcttcgtgatactgtacatagctgtttgaaatgccagaatgacttctgacattccaagtttttcacaaaatatattttatctgtgattagccatttgactaataatactggctaacagatgttgaaaaaaattgtctgtttgttttctcattaattttggtctaaaacatgtttgcacttgtctttgacttgtgttttattaacattgattggcatattaaaagtcactctgagctta

SEQ ID NO: 388176 - DNA, 3368 bp, Homo sapiens
ctgagactggacctgaggagacctcagcctcggtgctcgggccgccccgcctctgccggaaagtccgcgccgccgctgccgccaccgtccgcagcccgagcgccccggagccgcaggccgccgccgcgcagagacgccgcggctgcgactaggcgcgcccagccgcacgtggcggacccgcccccaggcccgcagtgtcctggaccccgcaggcctccgctctcctgtcctcggccccgtccccagggccgcgatgagcttcctgagccgacagcagccgccgccaccccgccgcgccggggcggcctgcaccttgcggcagaagctgatcttctcgccctgcagcgactgtgaggaggaggaagaagaggaggaggaggagggcagcggccacagcaccggggaggactcggcctttcaagagcccgactcgccgctgccgcccgcgcggagccccacggagcccgggcccgagcgccgccgctcgcccgggccggcccccgggagccccggcgagctggaggaggacctgttgctgcccggcgcctgcccgggcgcggacgaggcgggcggtggggcggagggcgactcgtgggaggaggagggcttcggctcctcgtcgccggtcaagtcgccggcggccccctacttcctgggtagctctttctcgccggtgcgctgcggcggcccaggagatgcgtcgccgcggggttgcggggcgcgccgggcgggcgaaggccgccgctcgccgcggccggaccacccgggcaccccgccacacaagaccttccgcaagctgcgactcttcgacaccccgcacacgcccaagagtttgctctccaaagctcggggaattgattccagctctgttaaactccggggtagttctctcttcatggatacagaaaaatcaggaaaaagggaatttgatgtgcgacagactcctcaagtgaatattaatccttttactccggattctttgttgcttcattcctcaggacagtgtcgtcgtagaaagagaacgtattggaatgattcctgtggtgaagacatggaagccagtgattatgagcttgaagatgaaacaagacctgctaagagaattacaattactgaaagcaatatgaagtcccggtatacaacagaatttcatgagctagagaaaatcggctctggagaatttggttctgtatttaagtgtgtgaagaggctggatggatgcatttatgccattaagcgatcaaaaaagccattggcgggctctgttgatgagcagaacgctttgagagaagtatatgctcatgcagtgcttggacagcattctcatgtagttcgatatttctctgcgtgggcagaagatgatcatatgcttatacagaatgaatattgtaatggtggaagtttagctgatgctataagtgaaaactacagaatcatgagttactttaaagaagcagagttgaaggatctccttttgcaagttggccgaggcttgaggtatattcattcaatgtctttggttcacatggatataaaacctagtaatattttcatatctcgaacctcaatcccaaatgctgcctctgaagaaggagacgaagatgattgggcatccaacaaagttatgtttaaaataggtgatcttgggcatgtaacaaggatctccagtccacaagttgaagagggcgatagtcgttttcttgcaaatgaagttttacaggagaattatacccatctaccaaaagcagatatttttgcgcttgccctcacagtggtatgtgctgctggtgctgaacctcttccgagaaatggagatcaatggcatgaaatcagacagggtagattacctcggataccacaagtgctttcccaagaatttacagagttgctaaaagttatgattcatccagatccagagagaagaccttcagcaatggcactggtaaagcattcagtattgctgtccgcttctagaaagagtgcagaacaattacgaatagaattgaatgccgaaaagttcaaaaattcacttttacaaaaagaactcaagaaagcacagatggcaaaagctgcagctgaggaaagagcactcttcactgaccggatggccactaggtccaccacccagagtaatagaacatctcgacttattggaaagaaaatgaaccgctctgtcagccttactatatactgagctactcctttcccacctccccctgaacactgtgacaagaggaagctaggttgaaatcactgatagaatccagtttgcaattactttctcgattggtgtcagtagttttactgattaggacttttattgtgaattacagttgaaagctgtattttgatgattgctatgtcaggctttcatctaatcttaccagtctgtcttctgtaggatgtgtcactgttggatgttacaccagcctttccagggttaaccactgtggtggtgtgctgcttatagtttgctgttgcattgtaataaaaggtgtctttccctgtagtgacctgtaaaaagtactcaagggctttattacagacataccctccctttgaaaagggacatgctaaaagactcattactactcagccttcaatgtacctgtgtgtccatcttatatttcttttttttttaattgtgaattagacttgtatatcccactgggagcactttgtaggcattgcatgaaccatgggatgatgattctgtggaggtattgccttgtgaatttgctgctattttagttttgtctttgctgtaaacttgtagcattaaacaatcattgttgttaataggtcttctttttgaaacaattatgtgaaatgtatagctgcttttgatgaaaagcagctatttgccttttttttttttcctttgaactttgaagctagtgcattggaaaaatgcaccctttccctcctttggaatgctgtattaatgtagtataataattactggttttgtaacttgttctggtaatgtccttcccggactctttttaaatgtctccccctaagttttatacttgattgtattattagtctgtttttaaatgttttgcccggtttttctcttcaatatttgtgtatataaaccgatcttcgtgatactgtacatagctgtttgaaatgccagaatgacttctgacattccaagtttttcacaaaatatattttatctgtgattagccatttgactaataatactggctaacagatgttgaaaaaaattgtctgtttgttttctcattaattttggtctaaaacatgtttgcacttgtctttgacttgtgttttattaacattgattggcatattaaaagtcactctgagcttaaaaaaaaacaaaaagggcggccgct

SEQ ID NO: 388177 - DNA, 3176 bp, Homo sapiens
ctgagactggacctgaggagacctcagcctcggtgctcgggccgccccgcctctgccggaaagtccgcgccgccgctgccgccaccgtccgcagcccgagcgccccggagccgcaggccgccgccgcgcagagacgccgcggctgcgactaggcgcgcccagccgcacgtggcggacccgcccccaggcccgcagtgtcctggaccccgcaggcctccgctctcctgtcctcggccccgtccccagggccgcgatgagcttcctgagccgacagcagccgccgccaccccgccgcgccggggcggcctgcaccttgcggcagaagctgatcttctcgccctgcagcgactgtgaggaggaggaagaagaggaggaggaggagggcagcggccacagcaccggggaggactcggcctttcaagagcccgactcgccgctgccgcccgcgcggagccccacggagcccgggcccgagcgccgccgctcgcccgggccggcccccgggagccccggcgagctggaggaggacctgttgctgcccggcgcctgcccgggcgcggacgaggcgggcggtggggcggagggcgactcgtgggaggaggagggcttcggctcctcgtcgccggtcaagtcgccggcggccccctacttcctgggtagctctttctcgccggtgcgctgcggcggcccaggagatgcgtcgccgcggggttgcggggcgcgccgggcgggcgaaggccgccgctcgccgcggccggaccacccgggcaccccgccacacaagaccttccgcaagctgcgactcttcgacaccccgcacacgcccaagagtttgctctccaaagctcggggaattgattccagctctgttaaactccggggtagttctctcttcatggatacagaaaaatcaggaaaaagggaatttgatgtgcgacagactcctcaagtgaatattaatccttttactccggattctttgttgcttcattcctcaggacagtgtcgtcgtagaaagagaacgtattggaatgattcctgtggtgaagacatggaagccagtgattatgagcttgaagatgaaacaagacctgctaagagaattacaattactgaaagcaatatgaagtcccggtatacaacagaatttcatgagctagagaaaatcggctctggagaatttggttctgtatttaagtgtgtgaagaggctggatggatgcatttatgccattaagcgatcaaaaaagccattggcgggctctgttgatgagcagaacgctttgagagaagtatatgctcatgcagtgcttggacagcattctcatgtagttcgatatttctctgcgtgggcagaagatgatcatatgcttatacagaatgaatattgtaatggtggaagtttagctgatgctataagtgaaaactacagaatcatgagttactttaaagaagcagagttgaaggatctccttttgcaagttggccgaggcttgaggtatattcattcaatgtctttggttcacatggatataaaacctagtaatattttcatatctcgaacctcaatcccaaatgctgcctctgaagaaggagacgaagatgattgggcatccaacaaagttatgtttaaaataggtgatcttgggcatgtaacaaggatctccagtccacaagttgaagagggcgatagtcgttttcttgcaaatgaagttttacaggagaattatacccatctaccaaaagcagatatttttgcgcttgccctcacagtggtatgtgctgctggtgctgaacctcttccgagaaatggagatcaatggcatgaaatcagacagggtagattacctcggataccacaagtgctttcccaagaatttacagagttgctaaaagttatgattcatccagatccagagagaagaccttcagcaatggcactggtaaagcattcagtattgctgtccgcttctagaaagagtgcagaacaattacgaatagaattgaatgccgaaaagttcaaaaattcacttttacaaaaagaactcaagaaagcacagatggcaaaagctgcagctgaggaaagagcactcttcactgaccggatggccactaggtccaccacccagagtaatagaacatctcgacttattggaaagaaaatgaaccgctctgtcagccttactatatactgagctactcctttcccacctccccctgaacactgtgacaagaggaagctaggttgaaatcactgatagaatccagtttgcaattactttctcgattggtgtcagtagttttactgattaggacttttattgtgaattacagttgaaagctgtattttgatgattgctatgtcaggctttcatctaatcttaccagtctgtcttctgtaggatgtgtcactgttggatgttacaccagcctttccagggttaaccactgtggtggtgtgctgcttatagtttgctgttgcattgtaataaaaggtgtctttccctgtagtgacctgtaaaaagtactcaagggctttattacagacataccctccctttgaaaagggacatgctaaaagactcattactactcagccttcaatgtacctgtgtgtccatcttatatttcttttttttttaattgtgaattagacttgtatatcccactgggagcactttgtaggcattgcatgaaccatgggatgatgattctgtggaggtattgccttgtgaatttgctgctattttagttttgtctttgctgtaaacttgtagcattaaacaatcattgttgttaataggtcttctttttgaaacaattatgtgaaatgtatagctgcttttgatgaaaagcagctatttgccttttttttttttcctttgaactttgaagctagtgcattggaaaaatgcaccctttccctcctttggaatgctgtattaatgtagtataataattactggttttgtaacttgttctggtaatgtccttcccggactctttttaaatgtctccccctaagttttatacttgattgtattattagtctgtttttaaatgttttgcccggtttttctcttcaatatttgtgtatataaaccgatcttcgtgatactgtacatagctgttgtaactggagctgttgtaactggagctgttgaacatggaggggcc

SEQ ID NO: 388178 - DNA, 2881 bp, Homo sapiens
  misc_feature (14)..(14): n is a, c, g, or t
ggtaccaccttctncccacgggggagattttatggggctctcggactgctttctatttttggatgggttgaaagaatttgttaacttttagccactagaatgaacttagttttaggcagcatttatattctttttagggttagaggcagattttacttggctatttttttcaagaaaagatagttaatatccagcttcagtcttcctaaattagccacaatttattttgcttgaactctaacaaaggcttgtgtgttgctttcacctacgcattcagccctatgaaaggctcgttgaaggttaggttgagaaggctgactataggacttggatcctaaaaattgtatttgtatttttctttccctagagtttgctctccaaagctcggggaattgattccagctctgttaaactccggggtagttctctcttcatggatacagaaaaatcaggaaaaagggaatttgatgtgcgacagactcctcaagtgaatattaatccttttactccggattctttgttgcttcattcctcaggacagtgtcgtcgtagaaagagaacgtattggaatgattcctgtggtgaagacatggaagccagtgattatgagcttgaagatgaaacaagacctgctaagagaattacaattactgaaagcaatatgaagtcccggtatacaacagaatttcatgagctagagaaaatcggctctggagaatttggttctgtatttaagtgtgtgaagaggctggatggatgcatttatgccattaagcgatcaaaaaagccattggcgggctctgttgatgagcagaacgctttgagagaagtatatgctcatgcagtgcttggacagcattctcatgtagttcgatatttctctgcgtgggcagaagatgatcatatgcttatacagaatgaatattgtaatggtggaagtttagctgatgctataagtgaaaactacagaatcatgagttactttaaagaagcagagttgaaggatctccttttgcaagttggccgaggcttgaggtatattcattcaatgtctttggttcacatggatataaaacctagtaatattttcatatctcgaacctcaatcccaaatgctgcctctgaagaaggagacgaagatgattgggcatccaacaaagttatgtttaaaataggtgatcttgggcatgtaacaaggatctccagtccacaagttgaagagggcgatagtcgttttcttgcaaatgaagttttacaggagaattatacccatctaccaaaagcagatatttttgcgcttgccctcacagtggtatgtgctgctggtgctgaacctcttccgagaaatggagatcaatggcatgaaatcagacagggtagattacctcggataccacaagtgctttcccaagaatttacagagttgctaaaagttatgattcatccagatccagagagaagaccttcagcaatggcactggtaaagcattcagtattgctgtccgcttctagaaagagtgcagaacaattacgaatagaattgaatgccgaaaagttcaaaaattcacttttacaaaaagaactcaagaaagcacagatggcaaaagctgcagctgaggaaagagcactcttcactgaccggatggccactaggtccaccacccagagtaatagaacatctcgacttattggaaagaaaatgaaccgctctgtcagccttactatatactgagctactcctttcccacctccccctgaacactgtgacaagaggaagctaggttgaaatcactgatagaatccagtttgcaattactttctcgattggtgtcagtagttttactgattaggacttttattgtgaattacagttgaaagctgtattttgatgattgctatgtcaggctttcatctaatcttaccagtctgtcttctgtaggatgtgtcactgttggatgttacaccagcctttccagggttaaccactgtggtggtgtgctgcttatagtttgctgttgcattgtaataaaaggtgtctttccctgtagtgacctgtaaaaagtactcaagggctttattacagacataccctccctttgaaaagggacatgctaaaagactcattactactcagccttcaatgtacctgtgtgtccatcttatatttcttttttttttaattgtgaattagacttgtatatcccactgggagcactttgtaggcattgcatgaaccatgggatgatgattctgtggaggtattgccttgtgaatttgctgctattttagttttgtctttgctgtaaacttgtagcattaaacaatcattgttgttaataggtcttctttttgaaacaattatgtgaaatgtatagctgcttttgatgaaaagcagctatttgccttttttttttttcctttgaactttgaagctagtgcattggaaaaatgcaccctttccctcctttggaatgctgtattaatgtagtataataattactggttttgtaacttgttctggtaatgtccttcccggactctttttaaatgtctccccctaagttttatacttgattgtattattagtctgtttttaaatgttttgcccggtttttctcttcaatatttgtgtatataaaccgatcttcgtgatactgtacatagctgtttgaaatgccagaatgacttctgacattccaagtttttcacaaaatatattttatctgtgattagccatttgactaataatactggctaacagatgttgaaaaaaattgtctgtttgttttctcattaattttggtctaaaacatgtttgcacttgtctttgacttgtgttttattaacattgattggcatattaaaagtcactctgagctta

SEQ ID NO: 388179 - DNA, 2405 bp, Homo sapiens
gtcgctctccaacgccagcgccgcctctcgctcgccgagctccagccgaaggagaaggggggacaggtcgtcgtagaaagagaacgtattggaatgattcctgtggtgaagacatggaagccagtgattatgagcttgaagatgaaacaagacctgctaagagaattacaattactgaaagcaatatgaagtcccggtatacaacagaatttcatgagctagagaaaatcggctctggagaatttggttctgtatttaagtgtgtgaagaggctggatggatgcatttatgccattaagcgatcaaaaaagccattggcgggctctgttgatgagcagaacgctttgagagaagtatatgctcatgcagtgcttggacagcattctcatgtagttcgatatttctctgcgtgggcagaagatgatcatatgcttatacagaatgaatattgtaatggtggaagtttagctgatgctataagtgaaaactacagaatcatgagttactttaaagaagcagagttgaaggatctccttttgcaagttggccgaggcttgaggtatattcattcaatgtctttggttcacatggatataaaacctagtaatattttcatatctcgaacctcaatcccaaatgctgcctctgaagaaggagacgaagatgattgggcatccaacaaagttatgtttaaaataggtgatcttgggcatgtaacaaggatctccagtccacaagttgaagagggcgatagtcgttttcttgcaaatgaagttttacaggagaattatacccatctaccaaaagcagatatttttgcgcttgccctcacagtggtatgtgctgctggtgctgaacctcttccgagaaatggagatcaatggcatgaaatcagacagggtagattacctcggataccacaagtgctttcccaagaatttacagagttgctaaaagttatgattcatccagatccagagagaagaccttcagcaatggcactggtaaagcattcagtattgctgtccgcttctagaaagagtgcagaacaattacgaatagaattgaatgccgaaaagttcaaaaattcacttttacaaaaagaactcaagaaagcacagatggcaaaagctgcagctgaggaaagagcactcttcactgaccggatggccactaggtccaccacccagagtaatagaacatctcgacttattggaaagaaaatgaaccgctctgtcagccttactatatactgagctactcctttcccacctccccctgaacactgtgacaagaggaagctaggttgaaatcactgatagaatccagtttgcaattactttctcgattggtgtcagtagttttactgattaggacttttattgtgaattacagttgaaagctgtattttgatgattgctatgtcaggctttcatctaatcttaccagtctgtcttctgtaggatgtgtcactgttggatgttacaccagcctttccagggttaaccactgtggtggtgtgctgcttatagtttgctgttgcattgtaataaaaggtgtctttccctgtagtgacctgtaaaaagtactcaagggctttattacagacataccctccctttgaaaagggacatgctaaaagactcattactactcagccttcaatgtacctgtgtgtccatcttatatttcttttttttttaattgtgaattagacttgtatatcccactgggagcactttgtaggcattgcatgaaccatgggatgatgattctgtggaggtattgccttgtgaatttgctgctattttagttttgtctttgctgtaaacttgtagcattaaacaatcattgttgttaataggtcttctttttgaaacaattatgtgaaatgtatagctgcttttgatgaaaagcagctatttgccttttttttttttcctttgaactttgaagctagtgcattggaaaaatgcaccctttccctcctttggaatgctgtattaatgtagtataataattactggttttgtaacttgttctggtaatgtccttcccggactctttttaaatgtctccccctaagttttatacttgattgtattattagtctgtttttaaatgttttgcccggtttttctcttcaatatttgtgtatataaaccgatcttcgtgatactgtacatagctgtttgaaatgccagaatgacttctgacattccaagtttttcacaaaatatattttatctgtgattagccatttgactaataatactggctaacagatgttgaaaaaaattgtctgtttgttttctcattaattttggtctaaaacatgtttgcacttgtctttgacttgtgttttattaacattgattggcatattaaaagtcactctgagctta

SEQ ID NO: 388180 - DNA, 1143 bp, Homo sapiens
  misc_feature (163)..(163): n is a, c, g, or t
ataatgtatagtgatgatgaagaaaagaagcatgaaaaatgaaaaaggcactgaacgcagaggaggcccgccttcttcatgtcaagggagaccatgcagattgatgagaggaagcggccttacaatagcatgtatgaaactcgagaacctactgaagaggaantggaggcatatagaatgaaacgtcagaggccagatgaccccatggcctctttccttggtcagtagcaactagtcagaagaccatccaagatagatgcagctgatacattcttttcagcttcttattgatgattgtagatagaaaaatccttgtttattcttcttgctgcctggctttaataaatatttcagatgcctcacagtaagttcactcctttccatactgaggaaacaagaaaagaagaagaggcacatgaagtgtgcttttgggaatagtttatgctgtacagcataaactattcccactgggagcactttgtaggcattgcatgaaccatgggatgatgattctgtggaggtattgccttgtgaatttgctgctattttagttttgtctttgctgtaaacttgtagcattaaacaatcattgttgttaataggtcttctttttgaaacaattatgtgaaatgtatagctgcttttgatgaaaagcagctatttgccttttttttttttcctttgaactttgaagctagtgcattggaaaaatgcaccctttccctcctttggaatgctgtattaatgtagtataataattactggttttgtaacttgttctggtaatgtccttcccggactctttttaaatgtctccccctaagttttatacttgattgtattattagtctgtttttaaatgttttgcccggtttttctcttcaatatttgtgtatataaaccgatcttcgtgatactgtacatagctgtttgaaatgccagaatgacttctgacattccaagtttttcacaaaatatattttatctgtgattagccatttgactaataatactggctaacagatgttgaaaaaaattgtctgtttgttttctcattaattttggtctaaaacatgtttgcacttgtctttgacttgtgttttattaacattgattggcatattaaaagtcactctgagctta

SEQ ID NO: 388181 - DNA, 1903 bp, Homo sapiens
ctgagactggacctgaggagacctcagcctcggtgctcgggccgccccgcctctgccggaaagtccgcgccgccgctgccgccaccgtccgcagcccgagcgccccggagccgcaggccgccgccgcgcagagacgccgcggctgcgactaggcgcgcccagccgcacgtggcggacccgcccccaggcccgcagtgtcctggaccccgcaggcctccgctctcctgtcctcggccccgtccccagggccgcgatgagcttcctgagccgacagcagccgccgccaccccgccgcgccggggcggcctgcaccttgcggcagaagctgatcttctcgccctgcagcgactgtgaggaggaggaagaagaggaggaggaggagggcagcggccacagcaccggggaggactcggcctttcaagagcccgactcgccgctgccgcccgcgcggagccccacggagcccgggcccgagcgccgccgctcgcccgggccggcccccgggagccccggcgagctggaggaggacctgttgctgcccggcgcctgcccgggcgcggacgaggcgggcggtggggcggagggcgactcgtgggaggaggagggcttcggctcctcgtcgccggtcaagtcgccggcggccccctacttcctgggtagctctttctcgccggtgcgctgcggcggcccaggagatgcgtcgccgcggggttgcggggcgcgccgggcgggcgaaggccgccgctcgccgcggccggaccacccgggcaccccgccacacaagaccttccgcaagctgcgactcttcgacaccccgcacacgcccaagagtttgctctccaaagctcggggaattgattccagctctgttaaactccggggtagttctctcttcatggatacagaaaaatcaggaaaaagggaatttgatgtgcgacagactcctcaagtgaatattaatccttttactccggattctttgttgcttcattcctcaggacagtgtcgtcgtagaaagagaacgtattggaatgattcctgtggtgaagacatggaagccagtgattatgagcttgaagatgaaacaagacctgctaagagaattacaattactgaaagcaatatgaagtcccggtatacaacagaatttcatgagctagagaaaatcggctctggagaatttggttctgtatttaagtgtgtgaagaggctggatggatgcatttatgccattaagcgatcaaaaaagccattggcgggctctgttgatgagcagaacgctttgagagaagtatatgctcatgcagtgcttggacagcattctcatgtagttcgatatttctctgcgtgggcagaagatgatcatatgcttatacagaatgaatattgtaatggtggaagtttagctgatgctataagtgaaaactacagaatcatgagttactttaaagaagcagagttgaaggatctccttttgcaagttggccgaggcttgaggtatattcattcaatgtctttggttcacatggatataaaacctagtaatattttcatatctcgaacctcaatcccaaatgctgcctctgaagaaggagacgaagatgattgggcatccaacaaagttatgtttaaaataggtgatcttgggcatgtaacaaggatctccagtccacaagttgaagagggcgatagtcgttttcttgcaaatgaagttttacaggagaattatacccatctaccaaaagcagatatttttgcgcttgccctcacagtggtatgtgctgctggtgctgaacctcttccgagaaatggagatcaatggcatgaaagcactggacatgaattcatgtcgagtgccttcatccctatctcctaacacaggggatgaagggcctgacatgaa

SEQ ID NO: 388182 - DNA, 703 bp, Homo sapiens
  misc_feature (163)..(163): n is a, c, g, or t
ataatgtatagtgatgatgaagaaaagaagcatgaaaaatgaaaaaggcactgaacgcagaggaggcccgccttcttcatgtcaagggagaccatgcagattgatgagaggaagcggccttacaatagcatgtatgaaactcgagaacctactgaagaggaantggaggcatatagaatgaaacgtcagaggccagatgaccccatggcctctttccttggtcagtagcaactagtcagaagaccatccaagatagatgcagctgatacattcttttcagcttcttattgatgattgtagatagaaaaatccttgtttattcttcttgctgcctggctttaataaatatttcagatgcctcacagtaagttcactcctttccatactgaggaaacaagaaaagaagaagaggcacatgaagtgtgcttttgggaatagtttatgctgtacagcataaactattcccactgggagcactttgtaggcattgcatgaaccatgggatgatgattctgtggaggtattgccttgtgaatttgctgctattttagttttgtctttgctgtaaacttgtagcattaaacaatcattgttgttaatagtttacagcataaactattaactatagatcctatgaaggtaacttttcctagctgatttgagatttttatctccttttcagtttctgcggctcatatatgtg

SEQ ID NO: 388183 - DNA, 3552 bp, Homo sapiens
ctgagactggacctgaggagacctcagcctcggtgctcgggccgccccgcctctgccggaaagtccgcgccgccgctgccgccaccgtccgcagcccgagcgccccggagccgcaggccgccgccgcgcagagacgccgcggctgcgactaggcgcgcccagccgcacgtggcggacccgcccccaggcccgcagtgtcctggaccccgcaggcctccgctctcctgtcctcggccccgtccccagggccgcgatgagcttcctgagccgacagcagccgccgccaccccgccgcgccggggcggcctgcaccttgcggcagaagctgatcttctcgccctgcagcgactgtgaggaggaggaagaagaggaggaggaggagggcagcggccacagcaccggggaggactcggcctttcaagagcccgactcgccgctgccgcccgcgcggagccccacggagcccgggcccgagcgccgccgctcgcccgggccggcccccgggagccccggcgagctggaggaggacctgttgctgcccggcgcctgcccgggcgcggacgaggcgggcggtggggcggagggcgactcgtgggaggaggagggcttcggctcctcgtcgccggtcaagtcgccggcggccccctacttcctgggtagctctttctcgccggtgcgctgcggcggcccaggagatgcgtcgccgcggggttgcggggcgcgccgggcgggcgaaggccgccgctcgccgcggccggaccacccgggcaccccgccacacaagaccttccgcaagctgcgactcttcgacaccccgcacacgcccaagagtttgctctccaaagctcggggaattgattccagctctgttaaactccggggtagttctctcttcatggatacagaaaaatcaggaaaaagggaatttgatgtgcgacagactcctcaagtgaatattaatccttttactccggattctttgttgcttcattcctcaggacagtgtcgtcgtagaaagagaacgtattggaatgattcctgtggtgaagacatggaagccagtgattatgagcttgaagatgaaacaagacctgctaagagaattacaattactgaaagcaatatgaagtcccggtatacaacagaatttcatgagctagagaaaatcggctctggagaatttggttctgtatttaagtgtgtgaagaggctggatggatgcatttatgccattaagcgatcaaaaaagccattggcgggctctgttgatgagcagaacgctttgagagaagtatatgctcatgcagtgcttggacagcattctcatgtagttcgatatttctctgcgtgggcagaagatgatcatatgcttatacagaatgaatattgtaatggtggaagtttagctgatgctataagtgaaaactacagaatcatgagttactttaaagaagcagagttgaaggatctccttttgcaagttggccgaggcttgaggtatattcattcaatgtctttggttcacatggatataaaacctagtaatattttcatatctcgaacctcaatcccaaatgctgcctctgaagaaggagacgaagatgattgggcatccaacaaagttatgtttaaaataggtgatcttgggcatgtaacaaggatctccagtccacaagttgaagagggcgatagtcgttttcttgcaaatgaagttttacaggagaattatacccatctaccaaaagcagatatttttgcgcttgccctcacagtggtatgtgctgctggtgctgaacctcttccgagaaatggagatcaatggcatgaaatcagacagggtagattacctcggataccacaagtgctttcccaagaatttacagagttgctaaaagttatgattcatccagatccagagagaagaccttcagcaatggcactggtaaagcattcagtattgctgtccgcttctagaaagagtgcagaacaattacgaatagaattgaatgccgaaaagttcaaaaattcacttttacaaaaagaactcaagaaagcacagatggcaaaagctgcagctgaggaaagagcactcttcactgaccggatggccactaggtccaccacccagagtaatagaacatctcgacttattggaaagaaaatgaaccgctctgtcagccttactatatactgagctactcctttcccacctccccctgaacactgtgacaagaggaagctaggttgaaatcactgatagaatccagtttgcaattactttctcgattggtgtcagtagttttactgattaggacttttattgtgaattacagttgaaagctgtattttgatgattgctatgtcaggctttcatctaatcttaccagtctgtcttctgtaggatgtgtcactgttggatgttacaccagcctttccagggttaaccactgtggtggtgtgctgcttatagtttgctgttgcattgtaataaaaggtgtctttccctgtagtgacctgtaaaaagtactcaagggctttattacagacataccctccctttgaaaagggacatgctaaaagactcattactactcagccttcaatgtacctgtgtgtccatcttatatttcttttttttttaattgtgaattagacttgtatatcccactgggagcactttgtaggcattgcatgaaccatgggatgatgattctgtggaggtattgccttgtgaatttgctgctattttagttttgtctttgctgtaaacttgtagcattaaacaatcattgttgttaataggtcttctttttgaaacaattatgtgaaatgtatagctgcttttgatgaaaagcagctatttgccttttttttttttcctttgaactttgaagctagtgcattggaaaaatgcaccctttccctcctttggaatgctgtattaatgtagtataataattactggttttgtaacttgttctggtaatgtccttcccggactctttttaaatgtctccccctaagttttatacttgattgtattattagtctgtttttaaatgttttgcccggtttttctcttcaatatttgtgtatataaaccgatcttcgtgatactgtacatagctgtttgaaatgccagaatgacttctgacattccaagtttttcacaaaatatattttatctgtgattagccatttgactaataatactggctaacagatgttgaaaaaaattgtctgtttgttttctcattaattttggtctaaaacatgtttgcacttgtctttgacttgtgttttattaacattgattggcatattaaaagtcactctgagcttaccttaattgtctaaatccttgtgatgcctgttttctaatattttatctctattattgctatactataaaatgtatagtgtgtataatgtactattataaaagcagagggcacattttgattgaatatgaatatcacattgcatgttatgcatgtgacttgctagaaatgtagcatgatgtaatttaaaatatcttcaaattattaagtg

SEQ ID NO: 388184 - DNA, 1981 bp, Homo sapiens
  misc_feature (26)..(27): n is a, c, g, or t
aaaaaaaaaaaaaaaaaaaaaaaaanntaatggtggaagtttagctgatgctataagtgaaaactacagaatcatgagttactttaaagaagcagagttgaaggatctccttttgcaagttggccgaggcttgaggtatattcattcaatgtctttggttcacatggatataaaacctagtaatattttcatatctcgaacctcaatcccaaatgctgcctctgaagaaggagacgaagatgattgggcatccaacaaagttatgtttaaaataggtgatcttgggcatgtaacaaggatctccagtccacaagttgaagagggcgatagtcgttttcttgcaaatgaagttttacaggagaattatacccatctaccaaaagcagatatttttgcgcttgccctcacagtggtatgtgctgctggtgctgaacctcttccgagaaatggagatcaatggcatgaaatcagacagggtagattacctcggataccacaagtgctttcccaagaatttacagagttgctaaaagttatgattcatccagatccagagagaagaccttcagcaatggcactggtaaagcattcagtattgctgtccgcttctagaaagagtgcagaacaattacgaatagaattgaatgccgaaaagttcaaaaattcacttttacaaaaagaactcaagaaagcacagatggcaaaagctgcagctgaggaaagagcactcttcactgaccggatggccactaggtccaccacccagagtaatagaacatctcgacttattggaaagaaaatgaaccgctctgtcagccttactatatactgagctactcctttcccacctccccctgaacactgtgacaagaggaagctaggttgaaatcactgatagaatccagtttgcaattactttctcgattggtgtcagtagttttactgattaggacttttattgtgaattacagttgaaagctgtattttgatgattgctatgtcaggctttcatctaatcttaccagtctgtcttctgtaggatgtgtcactgttggatgttacaccagcctttccagggttaaccactgtggtggtgtgctgcttatagtttgctgttgcattgtaataaaaggtgtctttccctgtagtgacctgtaaaaagtactcaagggctttattacagacataccctccctttgaaaagggacatgctaaaagactcattactactcagccttcaatgtacctgtgtgtccatcttatatttcttttttttttaattgtgaattagacttgtatatcccactgggagcactttgtaggcattgcatgaaccatgggatgatgattctgtggaggtattgccttgtgaatttgctgctattttagttttgtctttgctgtaaacttgtagcattaaacaatcattgttgttaataggtcttctttttgaaacaattatgtgaaatgtatagctgcttttgatgaaaagcagctatttgccttttttttttttcctttgaactttgaagctagtgcattggaaaaatgcaccctttccctcctttggaatgctgtattaatgtagtataataattactggttttgtaacttgttctggtaatgtccttcccggactctttttaaatgtctccccctaagttttatacttgattgtattattagtctgtttttaaatgttttgcccggtttttctcttcaatatttgtgtatataaaccgatcttcgtgatactgtacatagctgtttgaaatgccagaatgacttctgacattccaagtttttcacaaaatatattttatctgtgattagccatttgactaataatactggctaacagatgttgaaaaaaattgtctgtttgttttctcattaattttggtctaaaacatgtttgcacttgtctttgacttgtgttttattaacattgattggcatattaaaagtcactctgagctta

SEQ ID NO: 388185 - DNA, 3294 bp, Homo sapiens
ctgagactggacctgaggagacctcagcctcggtgctcgggccgccccgcctctgccggaaagtccgcgccgccgctgccgccaccgtccgcagcccgagcgccccggagccgcaggccgccgccgcgcagagacgccgcggctgcgactaggcgcgcccagccgcacgtggcggacccgcccccaggcccgcagtgtcctggaccccgcaggcctccgctctcctgtcctcggccccgtccccagggccgcgatgagcttcctgagccgacagcagccgccgccaccccgccgcgccggggcggcctgcaccttgcggcagaagctgatcttctcgccctgcagcgactgtgaggaggaggaagaagaggaggaggaggagggcagcggccacagcaccggggaggactcggcctttcaagagcccgactcgccgctgccgcccgcgcggagccccacggagcccgggcccgagcgccgccgctcgcccgggccggcccccgggagccccggcgagctggaggaggacctgttgctgcccggcgcctgcccgggcgcggacgaggcgggcggtggggcggagggcgactcgtgggaggaggagggcttcggctcctcgtcgccggtcaagtcgccggcggccccctacttcctgggtagctctttctcgccggtgcgctgcggcggcccaggagatgcgtcgccgcggggttgcggggcgcgccgggcgggcgaaggccgccgctcgccgcggccggaccacccgggcaccccgccacacaagaccttccgcaagctgcgactcttcgacaccccgcacacgcccaagagtttgctctccaaagctcggggaattgattccagctctgttaaactccggggtagttctctcttcatggatacagaaaaatcaggaaaaagggaatttgatgtgcgacagactcctcaagtgaatattaatccttttactccggattctttgttgcttcattcctcaggacagtgtcgtcgtagaaagagaacgtattggaatgattcctgtggtgaagacatggaagccagtgattatgagcttgaagatgaaacaagacctgctaagagaattacaattactgaaagcaatatgaagtcccggtatacaacagaatttcatgagctagagaaaatcggctctggagaatttggttctgtatttaagtgtgtgaagaggctggatggatgcatttatgccattaagcgatcaaaaaagccattggcgggctctgttgatgagcagaacgctttgagagaagtatatgctcatgcagtgcttggacagcattctcatgtagttcgatatttctctgcgtgggcagaagatgatcatatgcttatacagaatgaatattgtaatggtggaagtttagctgatgctataagtgaaaactacagaatcatgagttactttaaagaagcagagttgaaggatctccttttgcaagttggccgaggcttgaggtatattcattcaatgtctttggttcacatggatataaaacctagtaatattttcatatctcgaacctcaatcccaaatgctgcctctgaagaaggagacgaagatgattgggcatccaacaaagttatgtttaaaataggtgatcttgggcatgtaacaaggatctccagtccacaagttgaagagggcgatagtcgttttcttgcaaatgaagttttacaggagtggtatgtgctgctggtgctgaacctcttccgagaaatggagatcaatggcatgaaatcagacagggtagattacctcggataccacaagtgctttcccaagaatttacagagttgctaaaagttatgattcatccagatccagagagaagaccttcagcaatggcactggtaaagcattcagtattgctgtccgcttctagaaagagtgcagaacaattacgaatagaattgaatgccgaaaagttcaaaaattcacttttacaaaaagaactcaagaaagcacagatggcaaaagctgcagctgaggaaagagcactcttcactgaccggatggccactaggtccaccacccagagtaatagaacatctcgacttattggaaagaaaatgaaccgctctgtcagccttactatatactgagctactcctttcccacctccccctgaacactgtgacaagaggaagctaggttgaaatcactgatagaatccagtttgcaattactttctcgattggtgtcagtagttttactgattaggacttttattgtgaattacagttgaaagctgtattttgatgattgctatgtcaggctttcatctaatcttaccagtctgtcttctgtaggatgtgtcactgttggatgttacaccagcctttccagggttaaccactgtggtggtgtgctgcttatagtttgctgttgcattgtaataaaaggtgtctttccctgtagtgacctgtaaaaagtactcaagggctttattacagacataccctccctttgaaaagggacatgctaaaagactcattactactcagccttcaatgtacctgtgtgtccatcttatatttcttttttttttaattgtgaattagacttgtatatcccactgggagcactttgtaggcattgcatgaaccatgggatgatgattctgtggaggtattgccttgtgaatttgctgctattttagttttgtctttgctgtaaacttgtagcattaaacaatcattgttgttaataggtcttctttttgaaacaattatgtgaaatgtatagctgcttttgatgaaaagcagctatttgccttttttttttttcctttgaactttgaagctagtgcattggaaaaatgcaccctttccctcctttggaatgctgtattaatgtagtataataattactggttttgtaacttgttctggtaatgtccttcccggactctttttaaatgtctccccctaagttttatacttgattgtattattagtctgtttttaaatgttttgcccggtttttctcttcaatatttgtgtatataaaccgatcttcgtgatactgtacatagctgtttgaaatgccagaatgacttctgacattccaagtttttcacaaaatatattttatctgtgattagccatttgactaataatactggctaacagatgttgaaaaaaattgtctgtttgttttctcattaattttggtctaaaacatgtttgcacttgtctttgacttgtgttttattaacattgattggcatattaaaagtcactctgagctta

SEQ ID NO: 388186 - DNA, 2065 bp, Homo sapiens
  misc_feature (2042)..(2042): n is a, c, g, or t
  misc_feature (2058)..(2058): n is a, c, g, or t
ctgagactggacctgaggagacctcagcctcggtgctcgggccgccccgcctctgccggaaagtccgcgccgccgctgccgccaccgtccgcagcccgagcgccccggagccgcaggccgccgccgcgcagagacgccgcggctgcgactaggcgcgcccagccgcacgtggcggacccgcccccaggcccgcagtgtcctggaccccgcaggcctccgctctcctgtcctcggccccgtccccagggccgcgatgagcttcctgagccgacagcagccgccgccaccccgccgcgccggggcggcctgcaccttgcggcagaagctgatcttctcgccctgcagcgactgtgaggaggaggaagaagaggaggaggaggagggcagcggccacagcaccggggaggactcggcctttcaagagcccgactcgccgctgccgcccgcgcggagccccacggagcccgggcccgagcgccgccgctcgcccgggccggcccccgggagccccggcgagctggaggaggacctgttgctgcccggcgcctgcccgggcgcggacgaggcgggcggtggggcggagggcgactcgtgggaggaggagggcttcggctcctcgtcgccggtcaagtcgccggcggccccctacttcctgggtagctctttctcgccggtgcgctgcggcggcccaggagatgcgtcgccgcggggttgcggggcgcgccgggcgggcgaaggccgccgctcgccgcggccggaccacccgggcaccccgccacacaagaccttccgcaagctgcgactcttcgacaccccgcacacgcccaagagtttgctctccaaagctcggggaattgattccagctctgttaaactccggggtagttctctcttcatggatacagaaaaatcaggaaaaagggaatttgatgtgcgacagactcctcaagtgaatattaatccttttactccggattctttgttgcttcattcctcaggacagtgtcgtcgtagaaagagaacgtattggaatgattcctgtggtgaagacatggaagccagtgattatgagcttgaagatgaaacaagacctgctaagagaattacaattactgaaagcaatatgaagtcccggtatacaacagaatttcatgagctagagaaaatcggctctggagaatttggttctgtatttaagtgtgtgaagaggctggatggatgcatttatgccattaagcgatcaaaaaagccattggcgggctctgttgatgagcagaacgctttgagagaagtatatgctcatgcagtgcttggacagcattctcatgtagttcgatatttctctgcgtgggcagaagatgatcatatgcttatacagaatgaatattgtaatggtggaagtttagctgatgctataagtgaaaactacagaatcatgagttactttaaagaagcagagttgaaggatctccttttgcaagttggccgaggcttgaggtatattcattcaatgtctttggttcacatggatataaaacctagtaatattttcatatctcgaacctcaatcccaaatgctgcctctgaagaaggagacgaagatgattgggcatccaacaaagttatgtttaaaataggtgatcttgggcatgtaacaaggatctccagtccacaagttgaagagggcgatagtcgttttcttgcaaatgaagttttacaggagaattatacccatctaccaaaagcagatatttttgcgcttgccctcacagtggtatgtgctgctggtgctgaacctcttccgagaaatggagatcaatggcatgaaatcagacagggtagattacctcggataccacaagtgctttcccaagaatttacagagttgctaaaagttatgattcatccagatccagagagaagaccttcagcaatggcactggtaaagcattcagtattgctgtccgcttctagaaagagtgcagaacaattacgaatagaattgaatgccgaaaagttcaaaaattcacttttacaaaaanggaactccaaggaaanggcacaa

SEQ ID NO: 388187 - DNA, 506 bp, Homo sapiens
atactgataagcatgtcacagtatagagcataagaggcaatgtatgtatcctagtgacattagcagtgcttttccccccttaaactcctttaaaattacttttagaacttgctgctcattcttgtgaatgttatgaatggtgtcatattgtccttttacagaagatacgatttttagaaacaaatattcattgaatgtctgccctgtgagatactcactagagtgaacatgaggaggcttatgtagcaaaatggcacctacctgcaaagaacttagtccctaatggagatgaatatataataagggatcataaatgtgctaagtggatttactagtaatatgtgagccaaggacgataaagctcctgattctgatgggtatcaggaaaggcttttcaggaagtgttacttgttataggtcagaggtcagcaaactacaggttacaaccccactgcctgcttttgtaaaaaactttattggaatacagttatgcccacttgtttata

SEQ ID NO: 388188 - DNA, 831 bp, Homo sapiens
atactgataagcatgtcacagtatagagcataagaggcaatgtatgtatcctagtgacattagcagtgcttttccccccttaaactcctttaaaattacttttagaacttgctgctcattcttgtgaatgttatgaatggtgtcatattgtccttttacagaagatacgatttttagaaacaaatattcattgaatgtctgccctgtgagatactcactagagtgaacatgaggaggcttatgtagcaaaatggcacctacctgcaaagaacttagtccctaatggagatgaatatataataagggatcataaatgtgctaagtggatttactagtaatatgtgagccaaggacgataaagctcctgattctgatgggtatcaggaaaggcttttcaggaagtgttacttgttataggtcagaggtcagcaaactacaggttacaaccccactgcctgcttttgtaaaaaactttattggaatacagttatgcccacttgtttatatattgtctgtggctgctttcacattacaacagcagggttaagtagctggaacaaagcctaaaatacttggtcttttacagaaaaaaatttgccaacctgttctaaacttttaaggtcaggagaactgggggaaggagggagtagaaagaacactgtcacccagactggagtgcagtggcaccatcatatagctcactgtagcctcaaactcctgggctctagtggtcttcccacttcagcttctggagtagctggggctactgcacctggaattgtcttaatctgttttaatactattaaaattttttttgtttcatctctttca

SEQ ID NO: 388189 - DNA, 441 bp, Homo sapiens
cctgagtagctgggattacaggcatgtgccaccacacctggctaattttttgtatttttagtagatatggggattcaccacgttggccaggctagtctcgaactcctgacctcaggtgatctgcccgcctcagcctcccaaggtactgggattacaggtgtgagccaccatgcccggcctatttttttaagttactgaaacgaaacaaacatttttggtctgggtcttcgcatccccacctctgccttctgctcttactgacatgatacagttgtggacagccaggaagtcatccctcctgtggactctgagccaccagcaccctgcagaactaaagccagaaaaaatggggagtggttggaggaaggggacagtagtgggaataggaggcaggacaggggacatccagtgatgcatgggtcggtcacctcgtgttcatcc

SEQ ID NO: 388190 - DNA, 585 bp, Homo sapiens
atggtacaaatttattaatatgaagaaatgcaaaatgtattgcttttgatatttctcttccgagatgaacaagtagcatgtaatgaactgtttgacagtttaactcaagtcatgcttcaaactgttttaatgatcaaatcaagacacatttcattttacattttattattgtacagtttttgtttcggatgatgatcacagcaatctttattctatacattttatgtgaacttttttaatgtctttaatttggattttttttttttttagtattttaacatttattttaatcctgaagacacttttttgattgtgtttcgtaagagacaacatggcctcctaaggtgcaatcctgccgctatagtgagctaatgtcctgaatccaaaggcttcagaaaattgcttttgcctttttcatgaatgttaagcagcagcattgtgagatcgatctgtcctggcagttaacacgatgtgcaacagtgtgttagcatggaacagaacgcttttcacaaaacaaaggactgttttacaaatgattattccgacagtgtgtcgacataaacttttacaactgcacagcagcca

SEQ ID NO: 388191 - DNA, 681 bp, Homo sapiens
  misc_feature (391)..(391): n is a, c, g, or t
  misc_feature (411)..(411): n is a, c, g, or t
  misc_feature (505)..(505): n is a, c, g, or t
  misc_feature (554)..(554): n is a, c, g, or t
ggctgcaggaattcggcacgagtctacactttatgtactctcaacgcctgggttacataggaaatgcaccctgaggttttaataaaagcccctatggctataactttaaataaactaaaccaaaaatgttattgatgttttatatatagagagtagtctcattagtttttgttactgtaatgtttgaagtctcaaatgcaccgtattacggtaaataacatggttttgaaaacttttttttattttgtcacagacctgttgtcatagttgaaatgatgtttattgtagatggtatttgaacttattcttctggaaatagttcatcaagtatgtttgttgctcattgtgatacattaaaaactgtatctacatatttaaaaaaaaaatactngttttcaaaccagtatacangataagcttccaggctgcatagaaggaggagagggaaaatgttttgtaagaaaccaatcaagataaaggacagtgaagtaatccgtaccttgtngtttgttttgatttaataacataacaaataaccaaccctttcctgcctnacatgcattcattccacatatatacacacacaaagagagttaatcaacttgaaagtgttccttcaattctgatatagaaatgcaatttaacacacttaaggattaactttttgacctttttcgtgtt

SEQ ID NO: 388192 - DNA, 1385 bp, Homo sapiens
  misc_feature (1095)..(1095): n is a, c, g, or t
  misc_feature (1115)..(1115): n is a, c, g, or t
  misc_feature (1209)..(1209): n is a, c, g, or t
  misc_feature (1258)..(1258): n is a, c, g, or t
atggtacaaatttattaatatgaagaaatgcaaaatgtattgcttttgatatttctcttccgagatgaacaagtagcatgtaatgaactgtttgacagtttaactcaagtcatgcttcaaactgttttaatgatcaaatcaagacacatttcattttacattttattattgtacagtttttgtttcggatgatgatcacagcaatctttattctatacattttatgtgaacttttttaatgtctttaatttggattttttttttttttagtattttaacatttattttaatcctgaagacacttttttgattgtgtttcgtaagagacaacatggcctcctaaggtgcaatcctgccgctatagtgagctaatgtcctgaatccaaaggcttcagaaaattgcttttgcctttttcatgaatgttaagcagcagcattgtgagatcgatctgtcctggcagttaacacgatgtgcaacagtgtgttagcatggaacagaacgcttttcacaaaacaaaggactgttttacaaatgattattccgacagtgtgtcgacataaacttttacaactgcacagcagccaaaaaaagaaaaaaaaaagaaaaaaaactttaactggatggacgttgttagggtgagaaataaaaggacagcctccaaaggttgagaatgagaattgttttttccctggatatccaaagggattatcacagcgcaatcattgtctacacaacatgtactctcaacgcctgggttacataggaaatgcaccctgaggttttaataaaagcccctatggctataactttaaataaactaaaccaaaaatgttattgatgttttatatatagagagtagtctcattagtttttgttactgtaatgtttgaagtctcaaatgcaccgtattacggtaaataacatggttttgaaaacttttttttattttgtcacagacctgttgtcatagttgaaatgatgtttattgtagatggtatttgaacttattcttctggaaatagttcatcaagtatgtttgttgctcattgtgatacattaaaaactgtatctacatatttaaaaaaaaaatactngttttcaaaccagtatacangataagcttccaggctgcatagaaggaggagagggaaaatgttttgtaagaaaccaatcaagataaaggacagtgaagtaatccgtaccttgtngtttgttttgatttaataacataacaaataaccaaccctttcctgcctnacatgcattcattccacatatatacacacacaaagagagttaatcaacttgaaagtgttccttcaattctgatatagaaatgcaatttaacacacttaaggattaactttttgacctttttcgtgtt

SEQ ID NO: 388193 - DNA, 833 bp, Homo sapiens
attccagttttgaacagttttagattattcatgtagattatccttttgagttcttgctaacatcagttaggctcatactgttgggcatgtgtgtgtgtgtgggggggtttatttatttttttatttgagacggagtcttactctgttgcccaggctggagtgcagtggcgtgatcttggctcactacaatctccgcctcccgggttcaagtgattctcctgtctcagcctcccaagtagctgggattacaggtgcccaccactatgcccagctaattttgtatttttagtagagacggggtttcaccatattgatcaggctagtctcgaactcctgacttcaggtgatccacccgcctcggcctcccaaagtgctgggattataggcgtgagccaccatgcctggccgtttcttttttcttttttcttttttttttttttttcgggaagacagaaggtcccctattggtgtgttgcgcccaatgtatgggatgtcgccagtgggcccaattctccgggtcactcccaactctcctcccggggttccaagtggattctccctggcgctacagacctccttgagataccggggactattagctccgtggatcctcccaggtactcatgagaagggtgccaaggttgggacacggtcacaggtcgcacaagtcattgcacagtggcccggaccgtgtaacctggacctcgaatgtgtgcgcggatgtccttgaaacctttggggacactcaggacagatttttggacaattgaccgggaacggccctgggaatccgtttaaacaagaaaaccccccaaaatgtggtttacgacgcg

SEQ ID NO: 388194 - DNA, 328 bp, Homo sapiens
gacacgctcaccgacggggtggccctggagtgatttcttccgaaccctcatagcggcaatcctctacctgatcacctccattgttgtccttgttgagagaggaaaccactccaaaatcgtcgcaggggtactgggcctaatcgctacgtgcctctttggctatgatgcctatgtcaccttccccgttcggcagccaagacatacagcagcccccactgaccccgcagatggcccggtgtaggcgaacttccctcatttctctctgcaatctgcaaataactcctccattgaaataactccgtcggtgagcggtaccgagctgattgta

SEQ ID NO: 388195 - DNA, 335 bp, Homo sapiens
ttggaacacagtgagcacataaaaagtgtttagctattattgtatgtcatttccccagccctcgtaggcatcttagtatgggacccccaatttaaaccaatcttctcagccctggttgctgattgaggtcccctttcccatgtcacccttccagatattatgcctggtgatcctgatctgcttcagtgcctccacaccaggctactcctccctgtcggtgattgagatgatccttgctgctattttctttgttgtctacatgtgtgacctgcacaccaagataccattcatcaactggccctggagtgtgaggaggagaccaccagagcagacca

SEQ ID NO: 388196 - DNA, 1923 bp, Homo sapiens
gacctcaggtgatccacccgcctcggcctcccagtgttgggattacaggcgtgagccaccgcgcctggcccttttttttttttgtaacgcggcagctccaaaccccgctgagagtatatgcatgggaaaactttctgaaatcaaaaatattccgaattctggcaacatactgggccccaagtctttcggatttaactctgcctcggccgttttattcagttaaggaaactgagtcactccatcccaaagccagattcccgcggttctaagctgaagctgtctcgggtgcatttgcattccaaaaaggcgaagggtcccgctattactgctcctggtacctggagctgccaagcacccctgcgatggggcgccccgggggctgtgcgccaggctgggagtatccttggggggcggggcgagggggcttccggggcggcagcacctggcccggctccggccccgcccgcgtcagctctgcgcggtgattcactccctccttcgccccggggcccccttcccggccagacggcgggcaagacagctgggtgtacagcgtcctcgaaaccacgagcaagtgagcagatcctccgaggcaccagggactccagcccatgccatggcggattctgagcgcctctcggctcctggctgctgggccgcctgcaccaacttctcgcgcactcgaaagggaatcctcctgtttgctgagattatattatgcctggtgatcctgatctgcttcagtgcctccacaccaggctactcctccctgtcggtgattgagatgatccttgctgctattttctttgttgtctacatgtgtgacctgcacaccaagataccattcatcaactggccctggagtgatttcttccgaaccctcatagcggcaatcctctacctgatcacctccattgttgtccttgttgagagaggaaaccactccaaaatcgtcgcaggggtactgggcctaatcgctacgtgcctctttggctatgatgcctatgtcaccttccccgttcggcagccaagacatacagcagcccccactgaccccgcagatggcccggtgtaggcgaacttccctcatttctctctgcaatctgcaaataactcctccattgaaataactcctccccaccccaacaacaacattcccagcagaccaactcccaccccctctttgaggtaaaagtgcctttattgggagacttttgtcttccagcctgccaatcaaccctcctgggtgtggccaccatatgtgtgtgcctaggtcctccttctgcacgatccaataggagacaccagttctgactgaaccatgcccccacctaagtcacaaaatgagggaagtggggagttagatttcagagtccaggccctaggttgggacccactccaaataatctcctcggtgtgggtggtggttctatagagggataaatgaataataaacattgttaaaatatacgataatgaatacgataatgaataaagtaatcctttcatcaaatgtgggtaaatttcaagcatcaggagggggaaatggagtggaaacagctggggcaaggaggcaaagaagccaggcctgttttacaacaaatattaaattacttcaataatacaaacgagaggcccggtgcggtggctcatgcctgtaatcccagtcctttgggaggctgcgggaggattgcttgagcccaggagttctagaccagcctgggcaacatggcaaaaccccatctctaccaaaaaattaaaaaattagctgggaacgctgacacgagcctggagtcccagctacttgggaggctgaggtgggaggatagcttgagcccaaaacttttgaggctgcagtgagccctgatcacaccactgcactccagcctgggcaatagggtagaccaagtctctaaaacagaa

SEQ ID NO: 388197 - DNA, 922 bp, Homo sapiens
ttggaacacagtgagcacataaaaagtgtttagctattattgtatgtcatttccccagccctcgtaggcatcttagtatgggacccccaatttaaaccaatcttctcagccctggttgctgattgaggtcccctttcccatgtcacccttccagatattatgcctggtgatcctgatctgcttcagtgcctccacaccaggctactcctccctgtcggtgattgagatgatccttgctgctattttctttgttgtctacatgtgtgacctgcacaccaagataccattcatcaactggccctggagtgatttcttccgaaccctcatagcggcaatcctctacctgatcacctccattgttgtccttgttgagagaggaaaccactccaaaatcgtcgcaggggtactgggcctaatcgctacgtgcctctttggctatgatgcctatgtcaccttccccgttcggcagccaagacatacagcagcccccactgaccccgcagatggcccggtgtaggcgaacttccctcatttctctctgcaatctgcaaataactcctccattgaaataactcctccccaccccaacaacaacattcccagcagaccaactcccaccccctctttgaggtaaaagtgcctttattgggagacttttgtcttccagcctgccaatcaaccctcctgggtgtggccaccatatgtgtgtgcctaggtcctccttctgcacgatccaataggagacaccagttctgactgaaccatgcccccacctaagtcacaaaatgagggaagtggggagttagatttcagagtccaggccctaggttgggacccactccaaataatctcctcggtgtgggtggtggttctatagagggataaatgaataataaacattgttaaaatatacgataatgaa

SEQ ID NO: 388198 - DNA, 646 bp, Homo sapiens
gacacgctcaccgacggggtggccctggagtgatttcttccgaaccctcatagcggcaatcctctacctgatcacctccattgttgtccttgttgagagaggaaaccactccaaaatcgtcgcaggggtactgggcctaatcgctacgtgcctctttggctatgatgcctatgtcaccttccccgttcggcagccaagacatacagcagcccccactgaccccgcagatggcccggtgtaggcgaacttccctcatttctctctgcaatctgcaaataactcctccattgaaataactcctccccaccccaacaacaacattcccagcagaccaactcccaccccctctttgaggtaaaagtgcctttattgggagacttttgtcttccagcctgccaatcaaccctcctgggtgtggccaccatatgtgtgtgcctaggtcctccttctgcacgatccaataggagacaccagttctgactgaaccatgcccccacctaagtcacaaaatgagggaagtggggagttagatttcagagtccaggccctaggttgggacccactccaaataatctcctcggtgtgggtggtggttctatagagggataaatgaataataaacattgttaaaatatacgataatgaa

SEQ ID NO: 388199 - DNA, 1415 bp, Homo sapiens
gacctcaggtgatccacccgcctcggcctcccagtgttgggattacaggcgtgagccaccgcgcctggcccttttttttttttgtaacgcggcagctccaaaccccgctgagagtatatgcatgggaaaactttctgaaatcaaaaatattccgaattctggcaacatactgggccccaagtctttcggatttaactctgcctcggccgttttattcagttaaggaaactgagtcactccatcccaaagccagattcccgcggttctaagctgaagctgtctcgggtgcatttgcattccaaaaaggcgaagggtcccgctattactgctcctggtacctggagctgccaagcacccctgcgatggggcgccccgggggctgtgcgccaggctgggagtatccttggggggcggggcgagggggcttccggggcggcagcacctggcccggctccggccccgcccgcgtcagctctgcgcggtgattcactccctccttcgccccggggcccccttcccggccagacggcgggcaagacagctgggtgtacagcgtcctcgaaaccacgagcaagtgagcagatcctccgaggcaccagggactccagcccatgccatggcggattctgagcgcctctcggctcctggctgctgggccgcctgcaccaacttctcgcgcactcgaaagggaatcctcctgtttgctgagattatattatgcctggtgatcctgatctgcttcagtgcctccacaccaggctactcctccctgtcggtgattgagatgatccttgctgctattttctttgttgtctacatgtgtgacctgcacaccaagataccattcatcaactggccctggagtgatttcttccgaaccctcatagcggcaatcctctacctgatcacctccattgttgtccttgttgagagaggaaaccactccaaaatcgtcgcaggggtactgggcctaatcgctacgtgcctctttggctatgatgcctatgtcaccttccccgttcggcagccaagacatacagcagcccccactgaccccgcagatggcccggtgtaggcgaacttccctcatttctctctgcaatctgcaaataactcctccattgaaataactcctccccaccccaacaacaacattcccagcagaccaactcccaccccctctgtggccaccatatgtgtgtgcctaggtcctccttctgcacgatccaataggagacaccagttctgactgaaccatgcccccacctaagtcacaaaatgagggaagtggggagttagatttcagagtccaggccctaggttgggacccactccaaataatctcctcggtgtgggtggtggttctatagagggataaatgaataataaacattgttaaaatatacgataatgaa

SEQ ID NO: 388200 - DNA, 511 bp, Homo sapiens
tgctgatggcgtcgttcacaagcgtcttgagtggaaatcacccttgcgcagttgggcagcaagacatacagcagcccccactgaccccgcagatggcccggtgtaggcgaacttccctcatttctctctgcaatctgcaaataactcctccattgaaataactcctccccaccccaacaacaacattcccagcagaccaactcccaccccctctttgaggtaaaagtgcctttattgggagacttttgtcttccagcctgccaatcaaccctcctgggtgtggccaccatatgtgtgtgcctaggtcctccttctgcacgatccaataggagacaccagttctgactgaaccatgcccccacctaagtcacaaaatgagggaagtggggagttagatttcagagtccaggccctaggttgggacccactccaaataatctcctcggtgtgggtggtggttctatagagggataaatgaataataaacattgttaaaatatacgataatgaa

SEQ ID NO: 388201 - DNA, 1185 bp, Homo sapiens
gacctcaggtgatccacccgcctcggcctcccagtgttgggattacaggcgtgagccaccgcgcctggcccttttttttttttgtaacgcggcagctccaaaccccgctgagagtatatgcatgggaaaactttctgaaatcaaaaatattccgaattctggcaacatactgggccccaagtctttcggatttaactctgcctcggccgttttattcagttaaggaaactgagtcactccatcccaaagccagattcccgcggttctaagctgaagctgtctcgggtgcatttgcattccaaaaaggcgaagggtcccgctattactgctcctggtacctggagctgccaagcacccctgcgatggggcgccccgggggctgtgcgccaggctgggagtatccttggggggcggggcgagggggcttccggggcggcagcacctggcccggctccggccccgcccgcgtcagctctgcgcggtgattcactccctccttcgccccggggcccccttcccggccagacggcgggcaagacagctgggtgtacagcgtcctcgaaaccacgagcaagtgagcagatcctccgaggcaccagggactccagcccatgccatggcggattctgagcgcctctcggctcctggctgctgggccgcctgcaccaacttctcgcgcactcgaaagggaatcctcctgtttgctgagattatattatgcctggtgatcctgatctgcttcagtgcctccacaccaggctactcctccctgtcggtgattgagatgatccttgctgctattttctttgttgtctacatgtgtgacctgcacaccaagataccattcatcaactggccctggagtgatttcttccgaaccctcatagcggcaatcctctacctgatcacctccattgttgtccttgttgagagaggaaaccactccaaaatcgtcgcaggggtactgggcctaatcgctacgtgcctctttggctatgatgcctatgtcaccttccccgttcggcagccaagacatacagcagcccccactgaccccgcagatggcccggtgtaggcgaacttccctcatttcttcttcccactcatcctaaccctactcctaatcacataacctattcccccgagcaatctcaattacatactaacacccacggataatcagca

SEQ ID NO: 388202 - DNA, 1073 bp, Homo sapiens
  misc_feature (413)..(413): n is a, c, g, or t
gccgggggccccttcccggacaagatggcgggcaagatagggtagggtgtagcagcgtttcgtcgaatagcacgagcaagtgagcagatgctctcggaggcagctcgatgggagtcctaggtcgccatgccaatggtgggattcgtgatgctgccgtcgtcgtggttcaccttggcattgcgtgggtgcactgtcgtgctagcaactttcgtcgtcggcatcgtcgaagagagtggtagatccgtcctggctttggcgtagaggatttaatagttaatggcgcatgggtagattccgtgaaatcttggcattgcagattcgacgctcacatcgacctagggacatagcatccttcacgctgttgcggttgaacttggaggcacttgattcgcgtttgtcgtaggctgaatatntgatcgtaatgtggctttggttgcttaccgagtgggtcggtgcatcgcttggacagcgaacccaaaggatgacgcaagttgcaagtccaagctggggcgcctgggagtggaatttcttccgaaccctcatagcggcaatcctctacctgatcacctccattgttgtccttgttgagagaggaaaccactccaaaatcgtcgcaggggtactgggcctaatcgctacgtgcctctttggctatgatgcctatgtcaccttccccgttcggcagccaagacatacagcagcccccactgaccccgcagatggcccggtgtaggcgaacttccctcatttctctctgcaatctgcaaataactcctccattgaaataactcctccccaccccaacaacaacattcccagcagaccaactcccaccccctctgtggccaccatatgtgtgtgcctaggtcctccttctgcacgatccaataggagacaccagttctgactgaaccatgcccccacctaagtcacaaaatgagggaagtggggagttagatttcagagtccaggccctaggttgggacccactccaaataatctcctcggtgtgggtggtggttctatagagggataaatgaataataaacattgttaaaatatacgataatgaa

SEQ ID NO: 388203 - DNA, 893 bp, Homo sapiens
gacctcaggtgatccacccgcctcggcctcccagtgttgggattacaggcgtgagccaccgcgcctggcccttttttttttttgtaacgcggcagctccaaaccccgctgagagtatatgcatgggaaaactttctgaaatcaaaaatattccgaattctggcaacatactgggccccaagtctttcggatttaactctgcctcggccgttttattcagttaaggaaactgagtcactccatcccaaagccagattcccgcggttctaagctgaagctgtctcgggtgcatttgcattccaaaaaggcgaagggtcccgctattactgctcctggtacctggagctgccaagcacccctgcgatggggcgccccgggggctgtgcgccaggctgggagtatccttggggggcggggcgagggggcttccggggcggcagcacctggcccggctccggccccgcccgcgtcagctctgcgcggtgattcactccctccttcgccccggggcccccttcccggccagacggcgggcaagacagctgggtgtacagcgtcctcgaaaccacgagcaagtgagcagatcctccgaggcaccagggactccagcccatgccatggcggattctgagcgcctctcggctcctggctgctgggccgcctgcaccaacttctcgcgcactcgaaagggaatcctcctgtttgctgagattatattatgcctggtgatcctgatctgcttcagtgcctccacaccaggctactcctccctgtcggtgattgagatgatccttgctgctattttctttgttgtctacatgtgtgacctgcacaccaagataccattcatcaactggccctggagtgtgaggaggagaccaccagagcagacca

SEQ ID NO: 388204 - DNA, 333 bp, Homo sapiens
gttggttgggggtaagggggttgctgagagggcagagggaaaaaggaaagggatctcttaaaggcacgaatgccaactctggtctcgtattggtacttagggcttttgtaccaataggtaccataagcttcggtattcttgtgtgtaaaatgttcatggactttggatcttgttttaaaaaatgggcatatagattcagccaatgctttctctcttttcctcacctgcagaccccgcagatggcccggtgtaggcgaacttccctcatttctctctgcaatctgcaaataactcctccattgaaataactcctccccaccccaacaacaacat

SEQ ID NO: 388205 - DNA, 1480 bp, Homo sapiens
gacctcaggtgatccacccgcctcggcctcccagtgttgggattacaggcgtgagccaccgcgcctggcccttttttttttttgtaacgcggcagctccaaaccccgctgagagtatatgcatgggaaaactttctgaaatcaaaaatattccgaattctggcaacatactgggccccaagtctttcggatttaactctgcctcggccgttttattcagttaaggaaactgagtcactccatcccaaagccagattcccgcggttctaagctgaagctgtctcgggtgcatttgcattccaaaaaggcgaagggtcccgctattactgctcctggtacctggagctgccaagcacccctgcgatggggcgccccgggggctgtgcgccaggctgggagtatccttggggggcggggcgagggggcttccggggcggcagcacctggcccggctccggccccgcccgcgtcagctctgcgcggtgattcactccctccttcgccccggggcccccttcccggccagacggcgggcaagacagctgggtgtacagcgtcctcgaaaccacgagcaagtgagcagatcctccgaggcaccagggactccagcccatgccatggcggattctgagcgcctctcggctcctggctgctgggccgcctgcaccaacttctcgcgcactcgaaagggaatcctcctgtttgctgagattatattatgcctggtgatcctgatctgcttcagtgcctccacaccaggctactcctccctgtcggtgattgagatgatccttgctgctattttctttgttgtctacatgtgtgacctgcacaccaagataccattcatcaactggccctggagtgatttcttccgaaccctcatagcggcaatcctctacctgatcacctccattgttgtccttgttgagagaggaaaccactccaaaatcgtcgcaggggtactgggcctaatcgctacgtgcctctttggctatgatgcctatgtcaccttccccgttcggcagccaagacatacagcagcccccactgaccccgcagatggcccggtgtaggcgaacttccctcatttctctctgcaatctgcaaataactcctccattgaaataactcctccccaccccaacaacaacattcccagcagaccaactcccaccccctctttgaggtaaaagtgcctttattgggagacttttgtcttccagcctgccaatcaaccctcctgggtgtggccaccatatgtgtgtgcctaggtcctccttctgcacgatccaataggagacaccagttctgactgaaccatgcccccacctaagtcacaaaatgagggaagtggggagttagatttcagagtccaggccctaggttgggacccactccaaataatctcctcggtgtgggtggtggttctatagagggataaatgaataataaacattgttaaaatatacgataatgaa

SEQ ID NO: 388206 - DNA, 1859 bp, Homo sapiens
  misc_feature (1485)..(1485): n is a, c, g, or t
  misc_feature (1686)..(1686): n is a, c, g, or t
  misc_feature (1718)..(1718): n is a, c, g, or t
gacctcaggtgatccacccgcctcggcctcccagtgttgggattacaggcgtgagccaccgcgcctggcccttttttttttttgtaacgcggcagctccaaaccccgctgagagtatatgcatgggaaaactttctgaaatcaaaaatattccgaattctggcaacatactgggccccaagtctttcggatttaactctgcctcggccgttttattcagttaaggaaactgagtcactccatcccaaagccagattcccgcggttctaagctgaagctgtctcgggtgcatttgcattccaaaaaggcgaagggtcccgctattactgctcctggtacctggagctgccaagcacccctgcgatggggcgccccgggggctgtgcgccaggctgggagtatccttggggggcggggcgagggggcttccggggcggcagcacctggcccggctccggccccgcccgcgtcagctctgcgcggtgattcactccctccttcgccccggggcccccttcccggccagacggcgggcaagacagctgggtgtacagcgtcctcgaaaccacgagcaagtgagcagatcctccgaggcaccagggactccagcccatgccatggcggattctgagcgcctctcggctcctggctgctgggccgcctgcaccaacttctcgcgcactcgaaagggaatcctcctgtttgctgagattatattatgcctggtgatcctgatctgcttcagtgcctccacaccaggctactcctccctgtcggtgattgagatgatccttgctgctattttctttgttgtctacatgtgtgacctgcacaccaagataccattcatcaactggccctggagtgatttcttccgaaccctcatagcggcaatcctctacctgatcacctccattgttgtccttgttgagagaggaaaccactccaaaatcgtcgcaggggtactgggcctaatcgctacgtgcctctttggctatgatgcctatgtcaccttccccgttcggcagccaagacatacagcagcccccactgaccccgcagatggcccggtgtaggcgaacttccctcatttctctctgcaatctgcaaataactcctccattgaaataactcctccccaccccaacaacaacattcccagcagaccaactcccaccccctctttgaggtaaaagtgcctttattgggagacttttgtcttccagcctgccaatcaaccctcctgggtgtggccaccatatgtgtgtgcctaggtcctccttctgcacgatccaataggagacaccagttctgactgaaccatgcccccacctaagtcacaaaatgagggaagtggggagttagatttcagagtccaggccctaggttgggacccactccaaataatctcctcggtgtgggtggtggttctatagagggataaatgaataataaacattgttaaaatatacgataatgaaaaaanaaaaaaaaaaaaaaaaaaatttgtgggcgccgggcccaaaaaggtttaaaccatttgtttgggggccgggcccctgggttttgaccggggcagggatcaaaagagaaccggggccagccagcggtgggtcccccccaaataaaacccgcgcgggacggcggttgacacaactcagcgggctctgggctccgacttccaccnggccacagccaatatccgccccggcgggggtnaaaaaaacaacaacaacacaaacacagaagcacaacacgacaaaaacaagcgcaacacaacaacaaccagaagccaacacaacaagtaactagacaagacacgacgacaacaaacagcaaacaaacacacagagacacaac

SEQ ID NO: 388207 - DNA, 1478 bp, Homo sapiens
gacctcaggtgatccacccgcctcggcctcccagtgttgggattacaggcgtgagccaccgcgcctggcccttttttttttttgtaacgcggcagctccaaaccccgctgagagtatatgcatgggaaaactttctgaaatcaaaaatattccgaattctggcaacatactgggccccaagtctttcggatttaactctgcctcggccgttttattcagttaaggaaactgagtcactccatcccaaagccagattcccgcggttctaagctgaagctgtctcgggtgcatttgcattccaaaaaggcgaagggtcccgctattactgctcctggtacctggagctgccaagcacccctgcgatggggcgccccgggggctgtgcgccaggctgggagtatccttggggggcggggcgagggggcttccggggcggcagcacctggcccggctccggccccgcccgcgtcagctctgcgcggtgattcactccctccttcgccccggggcccccttcccggccagacggcgggcaagacagctgggtgtacagcgtcctcgaaaccacgagcaagtgagcagatcctccgaggcaccagggactccagcccatgccatggcggattctgagcgcctctcggctcctggctgctgggccgcctgcaccaacttctcgcgcactcgaaagggaatcctcctgtttgctgagattatattatgcctggtgatcctgatctgcttcagtgcctccacaccaggctactcctccctgtcggtgattgagatgatccttgctgctattttctttgttgtctacatgtgtgacctgcacaccaagataccattcatcaactggccctggagtgatttcttccgaaccctcatagcggcaatcctctacctgatcacctccattgttgtccttgttgagagaggaaaccactccaaaatcgtcgcaggggtactgggcctaatcgctacgtgcctctttggctatgatgcctatgtcaccttccccgttcggcagccaagacatacagcagcccccactgaccccgcagatggcccggtgtaggcgaacttccctcatttctctctgcaatctgcaaataactcctccattgaaataactcctccccaccccaacaacaacattcccagcagaccaactcccaccccctctttgaggtaaaagtgcctttattgggagacttttgtcttccagcctgccaatcaaccctcctgggtgtggccaccatatgtgtgtgcctaggtcctccttctgcacgatccaataggagacaccagttctgactgaaccatgcccccacctaagtcacaaaatgagggaagtggggagttagatttcagagtccaggccctttttctctctcagggcaccccagccccacactcacatgtacgaagttctcaccccagctcctttgtgtggcaccctgatgagtatttaaagcccg

SEQ ID NO: 388208 - DNA, 1488 bp, Homo sapiens
gacctcaggtgatccacccgcctcggcctcccagtgttgggattacaggcgtgagccaccgcgcctggcccttttttttttttgtaacgcggcagctccaaaccccgctgagagtatatgcatgggaaaactttctgaaatcaaaaatattccgaattctggcaacatactgggccccaagtctttcggatttaactctgcctcggccgttttattcagttaaggaaactgagtcactccatcccaaagccagattcccgcggttctaagctgaagctgtctcgggtgcatttgcattccaaaaaggcgaagggtcccgctattactgctcctggtacctggagctgccaagcacccctgcgatggggcgccccgggggctgtgcgccaggctgggagtatccttggggggcggggcgagggggcttccggggcggcagcacctggcccggctccggccccgcccgcgtcagctctgcgcggtgattcactccctccttcgccccggggcccccttcccggccagacggcgggcaagacagctgggtgtacagcgtcctcgaaaccacgagcaagtgagcagatcctccgaggcaccagggactccagcccatgccatggcggattctgagcgcctctcggctcctggctgctgggccgcctgcaccaacttctcgcgcactcgaaagggaatcctcctgtttgctgagattatattatgcctggtgatcctgatctgcttcagtgcctccacaccaggctactcctccctgtcggtgattgagatgatccttgctgctattttctttgttgtctacatgtgtgacctgcacaccaagataccattcatcaactggccctggagtgatttcttccgaaccctcatagcggcaatcctctacctgatcacctccattgttgtccttgttgagagaggaaaccactccaaaatcgtcgcaggggtactgggcctaatcgctacgtgcctctttggctatgatgcctatgtcaccttccccgttcggcagccaagacatacagcagcccccactgaccccgcagatggcccggtgtaggcgaacttccctcatttctctctgcaatctgcaaataactcctccattgaaataactcctccccaccccaacaacaacattcccagcagaccaactcccaccccctctttgaggtaaaagtgcctttattgggagacttttgtcttccagcctgccaatcaaccctcctgggtgtggccaccatatgtgtgtgcctaggtcctccttctgcacgatccaataggagacaccagttctgactgaaccatgcccccaccttcaagccacgatgcagttcttgtctcgggcctgacgaggcatccctgcgcgagagtccctggggagcgataaagatggggagttgaaggtctccattgcagtgtcctgagcaggcatgggcctgcacaaatgcgggggcagagggatgcgctctc

SEQ ID NO: 388209 - DNA, 1289 bp, Homo sapiens
gacctcaggtgatccacccgcctcggcctcccagtgttgggattacaggcgtgagccaccgcgcctggcccttttttttttttgtaacgcggcagctccaaaccccgctgagagtatatgcatgggaaaactttctgaaatcaaaaatattccgaattctggcaacatactgggccccaagtctttcggatttaactctgcctcggccgttttattcagttaaggaaactgagtcactccatcccaaagccagattcccgcggttctaagctgaagctgtctcgggtgcatttgcattccaaaaaggcgaagggtcccgctattactgctcctggtacctggagctgccaagcacccctgcgatggggcgccccgggggctgtgcgccaggctgggagtatccttggggggcggggcgagggggcttccggggcggcagcacctggcccggctccggccccgcccgcgtcagctctgcgcggtgattcactccctccttcgccccggggcccccttcccggccagacggcgggcaagacagctgggtgtacagcgtcctcgaaaccacgagcaagtgagcagatcctccgaggcaccagggactccagcccatgccatggcggattctgagcgcctctcggctcctggctgctgggccgcctgcaccaacttctcgcgcactcgaaagggaatcctcctgtttgctgagattatattatgcctggtgatcctgatctgcttcagtgcctccacaccaggctactcctccctgtcggtgattgagatgatccttgctgctattttctttgttgtctacatgtgtgacctgcacaccaagataccattcatcaactggccctggagtgatttcttccgaaccctcatagcggcaatcctctacctgatcacctccattgttgtccttgttgagagaggaaaccactccaaaatcgtcgcaggggtactgggcctaatcgctacgtgcctctttggctatgatgcctatgtcaccttccccgttcggcagccaagacatacagcagcccccactgaccccgcagatggcccggtgtaggcgaacttccctcatttctctctgcaatctgcaaataactcctccattgaaataactccctaactccccacttccctcattttgtgacttaggtgggggcatggttcagtcagaactggtgtctcctattggatcgtgcagaaggaggacctaggcacacacatatggtggccacacccaggtggtcgactggtagcatgagtggaccgcctga

SEQ ID NO: 388210 - DNA, 1405 bp, Homo sapiens
gacctcaggtgatccacccgcctcggcctcccagtgttgggattacaggcgtgagccaccgcgcctggcccttttttttttttgtaacgcggcagctccaaaccccgctgagagtatatgcatgggaaaactttctgaaatcaaaaatattccgaattctggcaacatactgggccccaagtctttcggatttaactctgcctcggccgttttattcagttaaggaaactgagtcactccatcccaaagccagattcccgcggttctaagctgaagctgtctcgggtgcatttgcattccaaaaaggcgaagggtcccgctattactgctcctggtacctggagctgccaagcacccctgcgatggggcgccccgggggctgtgcgccaggctgggagtatccttggggggcggggcgagggggcttccggggcggcagcacctggcccggctccggccccgcccgcgtcagctctgcgcggtgattcactccctccttcgccccggggcccccttcccggccagacggcgggcaagacagctgggtgtacagcgtcctcgaaaccacgagcaagtgagcagatcctccgaggcaccagggactccagcccatgccatggcggattctgagcgcctctcggctcctggctgctgggccgcctgcaccaacttctcgcgcactcgaaagggaatcctcctgtttgctgagattatattatgcctggtgatcctgatctgcttcagtgcctccacaccaggctactcctccctgtcggtgattgagatgatccttgctgctattttctttgttgtctacatgtgtgacctgcacaccaagataccattcatcaactggccctggagtgatttcttccgaaccctcatagcggcaatcctctacctgatcacctccattgttgtccttgttgagagaggaaaccactccaaaatcgtcgcagggtactgggctaatcgtagtgccttggtagagctatgtacttccgtcggagcagaatagagccatgccgagatggccgtgtaggacttcctcatctcctgaactgaatactctcatgaatatctccaccacaaacattcagcagcaattttgaggtaaaagtgcctttattgggagacttttgtcttccagcctgccaatcaaccctcctgggtgtggccaccatatgtgtgtgcctaggtcctccttctgcacgatccaataggagacaccagttctgactgaaccatgcccccacctaagtcacaaaatgagggaagtggggagttagatttcagagtccaggccctaggttgggacccactccaaataatctcctcggtgtgggtggtggttctatagagggataaatgaataataaacattgttaaaatatacgataatgaa

SEQ ID NO: 388211 - DNA, 1434 bp, Homo sapiens
gacctcaggtgatccacccgcctcggcctcccagtgttgggattacaggcgtgagccaccgcgcctggcccttttttttttttgtaacgcggcagctccaaaccccgctgagagtatatgcatgggaaaactttctgaaatcaaaaatattccgaattctggcaacatactgggccccaagtctttcggatttaactctgcctcggccgttttattcagttaaggaaactgagtcactccatcccaaagccagattcccgcggttctaagctgaagctgtctcgggtgcatttgcattccaaaaaggcgaagggtcccgctattactgctcctggtacctggagctgccaagcacccctgcgatggggcgccccgggggctgtgcgccaggctgggagtatccttggggggcggggcgagggggcttccggggcggcagcacctggcccggctccggccccgcccgcgtcagctctgcgcggtgattcactccctccttcgccccggggcccccttcccggccagacggcgggcaagacagctgggtgtacagcgtcctcgaaaccacgagcaagtgagcagatcctccgaggcaccagggactccagcccatgccatggcggattctgagcgcctctcggctcctggctgctgggccgcctgcaccaacttctcgcgcactcgaaagggaatcctcctgtttgctgagattatattatgcctggtgatcctgatctgcttcagtgcctccacaccaggctactcctccctgtcggtgattgagatgatccttgctgctattttctttgttgtctacatgtgtgacctgcacaccaagataccattcatcaactggccctggagtgatttcttccgaaccctcatagcggcaatcctctacctgatcacctccattgttgtccttgttgagagaggaaaccactccaaaatcgtcgcaggggtaaaggccatgggagcagctctgaagcacagagcgaagggtttgaggagccagggaccatttctgcctttgcttctggcagaaatcgtgtgacccacagcaagtcacacttgtcctcagacatggaggaaagtctggcccaggacttggttttgcctcccaaggtcttcatttgctgtgaagggaagtcccttgtcagacacaaggaccttggtgagaggtacaaacaggcggcccctttgtcaacgcactagactaccatctgcaagaactttgtcccaaatgtagtagaaattggggccgggcgcagtggctcatgcctgtattcccagcactttgggaggctgaggccgaggcaggcagatcacttgaggtcaggagttcaagaccagcctggccaacatggcgaaaccccatctccactaaaaatacaaaaatcagccgggcatggtggtgggcgcctatagtcccag

SEQ ID NO: 388212 - DNA, 391 bp, Homo sapiens
aaaacgtcccagtcacgacgctgatgaacgtaccagggatgagctccatggacctccaggttcccatggtcagcccaccctgcagggggcacactgagtgattctagtgcttcgtgcctgccccggagggcatttggggacctgcaataaaatgctgacatccttatttctggatggtagattatatgcaaactttactctgattctctcaacctgccatttcagaaacttctgcaatgcatatgtgttagtttataatgagaaaaaaaaatcaataaacattatttaatgaaaggttatattatagactggaaaggcacaatttgcctaaaatacccagataaaatgagactgttaaagttttcacttgctgtttccccacatgccccgg

SEQ ID NO: 388213 - DNA, 495 bp, Homo sapiens
gtcgctggggctgatctagaggatcccaagctcaacaaaccatacaagataccaaatacagaacttattcatcagagttcccccttgctgaagagtgagttagtgaaagaagtaactaaatctgtggaagaagctcagcttgcccaagaagtcaaagtaaacatcattcaggaggaatatcaagaatatcgccaaacaaagggaaggagcctatacacacttctagaggagatacgggacctagctctcctggatgtttcaaacaattatggaatatgagaggctcttactttgacttcttgttgggagcttaagctcccaacaagagttccatgctagtgatggagatgtggaaaccaggtcaaggtgctgacttggggacgtgggtggtgactggggcatgtttcagttgaggtgcttgttcctccggtggggagggattgagaagaatgtgagttgcccatctaatttggcaagttgtcttgtagggagctt

SEQ ID NO: 388214 - DNA, 371 bp, Homo sapiens
acaaacaaagtctcctaatcttggacagctgcgcccagcccttcttcacctgccgtccagatgggaaactcttgtctagtgatgtgactcattacgtgatcccagactggaaagttgttcaagattatcttgagatccttgagtttcctgagttgaagggaattattttcatgcagacagcttgtcaagctgtgcagcatcaaagaggcaggagacagtataacaaactgcgaaacctgctgaaggatgcgcgtcatgattgcattctctttgctaatgaattccagcaatgctgctatctgccacgggaaagaggagagtccatggagaagtggcagaccaggaagaccccggggcattttacaaacgga

SEQ ID NO: 388215 - DNA, 4169 bp, Homo sapiens
ggtgctgctgctgaggaccttccagggccgcacgctgcggatcgtgcgcgagcactacctgcggccctgcgtgccctgccacagcccgctctgcccgcagcccgccgcctgcagccacgatgggaaactcttgtctagtgatgtgactcattacgtgatcccagactggaaagttgttcaagattatcttgagatccttgagtttcctgagttgaagggaattattttcatgcagacagcttgtcaagctgtgcagcatcaaagaggcaggagacagtataacaaactgcgaaacctgctgaaggatgcgcgtcatgattgcattctctttgctaatgaattccagcaatgctgctatctgccacgggaaagaggagagtccatggagaagtggcagaccaggagcatatacaacgcagctgtttggtactatcatcactgccaggacaggatgccaattgttatggtgacagaagatgaagaggcaattcagcagtatggaagtgaaacagaaggagtattcgtgattactttcaagaattacctggacaatttctggcctgatttaaaagctgcccacgagctttgtgattctatccttcagtctcgacgggagagagagaatgagagtcaggagagccatgggaaggagtacccagaacatcttcccctggaagtgttagaagctgggattaaatctggacgctatatccagggaattctgaatgtcaacaaacacagagcccaaatagaagcttttgttcgacttcaaggagccagcagtaaagattcagatttagtcagtgacatcctaatccacgggatgaaggctcgaaaccgctcaattcatggagatgtggtagttgtggagctgcttcctaaaaatgaatggaaaggaagaaccgtagccctgtgtgagaatgactgtgacgacaaggcttcgggcgagtccccaagtgagcccatgcctacaggtcgagtggtgggcatacttcagaagaactggcgggattatgtggtgacatttccgtccaaagaagaggtccaatctcagggcaaaaatgctcagaaaatcctggttacaccttgggattacagaattcccaaaattcgaattagcactcagcaagcagaaaccctccaggacttcagggtggtcgtgcgcatcgattcctgggagtcaacatctgtgtatccaaacggacattttgtgcgtgttttaggaagaatcggagatctggaaggggaaattgcaaccatcctggtggaaaacagtatttcagttattcctttctcagaagctcagatgtgtgagatgccagtaaacacaccagaaagtccctggaaggtgagtcctgaagaggaacaaaaacgtaaagacttgaggaaaagccatctcgtattcagcattgaccccaaaggttgtgaagatgtggatgacacactctcagtcagaaccttaaataatggcaacctggaacttggggtccacatcgcagatgtaacacactttgtggcaccaaattcttacattgatattgaagctagaacaagggccaccacttattatctagcagatcgtcgctatgacatgctgccttccgtcctcagtgcagatttgtgttcccttctgggaggcgttgataggtatgctgtaagcatcatgtgggaactggataaagcctcttatgaaattaagaaagtgtggtatggcagaaccattattcgatcagcatacaaactgttctatgaagcagcccaagaactactggatggaaacttaagcgttgttgatgatattccagaattcaaagacttgggtgagaagagcagacaagccaagctggaggagttggtgtgggcaattggaaagctgaccgacatagctcgccatgtcagagctaaacgagacggatgtggtgccctggaactggaaggggtagaggtttgcgtacagctagatgacaaaaagaacattcacgacctcatccccaagcagcccctggaagtccacgagacagtggctgaatgcatgatcctggccaaccactgggtcgccaaaaagatctgggagagcttccctcatcaggccttgctgcgccagcaccctcctccacaccaggagttcttttcagaactccgggaatgtgctaaagccaaaggcttcttcatagatacacggtccaataaaacactggctgattctctggataatgcgaacgacccccacgatcccattgtgaacaggctactgcgctccatggccacgcaggccatgtcgaatgctctgtacttctccaccggatcctgtgcggaggaggagttccatcattacggtcttgcattagataaatatacccactttacttctccaataagaagatattcagatattgtagtacaccgcttgttaatggcagccatttcaaaagataagaaaatggaaattaagggaaatctgttcagcaacaaagatcttgaggaattatgcagacatatcaacaacagaaaccaagcagcacagcattctcagaagcagtctactgagctcttccagtgcatgtacttcaaagacaaagaccctgccaccgaggagcgttgcatatctgacggagttatttattcaattagaacaaatggtgtgcttctatttataccaaggtttgggattaaaggtgctgcttatctaaaaaataaagatggtttagtcatctcatgtggcccagatagctgttctgaatggaaaccaggatcccttcaacgatttcaaaacaaaattacctctactacaacagatggggaatctgttacgttccatttgtttgaccatgtaaccgtaagaatatccatacaggcctcacgttgccattctgatacaatcagacttgaaataattagtaacaaaccatacaagataccaaatacagaacttattcatcagagttcccccttgctgaagagtgagttagtgaaagaagtaactaaatctgtggaagaagctcagcttgcccaagaagtcaaagtaaacatcattcaggaggaatatcaagaatatcgccaaacaaagggaaggagcctatacacacttctagaggagatacgggacctagctctcctggatgtttcaaacaattatggaatatgagaggctcttacttcactaagagctgtcatatgtgaatgttttacagtcttttcaaacttaacatttaatgtgtgtcactcagtgctctagtcgatcaggactgggtagctatttcgcatatatgtaaaatgttctcagccgggcacggtggctcacgcctgtaaccccagcactttgggaggctgaggcgggcggatcacgaggtcaggagattgagaccatcctggctaacacggtgaaacccagtctctactaaaaatacaaaaattagcccggcgtggtggcatgcgcctgtagtcccagctacttgggaggctgaagcaggagaattgcctgaacccaggaagaggaggttgcagtgagccgagatcgcaccactgcattccagcctgggcaacagagcgagactccatctcaaaaaaaaaaaaaaaaaaaaaaaaaaagttctctcattcattaaagttgcattaaataaagtataattaggtcactatggaaacagagttttcagtaatgagtggacagtaagtggtggctctgcagatggcccctttctaataagtttaataaacccgaaattactggttatctcgtctccaatcagttctttcaaatgttttatttttccagtaattacgtttgggtcataggcccctctgacatttgtcaggtaattttcagtcactttcagataataagacttagtcctgagtccacttctccacttaaaaattcctatttcatatttgactcaacccttacctgctgtctccagtactagctgggattaggacacagggcgggtggtaggatgcacaggtaaagttctgtcacaggccttccttcccactctcccattttgatgaggtgcattggccttccccttgttggaaacttgttactttgccagcaaacaccccactagaaaaattaactctaggccgagcgcagtggctcacgcctataatcccagcactttgggagtccgaggcgggtggatcacaaggtcaggagttcaagacca

SEQ ID NO: 388216 - DNA, 4293 bp, Homo sapiens
ggtgctgctgctgaggaccttccagggccgcacgctgcggatcgtgcgcgagcactacctgcggccctgcgtgccctgccacagcccgctctgcccgcagcccgccgcctgcagccacgatgggaaactcttgtctagtgatgtgactcattacgtgatcccagactggaaagttgttcaagattatcttgagatccttgagtttcctgagttgaagggaattattttcatgcagacagcttgtcaagctgtgcagcatcaaagaggcaggagagacagggtctcattctgttcctcaggctggagttcagtggcacaatcatagctcactgcagcctcagactcctgggcttaaaggaccctcctgcctcagcctcccgaggagctggaactacagacagtataacaaactgcgaaacctgctgaaggatgcgcgtcatgattgcattctctttgctaatgaattccagcaatgctgctatctgccacgggaaagaggagagtccatggagaagtggcagaccaggagcatatacaacgcagctgtttggtactatcatcactgccaggacaggatgccaattgttatggtgacagaagatgaagaggcaattcagcagtatggaagtgaaacagaaggagtattcgtgattactttcaagaattacctggacaatttctggcctgatttaaaagctgcccacgagctttgtgattctatccttcagtctcgacgggagagagagaatgagagtcaggagagccatgggaaggagtacccagaacatcttcccctggaagtgttagaagctgggattaaatctggacgctatatccagggaattctgaatgtcaacaaacacagagcccaaatagaagcttttgttcgacttcaaggagccagcagtaaagattcagatttagtcagtgacatcctaatccacgggatgaaggctcgaaaccgctcaattcatggagatgtggtagttgtggagctgcttcctaaaaatgaatggaaaggaagaaccgtagccctgtgtgagaatgactgtgacgacaaggcttcgggcgagtccccaagtgagcccatgcctacaggtcgagtggtgggcatacttcagaagaactggcgggattatgtggtgacatttccgtccaaagaagaggtccaatctcagggcaaaaatgctcagaaaatcctggttacaccttgggattacagaattcccaaaattcgaattagcactcagcaagcagaaaccctccaggacttcagggtggtcgtgcgcatcgattcctgggagtcaacatctgtgtatccaaacggacattttgtgcgtgttttaggaagaatcggagatctggaaggggaaattgcaaccatcctggtggaaaacagtatttcagttattcctttctcagaagctcagatgtgtgagatgccagtaaacacaccagaaagtccctggaaggtgagtcctgaagaggaacaaaaacgtaaagacttgaggaaaagccatctcgtattcagcattgaccccaaaggttgtgaagatgtggatgacacactctcagtcagaaccttaaataatggcaacctggaacttggggtccacatcgcagatgtaacacactttgtggcaccaaattcttacattgatattgaagctagaacaagggccaccacttattatctagcagatcgtcgctatgacatgctgccttccgtcctcagtgcagatttgtgttcccttctgggaggcgttgataggtatgctgtaagcatcatgtgggaactggataaagcctcttatgaaattaagaaagtgtggtatggcagaaccattattcgatcagcatacaaactgttctatgaagcagcccaagaactactggatggaaacttaagcgttgttgatgatattccagaattcaaagacttgggtgagaagagcagacaagccaagctggaggagttggtgtgggcaattggaaagctgaccgacatagctcgccatgtcagagctaaacgagacggatgtggtgccctggaactggaaggggtagaggtttgcgtacagctagatgacaaaaagaacattcacgacctcatccccaagcagcccctggaagtccacgagacagtggctgaatgcatgatcctggccaaccactgggtcgccaaaaagatctgggagagcttccctcatcaggccttgctgcgccagcaccctcctccacaccaggagttcttttcagaactccgggaatgtgctaaagccaaaggcttcttcatagatacacggtccaataaaacactggctgattctctggataatgcgaacgacccccacgatcccattgtgaacaggctactgcgctccatggccacgcaggccatgtcgaatgctctgtacttctccaccggatcctgtgcggaggaggagttccatcattacggtcttgcattagataaatatacccactttacttctccaataagaagatattcagatattgtagtacaccgcttgttaatggcagccatttcaaaagataagaaaatggaaattaagggaaatctgttcagcaacaaagatcttgaggaattatgcagacatatcaacaacagaaaccaagcagcacagcattctcagaagcagtctactgagctcttccagtgcatgtacttcaaagacaaagaccctgccaccgaggagcgttgcatatctgacggagttatttattcaattagaacaaatggtgtgcttctatttataccaaggtttgggattaaaggtgctgcttatctaaaaaataaagatggtttagtcatctcatgtggcccagatagctgttctgaatggaaaccaggatcccttcaacgatttcaaaacaaaattacctctactacaacagatggggaatctgttacgttccatttgtttgaccatgtaaccgtaagaatatccatacaggcctcacgttgccattctgatacaatcagacttgaaataattagtaacaaaccatacaagataccaaatacagaacttattcatcagagttcccccttgctgaagagtgagttagtgaaagaagtaactaaatctgtggaagaagctcagcttgcccaagaagtcaaagtaaacatcattcaggaggaatatcaagaatatcgccaaacaaagggaaggagcctatacacacttctagaggagatacgggacctagctctcctggatgtttcaaacaattatggaatatgagaggctcttacttcactaagagctgtcatatgtgaatgttttacagtcttttcaaacttaacatttaatgtgtgtcactcagtgctctagtcgatcaggactgggtagctatttcgcatatatgtaaaatgttctcagccgggcacggtggctcacgcctgtaaccccagcactttgggaggctgaggcgggcggatcacgaggtcaggagattgagaccatcctggctaacacggtgaaacccagtctctactaaaaatacaaaaattagcccggcgtggtggcatgcgcctgtagtcccagctacttgggaggctgaagcaggagaattgcctgaacccaggaagaggaggttgcagtgagccgagatcgcaccactgcattccagcctgggcaacagagcgagactccatctcaaaaaaaaaaaaaaaaaaaaaaaaaaagttctctcattcattaaagttgcattaaataaagtataattaggtcactatggaaacagagttttcagtaatgagtggacagtaagtggtggctctgcagatggcccctttctaataagtttaataaacccgaaattactggttatctcgtctccaatcagttctttcaaatgttttatttttccagtaattacgtttgggtcataggcccctctgacatttgtcaggtaattttcagtcactttcagataataagacttagtcctgagtccacttctccacttaaaaattcctatttcatatttgactcaacccttacctgctgtctccagtactagctgggattaggacacagggcgggtggtaggatgcacaggtaaagttctgtcacaggccttccttcccactctcccattttgatgaggtgcattggccttccccttgttggaaacttgttactttgccagcaaacaccccactagaaaaattaactctaggccgagcgcagtggctcacgcctataatcccagcactttgggagtccgaggcgggtggatcacaaggtcaggagttcaagacca

SEQ ID NO: 388217 - DNA, 4086 bp, Homo sapiens
acaaacaaagtctcctaatcttggacagctgcgcccagcccttcttcacctgccgtccaggtatcatcctagtcttccctccgtctctgggatgggaaactcttgtctagtgatgtgactcattacgtgatcccagactggaaagttgttcaagattatcttgagatccttgagtttcctgagttgaagggaattattttcatgcagacagcttgtcaagctgtgcagcatcaaagaggcaggagacagtataacaaactgcgaaacctgctgaaggatgcgcgtcatgattgcattctctttgctaatgaattccagcaatgctgctatctgccacgggaaagaggagagtccatggagaagtggcagaccaggagcatatacaacgcagctgtttggtactatcatcactgccaggacaggatgccaattgttatggtgacagaagatgaagaggcaattcagcagtatggaagtgaaacagaaggagtattcgtgattactttcaagaattacctggacaatttctggcctgatttaaaagctgcccacgagctttgtgattctatccttcagtctcgacgggagagagagaatgagagtcaggagagccatgggaaggagtacccagaacatcttcccctggaagtgttagaagctgggattaaatctggacgctatatccagggaattctgaatgtcaacaaacacagagcccaaatagaagcttttgttcgacttcaaggagccagcagtaaagattcagatttagtcagtgacatcctaatccacgggatgaaggctcgaaaccgctcaattcatggagatgtggtagttgtggagctgcttccaaggcttcgggcgagtccccaagtgagcccatgcctacaggtcgagtggtgggcatacttcagaagaactggcgggattatgtggtgacatttccgtccaaagaagaggtccaatctcagggcaaaaatgctcagaaaatcctggttacaccttgggattacagaattcccaaaattcgaattagcactcagcaagcagaaaccctccaggacttcagggtggtcgtgcgcatcgattcctgggagtcaacatctgtgtatccaaacggacattttgtgcgtgttttaggaagaatcggagatctggaaggggaaattgcaaccatcctggtggaaaacagtatttcagttattcctttctcagaagctcagatgtgtgagatgccagtaaacacaccagaaagtccctggaaggtgagtcctgaagaggaacaaaaacgtaaagacttgaggaaaagccatctcgtattcagcattgaccccaaaggttgtgaagatgtggatgacacactctcagtcagaaccttaaataatggcaacctggaacttggggtccacatcgcagatgtaacacactttgtggcaccaaattcttacattgatattgaagctagaacaagggccaccacttattatctagcagatcgtcgctatgacatgctgccttccgtcctcagtgcagatttgtgttcccttctgggaggcgttgataggtatgctgtaagcatcatgtgggaactggataaagcctcttatgaaattaagaaagtgtggtatggcagaaccattattcgatcagcatacaaactgttctatgaagcagcccaagaactactggatggaaacttaagcgttgttgatgatattccagaattcaaagacttgggtgagaagagcagacaagccaagctggaggagttggtgtgggcaattggaaagctgaccgacatagctcgccatgtcagagctaaacgagacggatgtggtgccctggaactggaaggggtagaggtttgcgtacagctagatgacaaaaagaacattcacgacctcatccccaagcagcccctggaagtccacgagacagtggctgaatgcatgatcctggccaaccactgggtcgccaaaaagatctgggagagcttccctcatcaggccttgctgcgccagcaccctcctccacaccaggagttcttttcagaactccgggaatgtgctaaagccaaaggcttcttcatagatacacggtccaataaaacactggctgattctctggataatgcgaacgacccccacgatcccattgtgaacaggctactgcgctccatggccacgcaggccatgtcgaatgctctgtacttctccaccggatcctgtgcggaggaggagttccatcattacggtcttgcattagataaatatacccactttacttctccaataagaagatattcagatattgtagtacaccgcttgttaatggcagccatttcaaaagataagaaaatggaaattaagggaaatctgttcagcaacaaagatcttgaggaattatgcagacatatcaacaacagaaaccaagcagcacagcattctcagaagcagtctactgagctcttccagtgcatgtacttcaaagacaaagaccctgccaccgaggagcgttgcatatctgacggagttatttattcaattagaacaaatggtgtgcttctatttataccaaggtttgggattaaaggtgctgcttatctaaaaaataaagatggtttagtcatctcatgtggcccagatagctgttctgaatggaaaccaggatcccttcaacgatttcaaaacaaaattacctctactacaacagatggggaatctgttacgttccatttgtttgaccatgtaaccgtaagaatatccatacaggcctcacgttgccattctgatacaatcagacttgaaataattagtaacaaaccatacaagataccaaatacagaacttattcatcagagttcccccttgctgaagagtgagttagtgaaagaagtaactaaatctgtggaagaagctcagcttgcccaagaagtcaaagtaaacatcattcaggaggaatatcaagaatatcgccaaacaaagggaaggagcctatacacacttctagaggagatacgggacctagctctcctggatgtttcaaacaattatggaatatgagaggctcttacttcactaagagctgtcatatgtgaatgttttacagtcttttcaaacttaacatttaatgtgtgtcactcagtgctctagtcgatcaggactgggtagctatttcgcatatatgtaaaatgttctcagccgggcacggtggctcacgcctgtaaccccagcactttgggaggctgaggcgggcggatcacgaggtcaggagattgagaccatcctggctaacacggtgaaacccagtctctactaaaaatacaaaaattagcccggcgtggtggcatgcgcctgtagtcccagctacttgggaggctgaagcaggagaattgcctgaacccaggaagaggaggttgcagtgagccgagatcgcaccactgcattccagcctgggcaacagagcgagactccatctcaaaaaaaaaaaaaaaaaaaaaaaaaaagttctctcattcattaaagttgcattaaataaagtataattaggtcactatggaaacagagttttcagtaatgagtggacagtaagtggtggctctgcagatggcccctttctaataagtttaataaacccgaaattactggttatctcgtctccaatcagttctttcaaatgttttatttttccagtaattacgtttgggtcataggcccctctgacatttgtcaggtaattttcagtcactttcagataataagacttagtcctgagtccacttctccacttaaaaattcctatttcatatttgactcaacccttacctgctgtctccagtactagctgggattaggacacagggcgggtggtaggatgcacaggtaaagttctgtcacaggccttccttcccactctcccattttgatgaggtgcattggccttccccttgttggaaacttgttactttgccagcaaacaccccactagaaaaattaactctaggccgagcgcagtggctcacgcctataatcccagcactttgggagtccgaggcgggtggatcacaaggtcaggagttcaagacca

SEQ ID NO: 388218 - DNA, 3964 bp, Homo sapiens
acaaacaaagtctcctaatcttggacagctgcgcccagcccttcttcacctgccgtccaggtatcatcctagtcttccctccgtctctgggatgggaaactcttgtctagtgatgtgactcattacgtgatcccagactggaaagttgttcaagattatcttgagatccttgagtttcctgagttgaagggaattattttcatgcagacagcttgtcaagctgtgcagcatcaaagaggcaggagacagtataacaaactgcgaaacctgctgaaggatgcgcgtcatgattgcattctctttgctaatgaattccagcaatgctgctatctgccacgggaaagaggagagtccatggagaagtggcagaccaggagcatatacaacgcagctgtttggtactatcatcactgccaggacaggatgccaattgttatggtgacagaagatgaagaggcaattcagcagtatggaagtgaaacagaaggagtattcgtgattactttcaagggaattctgaatgtcaacaaacacagagcccaaatagaagcttttgttcgacttcaaggagccagcagtaaagattcagatttagtcagtgacatcctaatccacgggatgaaggctcgaaaccgctcaattcatggagatgtggtagttgtggagctgcttcctaaaaatgaatggaaaggaagaaccgtagccctgtgtgagaatgactgtgacgacaaggcttcgggcgagtccccaagtgagcccatgcctacaggtcgagtggtgggcatacttcagaagaactggcgggattatgtggtgacatttccgtccaaagaagaggtccaatctcagggcaaaaatgctcagaaaatcctggttacaccttgggattacagaattcccaaaattcgaattagcactcagcaagcagaaaccctccaggacttcagggtggtcgtgcgcatcgattcctgggagtcaacatctgtgtatccaaacggacattttgtgcgtgttttaggaagaatcggagatctggaaggggaaattgcaaccatcctggtggaaaacagtatttcagttattcctttctcagaagctcagatgtgtgagatgccagtaaacacaccagaaagtccctggaaggtgagtcctgaagaggaacaaaaacgtaaagacttgaggaaaagccatctcgtattcagcattgaccccaaaggttgtgaagatgtggatgacacactctcagtcagaaccttaaataatggcaacctggaacttggggtccacatcgcagatgtaacacactttgtggcaccaaattcttacattgatattgaagctagaacaagggccaccacttattatctagcagatcgtcgctatgacatgctgccttccgtcctcagtgcagatttgtgttcccttctgggaggcgttgataggtatgctgtaagcatcatgtgggaactggataaagcctcttatgaaattaagaaagtgtggtatggcagaaccattattcgatcagcatacaaactgttctatgaagcagcccaagaactactggatggaaacttaagcgttgttgatgatattccagaattcaaagacttgggtgagaagagcagacaagccaagctggaggagttggtgtgggcaattggaaagctgaccgacatagctcgccatgtcagagctaaacgagacggatgtggtgccctggaactggaaggggtagaggtttgcgtacagctagatgacaaaaagaacattcacgacctcatccccaagcagcccctggaagtccacgagacagtggctgaatgcatgatcctggccaaccactgggtcgccaaaaagatctgggagagcttccctcatcaggccttgctgcgccagcaccctcctccacaccaggagttcttttcagaactccgggaatgtgctaaagccaaaggcttcttcatagatacacggtccaataaaacactggctgattctctggataatgcgaacgacccccacgatcccattgtgaacaggctactgcgctccatggccacgcaggccatgtcgaatgctctgtacttctccaccggatcctgtgcggaggaggagttccatcattacggtcttgcattagataaatatacccactttacttctccaataagaagatattcagatattgtagtacaccgcttgttaatggcagccatttcaaaagataagaaaatggaaattaagggaaatctgttcagcaacaaagatcttgaggaattatgcagacatatcaacaacagaaaccaagcagcacagcattctcagaagcagtctactgagctcttccagtgcatgtacttcaaagacaaagaccctgccaccgaggagcgttgcatatctgacggagttatttattcaattagaacaaatggtgtgcttctatttataccaaggtttgggattaaaggtgctgcttatctaaaaaataaagatggtttagtcatctcatgtggcccagatagctgttctgaatggaaaccaggatcccttcaacgatttcaaaacaaaattacctctactacaacagatggggaatctgttacgttccatttgtttgaccatgtaaccgtaagaatatccatacaggcctcacgttgccattctgatacaatcagacttgaaataattagtaacaaaccatacaagataccaaatacagaacttattcatcagagttcccccttgctgaagagtgagttagtgaaagaagtaactaaatctgtggaagaagctcagcttgcccaagaagtcaaagtaaacatcattcaggaggaatatcaagaatatcgccaaacaaagggaaggagcctatacacacttctagaggagatacgggacctagctctcctggatgtttcaaacaattatggaatatgagaggctcttacttcactaagagctgtcatatgtgaatgttttacagtcttttcaaacttaacatttaatgtgtgtcactcagtgctctagtcgatcaggactgggtagctatttcgcatatatgtaaaatgttctcagccgggcacggtggctcacgcctgtaaccccagcactttgggaggctgaggcgggcggatcacgaggtcaggagattgagaccatcctggctaacacggtgaaacccagtctctactaaaaatacaaaaattagcccggcgtggtggcatgcgcctgtagtcccagctacttgggaggctgaagcaggagaattgcctgaacccaggaagaggaggttgcagtgagccgagatcgcaccactgcattccagcctgggcaacagagcgagactccatctcaaaaaaaaaaaaaaaaaaaaaaaaaaagttctctcattcattaaagttgcattaaataaagtataattaggtcactatggaaacagagttttcagtaatgagtggacagtaagtggtggctctgcagatggcccctttctaataagtttaataaacccgaaattactggttatctcgtctccaatcagttctttcaaatgttttatttttccagtaattacgtttgggtcataggcccctctgacatttgtcaggtaattttcagtcactttcagataataagacttagtcctgagtccacttctccacttaaaaattcctatttcatatttgactcaacccttacctgctgtctccagtactagctgggattaggacacagggcgggtggtaggatgcacaggtaaagttctgtcacaggccttccttcccactctcccattttgatgaggtgcattggccttccccttgttggaaacttgttactttgccagcaaacaccccactagaaaaattaactctaggccgagcgcagtggctcacgcctataatcccagcactttgggagtccgaggcgggtggatcacaaggtcaggagttcaagacca

SEQ ID NO: 388219 - DNA, 1896 bp, Homo sapiens
  misc_feature (73)..(73): n is a, c, g, or t
cagatataagtgtcaagggaaggttaatggttgatattgctagggtggcgcttccaattaggtgcatgagtangtggcctgcagtaatgttagcggttaggcgtacggccaggactattggttgaaatggtcgccacggattggcgaccatttcaaaagataagaaaatggaaattaagggaaatctgttcagcaacaaagatcttgaggaattatgcagacatatcaacaacagaaaccaagcagcacagcattctcagaagcagtctactgagctcttccagtgcatgtacttcaaagacaaagaccctgccaccgaggagcgttgcatatctgacggagttatttattcaattagaacaaatggtgtgcttctatttataccaaggtttgggattaaaggtgctgcttatctaaaaaataaagatggtttagtcatctcatgtggcccagatagctgttctgaatggaaaccaggatcccttcaacgatttcaaaacaaaattacctctactacaacagatggggaatctgttacgttccatttgtttgaccatgtaaccgtaagaatatccatacaggcctcacgttgccattctgatacaatcagacttgaaataattagtaacaaaccatacaagataccaaatacagaacttattcatcagagttcccccttgctgaagagtgagttagtgaaagaagtaactaaatctgtggaagaagctcagcttgcccaagaagtcaaagtaaacatcattcaggaggaatatcaagaatatcgccaaacaaagggaaggagcctatacacacttctagaggagatacgggacctagctctcctggatgtttcaaacaattatggaatatgagaggctcttacttcactaagagctgtcatatgtgaatgttttacagtcttttcaaacttaacatttaatgtgtgtcactcagtgctctagtcgatcaggactgggtagctatttcgcatatatgtaaaatgttctcagccgggcacggtggctcacgcctgtaaccccagcactttgggaggctgaggcgggcggatcacgaggtcaggagattgagaccatcctggctaacacggtgaaacccagtctctactaaaaatacaaaaattagcccggcgtggtggcatgcgcctgtagtcccagctacttgggaggctgaagcaggagaattgcctgaacccaggaagaggaggttgcagtgagccgagatcgcaccactgcattccagcctgggcaacagagcgagactccatctcaaaaaaaaaaaaaaaaaaaaaaaaaaagttctctcattcattaaagttgcattaaataaagtataattaggtcactatggaaacagagttttcagtaatgagtggacagtaagtggtggctctgcagatggcccctttctaataagtttaataaacccgaaattactggttatctcgtctccaatcagttctttcaaatgttttatttttccagtaattacgtttgggtcataggcccctctgacatttgtcaggtaattttcagtcactttcagataataagacttagtcctgagtccacttctccacttaaaaattcctatttcatatttgactcaacccttacctgctgtctccagtactagctgggattaggacacagggcgggtggtaggatgcacaggtaaagttctgtcacaggccttccttcccactctcccattttgatgaggtgcattggccttccccttgttggaaacttgttactttgccagcaaacaccccactagaaaaattaactctaggccgagcgcagtggctcacgcctataatcccagcactttgggagtccgaggcgggtggatcacaaggtcaggagttcaagacca

SEQ ID NO: 388220 - DNA, 2636 bp, Homo sapiens
acaaacaaagtctcctaatcttggacagctgcgcccagcccttcttcacctgccgtccaggtatcatcctagtcttccctccgtctctgggatgggaaactcttgtctagtgatgtgactcattacgtgatcccagactggaaagttgttcaagattatcttgagatccttgagtttcctgagttgaagggaattattttcatgcagacagcttgtcaagctgtgcagcatcaaagaggcaggagacagtataacaaactgcgaaacctgctgaaggatgcgcgtcatgattgcattctctttgctaatgaattccagcaatgctgctatctgccacgggaaagaggagagtccatggagaagtggcagaccaggagcatatacaacgcagctgtttggtactatcatcactgccaggacaggatgccaattgttatggtgacagaagatgaagaggcaattcagcagtatggaagtgaaacagaaggagtattcgtgattactttcaagaattacctggacaatttctggcctgatttaaaagctgcccacgagctttgtgattctatccttcagtctcgacgggagagagagaatgagagtcaggagagccatgggaaggagtacccagaacatcttcccctggaagtgttagaagctgggattaaatctggacgctatatccagggaattctgaatgtcaacaaacacagagcccaaatagaagcttttgttcgacttcaaggagccagcagtaaagattcagatttagtcagtgacatcctaatccacgggatgaaggctcgaaaccgctcaattcatggagatgtggtagttgtggagctgcttcctaaaaatgaatggaaaggaagaaccgtagccctgtgtgagaatgactgtgacgacaaggcttcgggcgagtccccaagtgagcccatgcctacaggtcgagtggtgggcatacttcagaagaactggcgggattatgtggtgacatttccgtccaaagaagaggtccaatctcagggcaaaaatgctcagaaaatcctggttacaccttgggattacagaattcccaaaattcgaattagcactcagcaagcagaaaccctccaggacttcagggtggtcgtgcgcatcgattcctgggagtcaacatctgtgtatccaaacggacattttgtgcgtgttttaggaagaatcggagatctggaaggggaaattgcaaccatcctggtggaaaacagtatttcagttattcctttctcagaagctcagatgtgtgagatgccagtaaacacaccagaaagtccctggaaggtgagtcctgaagaggaacaaaaacgtaaagacttgaggaaaagccatctcgtattcagcattgaccccaaaggttgtgaagatgtggatgacacactctcagtcagaaccttaaataatggcaacctggaacttggggtccacatcgcagatgtaacacactttgtggcaccaaattcttacattgatattgaagctagaacaagggccaccacttattatctagcagatcgtcgctatgacatgctgccttccgtcctcagtgcagatttgtgttcccttctgggaggcgttgataggtatgctgtaagcatcatgtgggaactggataaagcctcttatgaaattaagaaagtgtggtatggcagaaccattattcgatcagcatacaaactgttctatgaagcagcccaagaactactggatggaaacttaagcgttgttgatgatattccagaattcaaagacttgggtgagaagagcagacaagccaagctggaggagttggtgtgggcaattggaaagctgaccgacatagctcgccatgtcagagctaaacgagacggatgtggtgccctggaactggaaggggtagaggtttgcgtacagctagatgacaaaaagaacattcacgacctcatccccaagcagcccctggaagtccacgagacagtggctgaatgcatgatcctggccaaccactgggtcgccaaaaagatctgggagagcttccctcatcaggccttgctgcgccagcaccctcctccacaccaggagttcttttcagaactccgggaatgtgctaaagccaaaggcttcttcatagatacacggtccaataaaacactggctgattctctggataatgcgaacgacccccacgatcccattgtgaacaggctactgcgctccatggccacgcaggccatgtcgaatgctctgtacttctccaccggatcctgtgcggaggaggagttccatcattacggtcttgcattagataaatatacccactttacttctccaataagaagatattcagatattgtagtacaccgcttgttaatggcagccatttcaaaagataagaaaatggaaattaagggaaatctgttcagcaacaaagatcttgaggaattatgcagacatatcaacaacagaaaccaagtaagagggaatttcaaaattctcttacctgtcatctcttgctaagaaaatatcagctttattgtgtagtaccgtgaagtatcatatattctagcaaattaaattctagaattattctaaccagtgctttcagaacatttgtagatgtt

SEQ ID NO: 388221 - DNA, 2308 bp, Homo sapiens
  misc_feature (242)..(242): n is a, c, g, or t
  misc_feature (276)..(276): n is a, c, g, or t
  misc_feature (309)..(309): n is a, c, g, or t
aacacctctaaaccatttgattaggtttttatgagccaagttcttacatattccattcatcatgaccttttagtcaatgtagcaacagggattccaacattttgctaaggaatggcccgctagggaaacttttaaatgttcatttaacttagttttgtttagctagttaaaacacactagcatttgtctagtttcctcatctggatgaggaaacctgctgtgatggcagtgataaaattttnccttttaggaatttgcaaataaaccactgcaatnatagacactttaaaattatccaatttaaattgncctatctagaattacttatttcacttgaaatgtatggtttcaggaaaattttcaatttaacttgaagggattatctcttattttgcttggaataatggcatctcagaaacatgggtttacctgtgatttttttgtttgggtgaatgcttaaaaacaaaaaaaaatttacatatgcattttatggatacacacacacttctatatccattttagggtctttcttatccagcaaaatactttgtttccatctgctaaggtgaaataaatacgtggaggtaaaccacaggaaaagtgatttgtttttaatctaggagaaaaactagtattctagataagcatacaagatctgtgtactaagaatacattgtctctggatttatattctggtcataatataggtttgggattaaaggtgctgcttatctaaaaaataaagatggtttagtcatctcatgtggcccagatagctgttctgaatggaaaccaggatcccttcaacgatttcaaaacaaaattacctctactacaacagatggggaatctgttacgttccatttgtttgaccatgtaaccgtaagtctgtgtttctattaagtattattaatattttaaatgtaaggaataaataatgtgatttagtaatatgtattttcttctctatgctaggtaagaatatccatacaggcctcacgttgccattctgatacaatcagacttgaaataattagtaacaaaccatacaagataccaaatacagaacttattcatcagagttcccccttgctgaagagtgagttagtgaaagaagtaactaaatctgtggaagaagctcagcttgcccaagaagtcaaagtaaacatcattcaggaggaatatcaagaatatcgccaaacaaagggaaggagcctatacacacttctagaggagatacgggacctagctctcctggatgtttcaaacaattatggaatatgagaggctcttacttcactaagagctgtcatatgtgaatgttttacagtcttttcaaacttaacatttaatgtgtgtcactcagtgctctagtcgatcaggactgggtagctatttcgcatatatgtaaaatgttctcagccgggcacggtggctcacgcctgtaaccccagcactttgggaggctgaggcgggcggatcacgaggtcaggagattgagaccatcctggctaacacggtgaaacccagtctctactaaaaatacaaaaattagcccggcgtggtggcatgcgcctgtagtcccagctacttgggaggctgaagcaggagaattgcctgaacccaggaagaggaggttgcagtgagccgagatcgcaccactgcattccagcctgggcaacagagcgagactccatctcaaaaaaaaaaaaaaaaaaaaaaaaaaagttctctcattcattaaagttgcattaaataaagtataattaggtcactatggaaacagagttttcagtaatgagtggacagtaagtggtggctctgcagatggcccctttctaataagtttaataaacccgaaattactggttatctcgtctccaatcagttctttcaaatgttttatttttccagtaattacgtttgggtcataggcccctctgacatttgtcaggtaattttcagtcactttcagataataagacttagtcctgagtccacttctccacttaaaaattcctatttcatatttgactcaacccttacctgctgtctccagtactagctgggattaggacacagggcgggtggtaggatgcacaggtaaagttctgtcacaggccttccttcccactctcccattttgatgaggtgcattggccttccccttgttggaaacttgttactttgccagcaaacaccccactagaaaaattaactctaggccgagcgcagtggctcacgcctataatcccagcactttgggagtccgaggcgggtggatcacaaggtcaggagttcaagacca

SEQ ID NO: 388222 - DNA, 953 bp, Homo sapiens
acaaacaaagtctcctaatcttggacagctgcgcccagcccttcttcacctgccgtccaggtatcatcctagtcttccctccgtctctgggatgggaaactcttgtctagtgatgtgactcattacgtgatcccagactggaaagttgttcaagattatcttgagatccttgagtttcctgagttgaagggaattattttcatgcagacagcttgtcaagctgtgcagcatcaaagaggcaggagacagtataacaaactgcgaaacctgctgaaggatgcgcgtcatgattgcattctctttgctaatgaattccacctgggcaacagagcgagactccatctcaaaaaaaaaaaaaaaaaaaaaaaaaaagttctctcattcattaaagttgcattaaataaagtataattaggtcactatggaaacagagttttcagtaatgagtggacagtaagtggtggctctgcagatggcccctttctaataagtttaataaacccgaaattactggttatctcgtctccaatcagttctttcaaatgttttatttttccagtaattacgtttgggtcataggcccctctgacatttgtcaggtaattttcagtcactttcagataataagacttagtcctgagtccacttctccacttaaaaattcctatttcatatttgactcaacccttacctgctgtctccagtactagctgggattaggacacagggcgggtggtaggatgcacaggtaaagttctgtcacaggccttccttcccactctcccattttgatgaggtgcattggccttccccttgttggaaacttgttactttgccagcaaacaccccactagaaaaattaactctaggccgagcgcagtggctcacgcctataatcccagcactttgggagtccgaggcgggtggatcacaaggtcaggagttcaagacca

SEQ ID NO: 388223 - DNA, 250 bp, Homo sapiens
gtgaatcataccatattcctatgtgtggctgtaactttgcgctagttattttaaaatagtttttgtttattttgatcttttgctttctttttgaaggtcttgcattagataaatatacccactttacttctccaataagaagatattcagatattgtagtacaccgcttgttaatggcagccatttcaaaagataagaaaatggaaattaagggaaatctgttcagcaacaaagatcttgaggaattatg

SEQ ID NO: 388224 - DNA, 649 bp, Homo sapiens
  misc_feature (73)..(73): n is a, c, g, or t
cagatataagtgtcaagggaaggttaatggttgatattgctagggtggcgcttccaattaggtgcatgagtangtggcctgcagtaatgttagcggttaggcgtacggccaggactattggttgaaatggtcgccacggattggcgaccatttcaaaagataagaaaatggaaattaagggaaatctgttcagcaacaaagatcttgaggaattatgcagacatatcaacaacagaaaccaagcagcacagcattctcagaagcagtctactgagctcttccagtgcatgtacttcaaagacaaagaccctgccaccgaggagcgttgcatatctgacggagttatttattcaattagaacaaatggtgtgcttctatttataccaaggtttgggattaaaggtgctgcttatctaaaaaataaagatggtttagtcatctcatgtggcccagatagctgttctgaatggaaaccaggatcccttcaacgatttcaaaacaaaattacctctactacaacagatggggaatctgttacgttccatttgtttgaccatgtaaccgtaagaatatccatacaggcctcacgttgccattctgatacaatcagacttgaaataattagtggtcgccaatccggggtaccgag

SEQ ID NO: 388225 - DNA, 501 bp, Homo sapiens
aaaagaaaaagctttacttgcaggagtactgattagacttcgagtatatcatgcgcggaatgcctcactggtgtgccattcccttggctttatgggttttttctgtgctgccccaaacacagatttagtcagtgacatcctaatccacgggatgaaggctcgaaaccgctcaattcatggagatgtggtagttgtggagctgcttccccgggcgtgatggcaggcgcctgtagtcccagctactccagaggctgaggcaggagaatgacgtgaacccaggaggtagagcttgcagtgagccgagattgcaccactgtactccagcctgggtgacagagtgagactccatatctcaaaaaaaaaaagaaatgcaagtaagacatgtgtaatacttttcctgtacccaaggtgaacatgacccaaatttgctgatctctaatttcatgaactataaatgggtttcattttataaaataattcattttctaagacatttttgag

SEQ ID NO: 388226 - DNA, 4141 bp, Homo sapiens
acaaacaaagtctcctaatcttggacagctgcgcccagcccttcttcacctgccgtccaggtatcatcctagtcttccctccgtctctgggatgggaaactcttgtctagtgatgtgactcattacgtgatcccagactggaaagttgttcaagattatcttgagatccttgagtttcctgagttgaagggaattattttcatgcagacagcttgtcaagctgtgcagcatcaaagaggcaggagacagtataacaaactgcgaaacctgctgaaggatgcgcgtcatgattgcattctctttgctaatgaattccagcaatgctgctatctgccacgggaaagaggagagtccatggagaagtggcagaccaggagcatatacaacgcagctgtttggtactatcatcactgccaggacaggatgccaattgttatggtgacagaagatgaagaggcaattcagcagtatggaagtgaaacagaaggagtattcgtgattactttcaagaattacctggacaatttctggcctgatttaaaagctgcccacgagctttgtgattctatccttcagtctcgacgggagagagagaatgagagtcaggagagccatgggaaggagtacccagaacatcttcccctggaagtgttagaagctgggattaaatctggacgctatatccagggaattctgaatgtcaacaaacacagagcccaaatagaagcttttgttcgacttcaaggagccagcagtaaagattcagatttagtcagtgacatcctaatccacgggatgaaggctcgaaaccgctcaattcatggagatgtggtagttgtggagctgcttcctaaaaatgaatggaaaggaagaaccgtagccctgtgtgagaatgactgtgacgacaaggcttcgggcgagtccccaagtgagcccatgcctacaggtcgagtggtgggcatacttcagaagaactggcgggattatgtggtgacatttccgtccaaagaagaggtccaatctcagggcaaaaatgctcagaaaatcctggttacaccttgggattacagaattcccaaaattcgaattagcactcagcaagcagaaaccctccaggacttcagggtggtcgtgcgcatcgattcctgggagtcaacatctgtgtatccaaacggacattttgtgcgtgttttaggaagaatcggagatctggaaggggaaattgcaaccatcctggtggaaaacagtatttcagttattcctttctcagaagctcagatgtgtgagatgccagtaaacacaccagaaagtccctggaaggtgagtcctgaagaggaacaaaaacgtaaagacttgaggaaaagccatctcgtattcagcattgaccccaaaggttgtgaagatgtggatgacacactctcagtcagaaccttaaataatggcaacctggaacttggggtccacatcgcagatgtaacacactttgtggcaccaaattcttacattgatattgaagctagaacaagggccaccacttattatctagcagatcgtcgctatgacatgctgccttccgtcctcagtgcagatttgtgttcccttctgggaggcgttgataggtatgctgtaagcatcatgtgggaactggataaagcctcttatgaaattaagaaagtgtggtatggcagaaccattattcgatcagcatacaaactgttctatgaagcagcccaagaactactggatggaaacttaagcgttgttgatgatattccagaattcaaagacttgggtgagaagagcagacaagccaagctggaggagttggtgtgggcaattggaaagctgaccgacatagctcgccatgtcagagctaaacgagacggatgtggtgccctggaactggaaggggtagaggtttgcgtacagctagatgacaaaaagaacattcacgacctcatccccaagcagcccctggaagtccacgagacagtggctgaatgcatgatcctggccaaccactgggtcgccaaaaagatctgggagagcttccctcatcaggccttgctgcgccagcaccctcctccacaccaggagttcttttcagaactccgggaatgtgctaaagccaaaggcttcttcatagatacacggtccaataaaacactggctgattctctggataatgcgaacgacccccacgatcccattgtgaacaggctactgcgctccatggccacgcaggccatgtcgaatgctctgtacttctccaccggatcctgtgcggaggaggagttccatcattacggtcttgcattagataaatatacccactttacttctccaataagaagatattcagatattgtagtacaccgcttgttaatggcagccatttcaaaagataagaaaatggaaattaagggaaatctgttcagcaacaaagatcttgaggaattatgcagacatatcaacaacagaaaccaagcagcacagcattctcagaagcagtctactgagctcttccagtgcatgtacttcaaagacaaagaccctgccaccgaggagcgttgcatatctgacggagttatttattcaattagaacaaatggtgtgcttctatttataccaaggtttgggattaaaggtgctgcttatctaaaaaataaagatggtttagtcatctcatgtggcccagatagctgttctgaatggaaaccaggatcccttcaacgatttcaaaacaaaattacctctactacaacagatggggaatctgttacgttccatttgtttgaccatgtaaccgtaagaatatccatacaggcctcacgttgccattctgatacaatcagacttgaaataattagtaacaaaccatacaagataccaaatacagaacttattcatcagagttcccccttgctgaagagtgagttagtgaaagaagtaactaaatctgtggaagaagctcagcttgcccaagaagtcaaagtaaacatcattcaggaggaatatcaagaatatcgccaaacaaagggaaggagcctatacacacttctagaggagatacgggacctagctctcctggatgtttcaaacaattatggaatatgagaggctcttacttcactaagagctgtcatatgtgaatgttttacagtcttttcaaacttaacatttaatgtgtgtcactcagtgctctagtcgatcaggactgggtagctatttcgcatatatgtaaaatgttctcagccgggcacggtggctcacgcctgtaaccccagcactttgggaggctgaggcgggcggatcacgaggtcaggagattgagaccatcctggctaacacggtgaaacccagtctctactaaaaatacaaaaattagcccggcgtggtggcatgcgcctgtagtcccagctacttgggaggctgaagcaggagaattgcctgaacccaggaagaggaggttgcagtgagccgagatcgcaccactgcattccagcctgggcaacagagcgagactccatctcaaaaaaaaaaaaaaaaaaaaaaaaaaagttctctcattcattaaagttgcattaaataaagtataattaggtcactatggaaacagagttttcagtaatgagtggacagtaagtggtggctctgcagatggcccctttctaataagtttaataaacccgaaattactggttatctcgtctccaatcagttctttcaaatgttttatttttccagtaattacgtttgggtcataggcccctctgacatttgtcaggtaattttcagtcactttcagataataagacttagtcctgagtccacttctccacttaaaaattcctatttcatatttgactcaacccttacctgctgtctccagtactagctgggattaggacacagggcgggtggtaggatgcacaggtaaagttctgtcacaggccttccttcccactctcccattttgatgaggtgcattggccttccccttgttggaaacttgttactttgccagcaaacaccccactagaaaaattaactctaggccgagcgcagtggctcacgcctataatcccagcactttgggagtccgaggcgggtggatcacaaggtcaggagttcaagacca

SEQ ID NO: 388227 - DNA, 4040 bp, Homo sapiens
ggtgctgctgctgaggaccttccagggccgcacgctgcggatcgtgcgcgagcactacctgcggccctgcgtgccctgccacagcccgctctgcccgcagcccgccgcctgcagccacgatgggaaactcttgtctagtgatgtgactcattacgtgatcccagactggaaagttgttcaagattatcttgagatccttgagtttcctgagttgaagggaattattttcatgcagacagcttgtcaagctgtgcagcatcaaagaggcaggaggagcatatacaacgcagctgtttggtactatcatcactgccaggacaggatgccaattgttatggtgacagaagatgaagaggcaattcagcagtatggaagtgaaacagaaggagtattcgtgattactttcaagaattacctggacaatttctggcctgatttaaaagctgcccacgagctttgtgattctatccttcagtctcgacgggagagagagaatgagagtcaggagagccatgggaaggagtacccagaacatcttcccctggaagtgttagaagctgggattaaatctggacgctatatccagggaattctgaatgtcaacaaacacagagcccaaatagaagcttttgttcgacttcaaggagccagcagtaaagattcagatttagtcagtgacatcctaatccacgggatgaaggctcgaaaccgctcaattcatggagatgtggtagttgtggagctgcttcctaaaaatgaatggaaaggaagaaccgtagccctgtgtgagaatgactgtgacgacaaggcttcgggcgagtccccaagtgagcccatgcctacaggtcgagtggtgggcatacttcagaagaactggcgggattatgtggtgacatttccgtccaaagaagaggtccaatctcagggcaaaaatgctcagaaaatcctggttacaccttgggattacagaattcccaaaattcgaattagcactcagcaagcagaaaccctccaggacttcagggtggtcgtgcgcatcgattcctgggagtcaacatctgtgtatccaaacggacattttgtgcgtgttttaggaagaatcggagatctggaaggggaaattgcaaccatcctggtggaaaacagtatttcagttattcctttctcagaagctcagatgtgtgagatgccagtaaacacaccagaaagtccctggaaggtgagtcctgaagaggaacaaaaacgtaaagacttgaggaaaagccatctcgtattcagcattgaccccaaaggttgtgaagatgtggatgacacactctcagtcagaaccttaaataatggcaacctggaacttggggtccacatcgcagatgtaacacactttgtggcaccaaattcttacattgatattgaagctagaacaagggccaccacttattatctagcagatcgtcgctatgacatgctgccttccgtcctcagtgcagatttgtgttcccttctgggaggcgttgataggtatgctgtaagcatcatgtgggaactggataaagcctcttatgaaattaagaaagtgtggtatggcagaaccattattcgatcagcatacaaactgttctatgaagcagcccaagaactactggatggaaacttaagcgttgttgatgatattccagaattcaaagacttgggtgagaagagcagacaagccaagctggaggagttggtgtgggcaattggaaagctgaccgacatagctcgccatgtcagagctaaacgagacggatgtggtgccctggaactggaaggggtagaggtttgcgtacagctagatgacaaaaagaacattcacgacctcatccccaagcagcccctggaagtccacgagacagtggctgaatgcatgatcctggccaaccactgggtcgccaaaaagatctgggagagcttccctcatcaggccttgctgcgccagcaccctcctccacaccaggagttcttttcagaactccgggaatgtgctaaagccaaaggcttcttcatagatacacggtccaataaaacactggctgattctctggataatgcgaacgacccccacgatcccattgtgaacaggctactgcgctccatggccacgcaggccatgtcgaatgctctgtacttctccaccggatcctgtgcggaggaggagttccatcattacggtcttgcattagataaatatacccactttacttctccaataagaagatattcagatattgtagtacaccgcttgttaatggcagccatttcaaaagataagaaaatggaaattaagggaaatctgttcagcaacaaagatcttgaggaattatgcagacatatcaacaacagaaaccaagcagcacagcattctcagaagcagtctactgagctcttccagtgcatgtacttcaaagacaaagaccctgccaccgaggagcgttgcatatctgacggagttatttattcaattagaacaaatggtgtgcttctatttataccaaggtttgggattaaaggtgctgcttatctaaaaaataaagatggtttagtcatctcatgtggcccagatagctgttctgaatggaaaccaggatcccttcaacgatttcaaaacaaaattacctctactacaacagatggggaatctgttacgttccatttgtttgaccatgtaaccgtaagaatatccatacaggcctcacgttgccattctgatacaatcagacttgaaataattagtaacaaaccatacaagataccaaatacagaacttattcatcagagttcccccttgctgaagagtgagttagtgaaagaagtaactaaatctgtggaagaagctcagcttgcccaagaagtcaaagtaaacatcattcaggaggaatatcaagaatatcgccaaacaaagggaaggagcctatacacacttctagaggagatacgggacctagctctcctggatgtttcaaacaattatggaatatgagaggctcttacttcactaagagctgtcatatgtgaatgttttacagtcttttcaaacttaacatttaatgtgtgtcactcagtgctctagtcgatcaggactgggtagctatttcgcatatatgtaaaatgttctcagccgggcacggtggctcacgcctgtaaccccagcactttgggaggctgaggcgggcggatcacgaggtcaggagattgagaccatcctggctaacacggtgaaacccagtctctactaaaaatacaaaaattagcccggcgtggtggcatgcgcctgtagtcccagctacttgggaggctgaagcaggagaattgcctgaacccaggaagaggaggttgcagtgagccgagatcgcaccactgcattccagcctgggcaacagagcgagactccatctcaaaaaaaaaaaaaaaaaaaaaaaaaaagttctctcattcattaaagttgcattaaataaagtataattaggtcactatggaaacagagttttcagtaatgagtggacagtaagtggtggctctgcagatggcccctttctaataagtttaataaacccgaaattactggttatctcgtctccaatcagttctttcaaatgttttatttttccagtaattacgtttgggtcataggcccctctgacatttgtcaggtaattttcagtcactttcagataataagacttagtcctgagtccacttctccacttaaaaattcctatttcatatttgactcaacccttacctgctgtctccagtactagctgggattaggacacagggcgggtggtaggatgcacaggtaaagttctgtcacaggccttccttcccactctcccattttgatgaggtgcattggccttccccttgttggaaacttgttactttgccagcaaacaccccactagaaaaattaactctaggccgagcgcagtggctcacgcctataatcccagcactttgggagtccgaggcgggtggatcacaaggtcaggagttcaagacca

SEQ ID NO: 388228 - DNA, 3957 bp, Homo sapiens
acaaacaaagtctcctaatcttggacagctgcgcccagcccttcttcacctgccgtccaggtatcatcctagtcttccctccgtctctgggatgggaaactcttgtctagtgatgtgactcattacgtgatcccagactggaaagttgttcaagattatcttgagatccttgagtttcctgagttgaagggaattattttcatgcagacagcttgtcaagctgtgcagcatcaaagaggcaggaggagcatatacaacgcagctgtttggtactatcatcactgccaggacaggatgccaattgttatggtgacagaagatgaagaggcaattcagcagtatggaagtgaaacagaaggagtattcgtgattactttcaagaattacctggacaatttctggcctgatttaaaagctgcccacgagctttgtgattctatccttcagtctcgacgggagagagagaatgagagtcaggagagccatgggaaggagtacccagaacatcttcccctggaagtgttagaagctgggattaaatctggacgctatatccagggaattctgaatgtcaacaaacacagagcccaaatagaagcttttgttcgacttcaaggagccagcagtaaagattcagatttagtcagtgacatcctaatccacgggatgaaggctcgaaaccgctcaattcatggagatgtggtagttgtggagctgcttccaaggcttcgggcgagtccccaagtgagcccatgcctacaggtcgagtggtgggcatacttcagaagaactggcgggattatgtggtgacatttccgtccaaagaagaggtccaatctcagggcaaaaatgctcagaaaatcctggttacaccttgggattacagaattcccaaaattcgaattagcactcagcaagcagaaaccctccaggacttcagggtggtcgtgcgcatcgattcctgggagtcaacatctgtgtatccaaacggacattttgtgcgtgttttaggaagaatcggagatctggaaggggaaattgcaaccatcctggtggaaaacagtatttcagttattcctttctcagaagctcagatgtgtgagatgccagtaaacacaccagaaagtccctggaaggtgagtcctgaagaggaacaaaaacgtaaagacttgaggaaaagccatctcgtattcagcattgaccccaaaggttgtgaagatgtggatgacacactctcagtcagaaccttaaataatggcaacctggaacttggggtccacatcgcagatgtaacacactttgtggcaccaaattcttacattgatattgaagctagaacaagggccaccacttattatctagcagatcgtcgctatgacatgctgccttccgtcctcagtgcagatttgtgttcccttctgggaggcgttgataggtatgctgtaagcatcatgtgggaactggataaagcctcttatgaaattaagaaagtgtggtatggcagaaccattattcgatcagcatacaaactgttctatgaagcagcccaagaactactggatggaaacttaagcgttgttgatgatattccagaattcaaagacttgggtgagaagagcagacaagccaagctggaggagttggtgtgggcaattggaaagctgaccgacatagctcgccatgtcagagctaaacgagacggatgtggtgccctggaactggaaggggtagaggtttgcgtacagctagatgacaaaaagaacattcacgacctcatccccaagcagcccctggaagtccacgagacagtggctgaatgcatgatcctggccaaccactgggtcgccaaaaagatctgggagagcttccctcatcaggccttgctgcgccagcaccctcctccacaccaggagttcttttcagaactccgggaatgtgctaaagccaaaggcttcttcatagatacacggtccaataaaacactggctgattctctggataatgcgaacgacccccacgatcccattgtgaacaggctactgcgctccatggccacgcaggccatgtcgaatgctctgtacttctccaccggatcctgtgcggaggaggagttccatcattacggtcttgcattagataaatatacccactttacttctccaataagaagatattcagatattgtagtacaccgcttgttaatggcagccatttcaaaagataagaaaatggaaattaagggaaatctgttcagcaacaaagatcttgaggaattatgcagacatatcaacaacagaaaccaagcagcacagcattctcagaagcagtctactgagctcttccagtgcatgtacttcaaagacaaagaccctgccaccgaggagcgttgcatatctgacggagttatttattcaattagaacaaatggtgtgcttctatttataccaaggtttgggattaaaggtgctgcttatctaaaaaataaagatggtttagtcatctcatgtggcccagatagctgttctgaatggaaaccaggatcccttcaacgatttcaaaacaaaattacctctactacaacagatggggaatctgttacgttccatttgtttgaccatgtaaccgtaagaatatccatacaggcctcacgttgccattctgatacaatcagacttgaaataattagtaacaaaccatacaagataccaaatacagaacttattcatcagagttcccccttgctgaagagtgagttagtgaaagaagtaactaaatctgtggaagaagctcagcttgcccaagaagtcaaagtaaacatcattcaggaggaatatcaagaatatcgccaaacaaagggaaggagcctatacacacttctagaggagatacgggacctagctctcctggatgtttcaaacaattatggaatatgagaggctcttacttcactaagagctgtcatatgtgaatgttttacagtcttttcaaacttaacatttaatgtgtgtcactcagtgctctagtcgatcaggactgggtagctatttcgcatatatgtaaaatgttctcagccgggcacggtggctcacgcctgtaaccccagcactttgggaggctgaggcgggcggatcacgaggtcaggagattgagaccatcctggctaacacggtgaaacccagtctctactaaaaatacaaaaattagcccggcgtggtggcatgcgcctgtagtcccagctacttgggaggctgaagcaggagaattgcctgaacccaggaagaggaggttgcagtgagccgagatcgcaccactgcattccagcctgggcaacagagcgagactccatctcaaaaaaaaaaaaaaaaaaaaaaaaaaagttctctcattcattaaagttgcattaaataaagtataattaggtcactatggaaacagagttttcagtaatgagtggacagtaagtggtggctctgcagatggcccctttctaataagtttaataaacccgaaattactggttatctcgtctccaatcagttctttcaaatgttttatttttccagtaattacgtttgggtcataggcccctctgacatttgtcaggtaattttcagtcactttcagataataagacttagtcctgagtccacttctccacttaaaaattcctatttcatatttgactcaacccttacctgctgtctccagtactagctgggattaggacacagggcgggtggtaggatgcacaggtaaagttctgtcacaggccttccttcccactctcccattttgatgaggtgcattggccttccccttgttggaaacttgttactttgccagcaaacaccccactagaaaaattaactctaggccgagcgcagtggctcacgcctataatcccagcactttgggagtccgaggcgggtggatcacaaggtcaggagttcaagacca

SEQ ID NO: 388229 - DNA, 2787 bp, Homo sapiens
acaaacaaagtctcctaatcttggacagctgcgcccagcccttcttcacctgccgtccaggtatcatcctagtcttccctccgtctctgggatgggaaactcttgtctagtgatgtgactcattacgtgatcccagactggaaagttgttcaagattatcttgagatccttgagtttcctgagttgaagggaattattttcatgcagacagcttgtcaagctgtgcagcatcaaagaggcaggagacagtataacaaactgcgaaacctgctgaaggatgcgcgtcatgattgcattctctttgctaatgaattccagcaatgctgctatctgccacgggaaagaggagagtccatggagaagtggcagaccaggagcatatacaacgcagctgtttggtactatcatcactgccaggacaggatgccaattgttatggtgacagaagatgaagaggcaattcagcagtatggaagtgaaacagaaggagtattcgtgattactttcaagaattacctggacaatttctggcctgatttaaaagctgcccacgagctttgtgattctatccttcagtctcgacgggagagagagaatgagagtcaggagagccatgggaaggagtacccagaacatcttcccctggaagtgttagaagctgggattaaatctggacgctatatccagggaattctgaatgtcaacaaacacagagcccaaatagaagcttttgttcgacttcaaggagccagcagtaaagattcagatttagtcagtgacatcctaatccacgggatgaaggctcgaaaccgctcaattcatggagatgtggtagttgtggagctgcttcctaaaaatgaatggaaaggaagaaccgtagccctgtgtgagaatgactgtgacgacaaggcttcgggcgagtccccaagtgagcccatgcctacaggtcgagtggtgggcatacttcagaagaactggcgggattatgtggtgacatttccgtccaaagaagaggtccaatctcagggcaaaaatgctcagaaaatcctggttacaccttgggattacagaattcccaaaattcgaattagcactcagcaagcagaaaccctccaggacttcagggtggtcgtgcgcatcgattcctgggagtcaacatctgtgtatccaaacggacattttgtgcgtgttttaggaagaatcggagatctggaaggggaaattgcaaccatcctggtggaaaacagtatttcagttattcctttctcagaagctcagatgtgtgagatgccagtaaacacaccagaaagtccctggaaggtgagtcctgaagaggaacaaaaacgtaaagacttgaggaaaagccatctcgtattcagcattgaccccaaaggttgtgaagatgtggatgacacactctcagtcagaaccttaaataatggcaacctggaacttggggtccacatcgcagatgtaacacactttgtggcaccaaattcttacattgatattgaagctagaacaagggccaccacttattatctagcagatcgtcgctatgacatgctgccttccgtcctcagtgcagatttgtgttcccttctgggaggcgttgataggtatgctgtaagcatcatgtgggaactggataaagcctcttatgaaattaagaaagtgtggtatggcagaaccattattcgatcagcatacaaactgttctatgaagcagcccaagaactactggatggaaacttaagcgttgttgatgatattccagaattcaaagacttgggtgagaagagcagacaagccaagctggaggagttggtgtgggcaattggaaagctgaccgacatagctcgccatgtcagagctaaacgagacggatgtggtgccctggaactggaaggggtagaggtttgcgtacagctagatgacaaaaagaacattcacgacctcatccccaagcagcccctggaagtccacgagacagtggctgaatgcatgatcctggccaaccactgggtcgccaaaaagatctgggagagcttccctcatcaggccttgctgcgccagcaccctcctccacaccaggagttcttttcagaactccgggaatgtgctaaagccaaaggcttcttcatagatacacggtccaataaaacactggctgattctctggataatgcgaacgacccccacgatcccattgtgaacaggctactgcgctccatggccacgcaggccatgtcgaatgctctgtacttctccaccggatcctgtgcggaggaggagttccatcattacggtcttgcattagataaatatacccactttacttctccaataagaagatattcagatattgtagtacaccgcttgttaatggcagccatttcaaaagataagaaaatggaaattaagggaaatctgttcagcaacaaagatcttgaggaattatgcagacatatcaacaacagaaaccaagtggaaatgtaaagattcaagcaacgcataaagatatgatgacagaggccagacgtggtggctcacttgagggcggatcacttgaggtcaggaatttgagaccagcctggccaatatggtgaaaccccatctctacaaaaaatacaaaaattagccgggtgtgatggcacgcgcctgtagtcccagttacttgggaggctgaggcaggagaatctcttgaacccaggaggtggagattgcagtgggccgagatcacaccactgcactctagcctgggtgacaaaattgagactgtgtctc

SEQ ID NO: 388230 - DNA, 439 bp, Homo sapiens
tctgtatgagcctagattttcttcaaatactacagcctagaaaacatgttacgacccactgaatgcagaagcaagtggagaattcacccatcttctattgttccagataagggaggagaccacccctcatattgtcttatgcccaatttctgcctccaaagaaaaaagaagtaaaaactaaaaggcagaaatgaaatccacaggcagacagcccagcgccacaccctgggcctggtagttaaagatcgacccctgacctaatcagttatgttatctatagattacagacattgcacggaaaagcattgtgaaaatccctgtcctgttctgttccattctaattactggtgcaggtgcatgtagcccccagtcacgtaccccctgcttgctcaatcgatcatgaccctctcacatgaacccccttagagttgtaagccct

SEQ ID NO: 388231 - DNA, 858 bp, Homo sapiens
tgctaggattataggctggactccagatccaaacttgacatgtagcagacccattaaaaacatacattaagcccctagcactgttttaatctccatggcctggctgagcttctgccatctgtcttcctaggcaccatgaggtctggacatctcatttggcataactcagctgtggccattggtggatctcatccttagtactagtccctgctggcaggggtgacccaggcccacataagccattgctggcctccttggaggacttagagaatcctgagattgcccatgaggatggacatgcctttcagtctagcacccacctttagtgatgcctgtggagattgagaagctcacaggggccttggatgtctttcttatacctccattgtctgcagcgtgactcccatactcttgagccaaggtagagaatttttaggaggcttgtgtggaggtttatggtggcccccatggttctgtgagactggtagaaagcacagaccccttagacttctccccaaggagaatacgtgagactagtggaggaaaggagagtaatgaaatatgcatttcgtgtcccaggctatcagagcacagctctaaggaaaaatacagggcatcgtatagcaactggcacagctctgtgagactgggagatattgcacaaccttgaaaaatcaagatgtgaccctactgaatgaacaaaataaatctccaataattgaccataaagaaatacaggtttctggctgggtgcggtgctcacgcttgtaatcacagcactttgagaggccgaggtaggcagatcatttgaggccaggagttcaaaatcagctttgccaacatggtgaaatacaaaaa

SEQ ID NO: 388232 - DNA, 453 bp, Homo sapiens
ttaaataaaggaaatagttagaggtttggactcgggattgtttggtttatatggtaaaggtatagtttagtttagccagctctgaaagagctggtctccctagcccacaaggtaccccagaaatgtcaaaaccatataaggtatataaaataaaaattagattaatacagttagttacttagctcttcagaatgtcaaaaagtgggaaacagcctcaatgttgtataattaaaaagttagttaaatgattgctggaatagtattataataagcaatgtattctcatagacgtaatgcaatatacgtttctgcttccagaaattgccgtgggaataaaaaaaaagcataaaatatgttactgtgtctctctgtgtatacatgtatgtttatatatgtaaatagaagaaaacttacctctgtatagaaaatttgtaagaataaagctttaaaata

SEQ ID NO: 388233 - DNA, 884 bp, Homo sapiens
cccagaagtggattcagcacataaggacgttttccacatccatatgattacatccccaaccggtcagcagcacccattctcctgcctgccaaactatccttgaaaaaccctagccttcaaatttctggggagactgatttgagtaataaaattcaagtctcccatataaaaacaacaaaaaattttttgactagaagggaagctgctgccctgaagataaaagaccccaggcctgacaggatttatcacttgctgactaaagagcccttgggctttgaataaacatcaacaatagacaggaattagtctctacatgctttgggtgagacccagtactgtcaggtgtgatctagcacagtcttagcagtggtggccatgggagtgcttgcatcacctctaccccaactattaagaatctcagcacagagagagagagtgagagggaaacttcatttgtttgggggagagtaagggagaagaacaagagactctgcctagtaatccagggaattctcccagatcttacccaagttcaccaaggcagtacctctatgagttggcaagagtcacagttttgctgggcgtggtggtgtgtgcatgtagtcccacctacttaggaagctgaggcaggaggatcgcttgggctcaggagctctgggctgtaatgtgctctgctgattgggtgtctgcactaagttcgacatcaatatggtgacttcctgggagtggggggccaccaggttgcctaaggaggggtgaactggctcaggttggaaatggagcaggtcagaactcctgtgctgatcagtagtgggatcgtgcctttgaatagccactgcactccagcttgggcaaccatagtgagactctgtctcttaaaaaaa

SEQ ID NO: 388234 - DNA, 649 bp, Homo sapiens
ctttctgatgattttacaaatggctcaattagtcaatcatgtgcaataattcatttaataaacattttttgagcacagactttgtgttagtactgttacctgttgtaggaaatttgttctaagtcctggctgcatcatgttacttagggaactttgaaagaggctctttactcctacactccatccctggtgattctcatactatagggtaaggcttgggacctgggaagtgtttgtttgtttgtttgttttaaaaaagctctcatagtaatactagtgttctgtcatgcttcaagataaagagattgtcctttcactagactggatatatcatattcttccttttctttgattaatatctttgtctctgtttttttaaattttttgtttctattcacaagaaaaaaatagaaattgggagacttgagtagcttattttcaagtttaaggaatgggaaggcacttcaatatagattatcttatttcactcaataattttgtaaagtaaatgttattatttcccttttttccattgagcattgaaggtttttaaaacttacagaaagccacaaaacgagttaatgttagaatatggcttggaatccagaggtgtgtaactccagagctcatattcttttcccttaattaa

SEQ ID NO: 388235 - DNA, 2023 bp, Homo sapiens
  misc_feature (1730)..(1730): n is a, c, g, or t
tcaactactgaaaatgcttccaaaaccaacgactaatcagaggaaacctgttgcacagcaactcaacttgagttaaacaagtcttggcagatatgaaaaaaataccttgaatcataggttgtaaaagtcaagctagacatgcacaatagacaagaagatgtgaaaatagtattgtccaaactcaagaaaaaaaaagacaaaattatctcagtggaagactgaattccaaggtgaacaacaggacaatagactcaactgaaaatgtaataagggacattaaggagggaaataaaaagccaagagaataaaaataaatattagaaaaggttaaaaagtatctcaaaggaactgttagatatagaagataatgaacaaaaatccaatatgtatatgtacacgatatgtatatgtatgtataactgaaaacccaaaagaagataaacaaaacaatggaacagaattaacacttaaataagaaaactttccaaaaattaaagcagacctttacctttgtatttataggacctacttttgattcagattggtcaactctaagacatattttagtaaaactattgtattctaagaaaatttcttctaaacttctggcaaaaaaaaagccaagtcttttacaaggtaaagaaagtcaagtttgcagctgtttttcaggtattgaggttatactgaaatcgttttcagcatgcagaactcagggaatattataaccccaagcccattctgaggaattaattagagaaagctcttcatcaaagcaagagatgatcaatttaagacaaaaacaaagcaagggacaagggtagaatagtgtatgtgtgtatcaggctcagtccagtgaagagagaaacaacacagtaatttgaacatagaaagtttaatataattgttaactataacagaggattggagtaatgagggatcagttagtaaaggaaagataactctaaagaaattatatgagtagcaaacataaagaaaagccagactctgaggctgagataaagtgcccaaggaagagcctctcctcccccatcctgagggctgaggtatagggctgtgttctctcaatgacagagaaatcactgtggtgctatgttggtggaacttgctaggaactcccctctatggtgctcaggaaagctgttcgttgagagatatctctctacagtaactctactatgaaaccacccaaggtgagggtaaggatgctgctgcttagaaagagatgcagacaaatgtactaatgaaggctcaacacagctctttcaaggcaagacaggtcaagaggacaaaaagtaaaagtatgaaaggctttaagaaatcaggtagatcgtaggtgtatgtgtgtgtgtgtgtgcatatgtatgcatgtcaaactttagatccttataaatgatctgccttgaaatttaaaaatctaaatagctcttagttgaacaggggagatataaacaaagtttgcaaaattcctaaaacacgatgataataaacatcatacatcagaattttgagatataattaaagcagtacttagaagaaaatgtatagccttaaatatttaacatcagtaaaaatgaaaggatgaaaattgggatttaaattcccaactcaaagagctagaaaaagaattacaaagcaagaagaaaaaaaagataaaggaaattaatgaggcagaaaacagaaaagcaataattcaaagttaattcaaagtnctggtcctggccgggcatggtaattcatgcctgtaatctcagaactttgcgtggccaaggcaagaggatcactttgaggctaggagttcaagaccagcctgggtaacatagcaagaccctgtctcaacaaaaatgtttttaaaaattagcccagcatggtggcatatgcctgttgtcctggcttttaggaggctgaagcagaaggattgcttgcacccaggagtttgaggttacagtgagttatggtcataccactgcactgcaacctaggccacagggtgagatactgtctc

SEQ ID NO: 388236 - DNA, 802 bp, Homo sapiens
ttgcaccattgtccagcctgggcaacagagcaagactccatctcaaaaaaaaaagtgtatttgtttccttaaaaaaatttttctgaaaagtgggtaatgacataatacagctttcaaattactttatgctgttattttattcttattgtattcacatgtgaaagcatgtgatcaatttttgctgcatcagagatattagagatagttttttattaattgggcatttatgaccttttctataaaagtaaggacattaaaatgtaagatgcatgatgaaaatataagtggagaggctctttgtagttaacctatatgaagtaatgtataaggtaggtcagagtaatacttttctacattatagtgcaagaaataattattgataaaagtatattaaactaaattcgtatattttacttattgtacttttatgtaataaaatgcagtgcatttaaaaattgttagattatgtgtgaatttaattttatgttttttaccatgttaagactattgtgcatttaatgaagcattattatgccactaacctatcccaccttactcaaaggtgtaggtaaaagatggtagcaatatactatttggtacataatggaataatgtctctagtaatcactttgccagtggctttaaacagcaaatgaatttaagaatattgttcccataggttaaatttttattctcttttcttactgaaatttattattagtatttgtgagtatatagtatatgtatatatttatgctttatatggcatattttgattcaggcctataatatgtagtaacta

SEQ ID NO: 388237 - DNA, 643 bp, Homo sapiens
aggtgcatttatacaaaggatcatccagaagacacctaactgcaagaaacaatgtttttggcagcaaataaaagaggcttccttctttccttccttaacatgtttgttgagatataacatacaggaaagcacacaaatatttttcagtttgataaacttttgtgtaaccactattcagatcaaggtacagaatcttttcagcagcccagaaatctccatgtgcctctttctagtcattagctctcctccacaaagaaagcttacttcagtaatgaaagtctaccctgggccctccttccatcctcagaacttcctgcaaagaaatgatccaagaaagcccatctcatacaacaataagtaataaaaaagaaagtaggatcattggtagattagaagcaatgatattagggggaagaatgtcagcaagagccacgaaaattacccccaaataaggaacattcccaggaaaataatttcagggagcagatgaaaagtctaatcaagtatttcacagtgaatttaaagaactcaacaaagcaatcatttctgtgaagaaagacccaacttgcagaggtaaatgcttgggaaaggatgacaaaatggcaagaggtggtgaaatgtgagctggcagaactcaaggagg

SEQ ID NO: 388238 - DNA, 405 bp, Homo sapiens
  misc_feature (11)..(11): n is a, c, g, or t
atgcgcgcggngacctgaggatcccctcgcgacgtgtatcctaaagccaaaatcaggcaaagacagtacaaagaagcaaaactaaagaccaatttcctaagtgaacataaaaacatattaaagaataaaactcactataaagataacaatatattcaaattcagaatactccaatactgtaatggtggtacctaaatcagatttaagtctagtataaatgtaaagagacaaaagtattaaatattaactatacatacaacaatttggtaatggatacatgatatataaaagatatacattatgaaatcaataatacaaaatgtgaaaggagacgttaaatgtaaagttgtggtataacatgttcgcgaggttgtcagcttaaaatagactattaacactataaga

SEQ ID NO: 388239 - DNA, 678 bp, Homo sapiens
ccatgtagggtttatcccaggaatgctacacttgttcaatattcaaaaaatcaatcaatgtaatctaccatgttagaagtctaaatcactggtcagcaaactacggtccagaggccaaatccagtcctgtacttggtctttgtaataattttatcggaacatagccatgtatatttgtttacatacagtctacatctgctttcatgctacaatagcagatatcagcagttacaacagacagcatattgccagcaaagcctaaaatatttactatgtgaccccttacagaaaaaaatgtgggaggtcaccaccattagacctgccttacaagaaatgctaaagaaagttcttcaaattgaaacaaaagaactctaaaaacataaaaacatattaaagaataaaactcactataaagataacaatatattcaaattcagaatactccaatactgtaatggtggtacctaaatcagatttaagtctagtataaatgtaaagagacaaaagtattaaatattaactatacatacaacaatttggtaatggatacatgatatataaaagatatacattatgaaatcaataatacaaaatgtgaaaggagacgttaaatgtaaagttgtggtataacatgttcgcgaggttgtcagcttaaaatagactattaacactataaga

SEQ ID NO: 388240 - DNA, 1324 bp, Homo sapiens
ggtgcagagggctctttgggggcagagcgggcactgcatggaccctgcaccctggagctgatgttcagagttgggcacttcactcacgtgtttgtggacgaggctgggcaggcaagtgagccggaatgcctcattcctctggggctgatgtcggacatcagtggccagatcgtgctggcaggagaccccatgcagctcggcccagtcattaagtccagactcgccatggcctatgggctgaacgtgtcctttttggaacggctgatgtctcgacccgcgtaccagagggacgaaaatgctttcggtgcttgtggcgcacataatcccctgttggtcacaaagctggtgaagaactaccggtcccacgaggccctgctgatgctgccctcacggctgttctaccacagggaactcgaggtctgtgcggaccccacagtggtgacctccttgctgggctgggagaagttgcctaagaaaggcttccctctcatcttccatggtgtgcggggcagcgaggcacgggagggaaaaagcccatcgtggttcaacccggccgaggccgtccaggtcctgcgctactgctgcctcctggcccacagcatctccagtcaggtgtctgccagcgacattggcgtcatcacgccctaccggaagcaggtggagaaaatcagaattcttttgcgtaatgttgatctgatggatataaaggttggatcagtagaggagtttcaaggacaagagtatctggtcatcatcatttcgaccgtacggtcaaatgaagatagatttgaagatgatcgatattttttgggtttcttgtccaactcaaaaagatttaatgttgcaatcaccagacccaaagctttgctgatagtgctgggaaacccccatgttctcgttcgagacccctgttttggtgctttgctggaatacagtattacaaacggtgtttacatgggatgcgatttacctcctgcactgcagtctctgcaaaactgtggcgagggggtggcagacccctcctacccagtggtgccagaatccacaggaccagagaagcatcaggagcccagctgatctgcagtggctgacagcagggaggccatgtgctcagcctggccacgttgccgttacagtctgctccgtggctcctgtggcctgcccttgtctcgcagccaggcagggtcgtgtgtgggtgtggggctgccaggttggacgcagctgctgctgccctgactttggcatatgccagcctgttcctgccacagggcagtcactgccgcctaccctgaaataaaccctcgagtgacccccaaaaaaaaaa

SEQ ID NO: 388241 - DNA, 1127 bp, Homo sapiens
aggcccccagagtcacagtgtctatgctctcctggcccaggggcccaggagctcttccttccctgtggccaagcggaggcagggctgtgtgggccaacaagatgctgtttccagggtgaagctctcagcacacgaggtcacaaagctggtgaagaactaccggtcccacgaggccctgctgatgctgccctcacggctgttctaccacagggaactcgaggtctgtgcggaccccacagtggtgacctccttgctgggctgggagaagttgcctaagaaaggcttccctctcatcttccatggtgtgcggggcagcgaggcacgggagggaaaaagcccatcgtggttcaacccggccgaggccgtccaggtcctgcgctactgctgcctcctggcccacagcatctccagtcaggtgtctgccagcgacattggcgtcatcacgccctaccggaagcaggtggagaaaatcagaattcttttgcgtaatgttgatctgatggatataaaggttggatcagtagaggagtttcaaggacaagagtatctggtcatcatcatttcgaccgtacggtcaaatgaagatagatttgaagatgatcgatattttttgggtttcttgtccaactcaaaaagatttaatgttgcaatcaccagacccaaagctttgctgatagtgctgggaaacccccatgttctcgttcgagacccctgttttggtgctttgctggaatacagtattacaaacggtgtttacatgggatgcgatttacctcctgcactgcagtctctgcaaaactgtggcgagggggtggcagacccctcctacccagtggtgccagaatccacaggaccagagaagcatcaggagcccagctgatctgcagtggctgacagcagggaggccatgtgctcagcctggccacgttgccgttacagtctgctccgtggctcctgtggcctgcccttgtctcgcagccaggcagggtcgtgtgtgggtgtggggctgccaggttggacgcagctgctgctgccctgactttggcatatgccagcctgttcctgccacagggcagtcactgccgcctaccctgaaataaaccctcgagtgacccccaaaaaaaaaa

SEQ ID NO: 388242 - DNA, 208 bp, Homo sapiens
atcaagagtttctcttcatgccccccaaaaacttcaagtgccatttttattcatctctgtgtgcttttaggtacggtcaaatgaagatagatttgaagatgatcgatattttttgggtttcttgtccaactcaaaaagatttaatgttgcaatcaccagacccaaagctttgctgatagtgctgggaaacccccatgttctcgttcga

SEQ ID NO: 388243 - DNA, 371 bp, Homo sapiens
ggagcagagtcaggcttggaagtcaggcaggcctcacgtttgctgtgcagagccgcttttcgttcgacagaaactgtgccgggtaccaccttccccttgtgacccatcaccatctcctcgcaggtcacaaagctggtgaagaactaccggtcccacgaggccctgctgatgctgccctcacggctgttctaccacagggaactcgaggtctgtgcggaccccacagtggtgacctccttgctgggctgggagaagttgcctaagaaaggcttccctctcatcttccatggtgtgcgggtgagttgtgtcttgaatccgtaggtgaccgtgtcgggtaaggacagtatggcaggaggtccttcctcccaggt

SEQ ID NO: 388244 - DNA, 3924 bp, Homo sapiens
agcggggcggcggtgacggcagcctaggccgggcgagggccatgctgagcctcgcagccaagctggtggccttcttctggaggacggcggacacccctagggaggaagccgggcagctggagcccgagctcgcggaaggtgacactaagctgaaaactgtacggggtgtcgtgacaaggtactgcagcgattatggcatgattgatgatatgatctacttctccagtgatgctgtgactagcagagtgcttctgaatgttggacaggaagtgattgcagttgtggaagaaaataaagtgtccaatggactgaaagcaatcagggtagaagctgtctctgataagtgggaagacgacagcagaaaccatgggagtccctcagactgcggcccccgagtgttgattggctgtgtgacttccctggtggagggcgcaggctgtatcagtcagaccacctacttctctctggagagtgtgtgcgaaggcttcgagccctgcaagggagactgggtggaggctgagtaccggatccggcctggcacgtggagcagcgaagccacctcagtgaagccactgagatacaagcgcgtggacaaggtctgcatctctagcctctgtggaaggaacggggtgttagaggaaagcatcttctttaccttggactccttgaaactgccagatgggtacacaccccggagaggtgacgtggtcaatgcagtggtggtggagagcagccagtcatgctatgtctggagggcgctttgtatgaccctagtgaagaggcgagacgccgcccctgttcatgaggccactcatttctatggaacgattttgctgaagaacaaaggtgatattgaagttacacaggtgacgcattttggaaccctaaaggaaggaagaagtaaaaccatggtgatctggatagagaataaaggagacattcctcaaaacttagtcagctgtaaactggctggctgggataaatctaaacaattcagattccaaatgctggataaagaccagatgtgccccgtggtatcttttgtttctgttcctgagaaggagaattcatcagatgaaaatattaattcattaaatagccacacaaaaaacaaaacctctcagatgtcggagagcagtttggtgaacaacagaggaatctctccaggtgattgtacctgtaaaggagaaaatggagaaaaagacaacattctatcaaggaagcagatgacagagcctgagcctggggggcttgtccctccagggggaaaaaccttcattgtggtcatctgtgacggaaaaaatcctggccgctgcaaggagctccttttgctttgtttttccgatttcctaattgggcgataccttgaagtaaatgttatcagtggggaggagtcactaattgctgcgcgcgaaccattttcttggaaaaagcttaaaagttcacaagcgttaacatccgcaaaaactacagttgttgtgaccgcacagaaaaggaactcaagacgacaacttccaagttttcttccccaatatccaatcccagatagacttagaaaatgtgtggaacaaaaaattgacatcctgactttccagccattacttgcagagcttctgaacatgtcaaattacaaggagaagttttcgactttgctgtggcttgaggagatttatgcagaaatggaactgaaagagtataacatgagcgggatcatcttaagaaggaatggggatctgctggttctggaggtcccagggttggccgaagggaggccttctctctacgcaggtgataaactgattttaaaaactcaagagtacaatggacatgccatcgaatacatcagctacgtgactgagattcatgaagaagatgtaactcttaaaattaatccagaatttgaacaagcctataactttgaacctatggatgtggaatttacatataataggaccacaagcagacggtgtcactttgcacttgaacacgtcatccacttaggtgtaaaagtgttgtttccagaagaaattattttacagtctccacaagtgacgggaaattggaaccatgcacaagacaccaaaagcagtggacagtccaccagcaaaaagaataggaaaacaatgacggaccaagctgagcatggaacagaggagaggcgtgttggtgacaaggacctgccggtgctggcaccctttactgcagagatgagcgattgggtagatgaaattcagacccctaaagcaagaaagatggagtttttcaacccagtgctaaatgaaaatcagaagttagcagttaaaaggattctgagtggtgactgccgtcccctcccgtatattctctttggacctcctggtactggaaagacagtgacaataatagaggctgttttacaggtacactttgccttgccggacagtcggattttagtctgtgcgccctccaacagtgctgctgacctcgtgtgtctgcggctgcacgagagcaaggtgctacagccggccaccatggtccgggtgaacgccacctgcaggttcgaggagatagttattgacgccgtcaaaccgtattgcagagacggagaagacatctggaaagcctcacgcttccggataatcatcaccacatgcagcagctcagggctgttttaccaaataggagtgagagttgggcacttcactcacgtgtttgtggacgaggctgggcaggcaagtgagccggaatgcctcattcctctggggctgatgtcggacatcagtggccagatcgtgctggcaggagaccccatgcagctcggcccagtcattaagtccagactcgccatggcctatgggctgaacgtgtcctttttggaacggctgatgtctcgacccgcgtaccagagggacgaaaatgctttcggtgcttgtggcgcacataatcccctgttggtcacaaagctggtgaagaactaccggtcccacgaggccctgctgatgctgccctcacggctgttctaccacagggaactcgaggtctgtgcggaccccacagtggtgacctccttgctgggctgggagaagttgcctaagaaaggcttccctctcatcttccatggtgtgcggggcagcgaggcacgggagggaaaaagcccatcgtggttcaacccggccgaggccgtccaggtcctgcgctactgctgcctcctggcccacagcatctccagtcaggtgtctgccagcgacattggcgtcatcacgccctaccggaagcaggtggagaaaatcagaattcttttgcgtaatgttgatctgatggatataaaggttggatcagtagaggagtttcaaggacaagagtatctggtcatcatcatttcgaccgtacggtcaaatgaagatagatttgaagatgatcgatattttttgggtttcttgtccaactcaaaaagatttaatgttgcaatcaccagacccaaagctttgctgatagtgctgggaaacccccatgttctcgttcgagacccctgttttggtgctttgctggaatacagtattacaaacggtgtttacatgggatgcgatttacctcctgcactgcagtctctgcaaaactgtggcgagggggtggcagacccctcctacccagtggtgccagaatccacaggaccagagaagcatcaggagcccagctgatctgcagtggctgacagcagggaggccatgtgctcagcctggccacgttgccgttacagtctgctccgtggctcctgtggcctgcccttgtctcgcagccaggcagggtcgtgtgtgggtgtggggctgccaggttggacgcagctgctgctgccctgactttggcatatgccagcctgttcctgccacagggcagtcactgccgcctaccctgaaataaaccctcgagtgacccccaaaaaaaaaa

SEQ ID NO: 388245 - DNA, 4251 bp, Homo sapiens
agcggggcggcggtgacggcagcctaggccgggcgagggccatgctgagcctcgcagccaagctggtggccttcttctggaggacggcggacacccctagggaggaagccgggcagctggagcccgagctcgcggaaggtggctcgcgggaggcggctgggaggcgggtcccgggccctcgcgtgtcggccacgagggagccgcgcccataggtctttgagtgcagtgcgggccggcaggcaacgctgggcccggcctttcctcatctccgctggcggggatccccgttcgcctcaggaggcttccgaccccacagcatcccgccgctctgggcgcccgtcctctgtgaggtctctccggtgacaccagcccctcttcccgccctcactttgtgtgtttacgccgagcagctgccaagtcgtctctccatgtcgttccttcctgtccgcagcgtcattggcggtggtgacactaagctgaaaactgtacggggtgtcgtgacaaggtactgcagcgattatggcatgattgatgatatgatctacttctccagtgatgctgtgactagcagagtgcttctgaatgttggacaggaagtgattgcagttgtggaagaaaataaagtgtccaatggactgaaagcaatcagggtagaagctgtctctgataagtgggaagacgacagcagaaaccatgggagtccctcagactgcggcccccgagtgttgattggctgtgtgacttccctggtggagggcgcaggctgtatcagtcagaccacctacttctctctggagagtgtgtgcgaaggcttcgagccctgcaagggagactgggtggaggctgagtaccggatccggcctggcacgtggagcagcgaagccacctcagtgaagccactgagatacaagcgcgtggacaaggtctgcatctctagcctctgtggaaggaacggggtgttagaggaaagcatcttctttaccttggactccttgaaactgccagatgggtacacaccccggagaggtgacgtggtcaatgcagtggtggtggagagcagccagtcatgctatgtctggagggcgctttgtatgaccctagtgaagaggcgagacgccgcccctgttcatgaggccactcatttctatggaacgattttgctgaagaacaaaggtgatattgaagttacacaggtgacgcattttggaaccctaaaggaaggaagaagtaaaaccatggtgatctggatagagaataaaggagacattcctcaaaacttagtcagctgtaaactggctggctgggataaatctaaacaattcagattccaaatgctggataaagaccagatgtgccccgtggtatcttttgtttctgttcctgagaaggagaattcatcagatgaaaatattaattcattaaatagccacacaaaaaacaaaacctctcagatgtcggagagcagtttggtgaacaacagaggaatctctccaggtgattgtacctgtaaaggagaaaatggagaaaaagacaacattctatcaaggaagcagatgacagagcctgagcctggggggcttgtccctccagggggaaaaaccttcattgtggtcatctgtgacggaaaaaatcctggccgctgcaaggagctccttttgctttgtttttccgatttcctaattgggcgataccttgaagtaaatgttatcagtggggaggagtcactaattgctgcgcgcgaaccattttcttggaaaaagcttaaaagttcacaagcgttaacatccgcaaaaactacagttgttgtgaccgcacagaaaaggaactcaagacgacaacttccaagttttcttccccaatatccaatcccagatagacttagaaaatgtgtggaacaaaaaattgacatcctgactttccagccattacttgcagagcttctgaacatgtcaaattacaaggagaagttttcgactttgctgtggcttgaggagatttatgcagaaatggaactgaaagagtataacatgagcgggatcatcttaagaaggaatggggatctgctggttctggaggtcccagggttggccgaagggaggccttctctctacgcaggtgataaactgattttaaaaactcaagagtacaatggacatgccatcgaatacatcagctacgtgactgagattcatgaagaagatgtaactcttaaaattaatccagaatttgaacaagcctataactttgaacctatggatgtggaatttacatataataggaccacaagcagacggtgtcactttgcacttgaacacgtcatccacttaggtgtaaaagtgttgtttccagaagaaattattttacagtctccacaagtgacgggaaattggaaccatgcacaagacaccaaaagcagtggacagtccaccagcaaaaagaataggaaaacaatgacggaccaagctgagcatggaacagaggagaggcgtgttggtgacaaggacctgccggtgctggcaccctttactgcagagatgagcgattgggtagatgaaattcagacccctaaagcaagaaagatggagtttttcaacccagtgctaaatgaaaatcagaagttagcagttaaaaggattctgagtggtgactgccgtcccctcccgtatattctctttggacctcctggtactggaaagacagtgacaataatagaggctgttttacaggtacactttgccttgccggacagtcggattttagtctgtgcgccctccaacagtgctgctgacctcgtgtgtctgcggctgcacgagagcaaggtgctacagccggccaccatggtccgggtgaacgccacctgcaggttcgaggagatagttattgacgccgtcaaaccgtattgcagagacggagaagacatctggaaagcctcacgcttccggataatcatcaccacatgcagcagctcagggctgttttaccaaataggagtgagagttgggcacttcactcacgtgtttgtggacgaggctgggcaggcaagtgagccggaatgcctcattcctctggggctgatgtcggacatcagtggccagatcgtgctggcaggagaccccatgcagctcggcccagtcattaagtccagactcgccatggcctatgggctgaacgtgtcctttttggaacggctgatgtctcgacccgcgtaccagagggacgaaaatgctttcggtgcttgtggcgcacataatcccctgttggtcacaaagctggtgaagaactaccggtcccacgaggccctgctgatgctgccctcacggctgttctaccacagggaactcgaggtctgtgcggaccccacagtggtgacctccttgctgggctgggagaagttgcctaagaaaggcttccctctcatcttccatggtgtgcggggcagcgaggcacgggagggaaaaagcccatcgtggttcaacccggccgaggccgtccaggtcctgcgctactgctgcctcctggcccacagcatctccagtcaggtgtctgccagcgacattggcgtcatcacgccctaccggaagcaggtggagaaaatcagaattcttttgcgtaatgttgatctgatggatataaaggttggatcagtagaggagtttcaaggacaagagtatctggtcatcatcatttcgaccgtacggtcaaatgaagatagatttgaagatgatcgatattttttgggtttcttgtccaactcaaaaagatttaatgttgcaatcaccagacccaaagctttgctgatagtgctgggaaacccccatgttctcgttcgagacccctgttttggtgctttgctggaatacagtattacaaacggtgtttacatgggatgcgatttacctcctgcactgcagtctctgcaaaactgtggcgagggggtggcagacccctcctacccagtggtgccagaatccacaggaccagagaagcatcaggagcccagctgatctgcagtggctgacagcagggaggccatgtgctcagcctggccacgttgccgttacagtctgctccgtggctcctgtggcctgcccttgtctcgcagccaggcagggtcgtgtgtgggtgtggggctgccaggttggacgcagctgctgctgccctgactttggcatatgccagcctgttcctgccacagggcagtcactgccgcctaccctgaaataaaccctcgagtgacccccaaaaaaaaaa

SEQ ID NO: 388246 - DNA, 4113 bp, Homo sapiens
agcggggcggcggtgacggcagcctaggccgggcgagggccatgctgagcctcgcagccaagctggtggccttcttctggaggacggcggacacccctagggaggaagccgggcagctggagcccgagctcgcggaaggtggctcgcgggaggcggctgggaggcgggtcccgggccctcgcgtgtcggccacgagggagccgcgcccataggtctttgagtgcagtgcgggccggcaggcaacgctgggcccggcctttcctcatctccgctggcggggatccccgttcgcctcaggaggcttccgaccccacagcatcccgccgctctgggcgcccgtcctctgtgaggtctctccggtgacaccagcccctcttcccgccctcactttgtgtgtttacgccgagcagctgccaagtcgtctctccatgtcgttccttcctgtccgcagcgtcattggcggtggtgacactaagctgaaaactgtacggggtgtcgtgacaaggtactgcagcgattatggcatgattgatgatatgatctacttctccagtgatgctgtgactagcagagtgcttctgaatgttggacaggaagtgattgcagttgtggaagaaaataaagtgtccaatggactgaaagcaatcagggtagaagctgtctctgataagtgggaagacgacagcagaaaccatgggagtccctcagactgcggcccccgagtgttgattggctgtgtgacttccctggtggagggcgcaggctgtatcagtcagaccacctacttctctctggagagtgtgtgcgaaggcttcgagccctgcaagggagactgggtggaggctgagtaccggatccggcctggcacgtggagcagcgaagccacctcagtgaagccactgagatacaagcgcgtggacaaggtctgcatctctagcctctgtggaaggaacggggtgttagaggaaagcatcttctttaccttggactccttgaaactgccagatgggtacacaccccggagaggtgacgtggtcaatgcagtggtggtggagagcagccagtcatgctatgtctggagggcgctttgtatgaccctagtgaagaggcgagacgccgcccctgttcatgaggccactcatttctatggaacgattttgctgaagaacaaaggtgatattgaagttacacaggtgacgcattttggaaccctaaaggaaggaagaagtaaaaccatggtgatctggatagagaataaaggagacattcctcaaaacttagtcagctgtaaactggctggctgggataaatctaaacaattcagattccaaatgctggataaagaccagatgtgccccgtggtatcttttgtttctgttcctgagaaggagaattcatcagatgaaaatattaattcattaaatagccacacaaaaaacaaaacctctcagatgtcggagagcagtttggtgaacaacagaggaatctctccaggtgattgtacctgtaaaggagaaaatggagaaaaagacaacattctatcaaggaagcagatgacagagcctgagcctggggggcttgtccctccagggggaaaaaccttcattgtggtcatctgtgacggaaaaaatcctggccgctgcaaggagctccttttgctttgtttttccgatttcctaattgggcgataccttgaagtaaatgttatcagtggggaggagtcactaattgctgcgcgcgaaccattttcttggaaaaagcttaaaagttcacaagcgttaacatccgcaaaaactacagttgttgtgaccgcacagaaaaggaactcaagacgacaacttccaagttttcttccccaatatccaatcccagatagacttagaaaatgtgtggaacaaaaaattgacatcctgactttccagccattacttgcagagcttctgaacatgtcaaattacaaggagaagttttcgactttgctgtggcttgaggagatttatgcagaaatggaactgaaagagtataacatgagcgggatcatcttaagaaggaatggggatctgctggttctggaggtcccagggttggccgaagggaggccttctctctacgcaggtgataaactgattttaaaaactcaagagtacaatggacatgccatcgaatacatcagctacgtgactgagattcatgaagaagatgtaactcttaaaattaatccagaatttgaacaagcctataactttgaacctatggatgtggaatttacatataataggaccacaagcagacggtgtcactttgcacttgaacacgtcatccacttaggtgtaaaagtgttgtttccagaagaaattattttacagtctccacaagtgacgggaaattggaaccatgcacaagacaccaaaagcagtggacagtccaccagcaaaaagaataggaaaacaatgacggaccaagctgagcatggaacagaggagaggcgtgttggtgacaaggacctgccggtgctggcaccctttactgcagagatgagcgattgggtagatgaaattcagacccctaaagcaagaaagatggagtttttcaacccagtgctaaatgaaaatcagaagttagcagttaaaaggattctgagtggtgactgccgtcccctcccgtatattctctttggacctcctggtactggaaagacagtgacaataatagaggctgttttacaggtacactttgccttgccggacagtcggattttagtctgtgcgccctccaacagtgctgctgacctcgtgtgtctgcggctgcacgagagcaaggtgctacagccggccaccatggtccgggtgaacgccacctgcaggttcgaggagatagttattgacgccgtcaaaccgtattgcagagacggagaagacatctggaaagcctcacgcttccggataatcatcaccacatgcagcagctcagggctgttttaccaaataggagtgagagttgggcacttcactcacgtgtttgtggacgaggctgggcaggcaagtgagccggaatgcctcattcctctggggctgatgtcggacatcagtggccagatcgtgctggcaggagaccccatgcagctcggcccagtcattaagtccagactcgccatggcctatgggctgaacgtgtcctttttggaacggctgatgtctcgacccgcgtaccagagggacgaaaatgctttcggtgcttgtggcgcacataatcccctgttggtcacaaagctggtgaagaactaccggtcccacgaggccctgctgatgctgccctcacggctgttctaccacagggaactcgaggtctgtgcggaccccacagtggtgacctccttgctgggctgggagaagttgcctaagaaaggcttccctctcatcttccatggtgtgcggggcagcgaggcacgggagggaaaaagcccatcgtggttcaacccggccgaggccgtccaggtcctgcgctactgctgcctcctggcccacagcatctccagtcaggtgtctgccagcgacattggcgtcatcacgccctaccggaagcaggtggagaaaatcagaattcttttgcgtaatgttgatctgatggatataaaggttggatcagtagaggagtttcaaggacaagagtatctggtcatcatcatttcgaccgacccctgttttggtgctttgctggaatacagtattacaaacggtgtttacatgggatgcgatttacctcctgcactgcagtctctgcaaaactgtggcgagggggtggcagacccctcctacccagtggtgccagaatccacaggaccagagaagcatcaggagcccagctgatctgcagtggctgacagcagggaggccatgtgctcagcctggccacgttgccgttacagtctgctccgtggctcctgtggcctgcccttgtctcgcagccaggcagggtcgtgtgtgggtgtggggctgccaggttggacgcagctgctgctgccctgactttggcatatgccagcctgttcctgccacagggcagtcactgccgcctaccctgaaataaaccctcgagtgacccccaaaaaaaaaa

SEQ ID NO: 388247 - DNA, 605 bp, Homo sapiens
gaaacccctctggccatctggaggaatcccttttgaaagctcagctcaaaggttcacccttcttgaagcttaccctgacacccactcctatatttaccccttggcccccagacttccaatattaaatatgaaacacttcagtgaaccttttacacacccagcccttttcctggacctccaagcctcaaggcaaggataaacatcatgaacactggaaattattcaacagcccagccactgggctggtggaaaaaatatagttcagtcagtacctgtgtagcagcgaccgtatcagattgtttatattcattatctccacttcatagactaagaaactgagacacaaaatagaagtaacttagccaaatctggcaagaagaatcaggactcaaacacaagggtcttttgtctttttacttcaaggtgttactaaggtctagtactatccaatggaactttctgcaatgatgggaatctctatgtatgtgttgtatatgctgtatgtctatatatgctgttatatatggtacagtcactggtagctgttaagttgccagtgggactggggaactggattttaaactttatttaattgtaataattaa

SEQ ID NO: 388248 - DNA, 701 bp, Homo sapiens
aggacctgcactgattggtgataggcagcatgggctcaggagagcagggagagttaggggagacacccacgtgcctggaatagtggagggccatttggagcaagcctcagatggagagccacatatcgaggtgttcggtcaatccttgtgaaccagagagtgttcctacgaatgctagagtctcatagaagtaatgtctcttttacgtttttttgcctgattaatattttcttcccctcccggtgccttcaagtatgaatgacaataaataccatacatataaaaaaaaagaaaaaaaaaaaaaaaaaaaaaaaaagaaaaaaaaaaaaaaaaaaaaggggggggggcgcaaaaaaaacccccgggggggggccaacaagctatcgagaagcgccccaccgacgcctttcgtcgtggaacaaaggggggcggcccatattaagggggcgcgcgattatataaagccgcgcgagaacggggaggcggcggccactaatcaaaagaagcgccgtcgccgacgtcgggccggaaaaaacaccgcggaacggcgacgtgggggaacatcaccctagcggcagaagagacgagcacccccccacctccggggcggggggaggggagcacaccttggtgcgggaccacacaccaagcccccaacgaaggattagaagagggccccgcggggggaccgaccacaggcc

SEQ ID NO: 388249 - DNA, 285 bp, Homo sapiens
ccagaatgcaaaagtctgaaaaatatcttaaagaccaatcttaggttttacaacagtgatgttatctataggagtaattggggaagttacaaattttgtaacctccagctacatgactcttgatgagtaagcaattttagaaaagtaagctagggaacgggctgcgcacagtggctcacgcctgtaatcccaacactttgggaggctgaggcaggtggatcatgaggtcaggagatcgagaccatcctggccaacatggtgaaaccccatctctactaaaaatac

SEQ ID NO: 388250 - DNA, 621 bp, Homo sapiens
ttttacttctgtaggcatttacccaactagaggaaagggaaacggagggggcagggagggctgctcgttggcaaacgattaattttgagacactattgctcagggtctgagagcttgaactctgaattcgaactgttagcacaatcgttctcaacttcggggtgcataaaaagtaacttgaaggtggttaaacgtacaatttggggggcctcatcccccaaatttatttgaatggagcagaggggggttgtcatctttacattttcaaatgagcagtcctggggctgagactgattaatgtaaccactacattgagaattactggtctaacataaaagtgttcaagatgttgaaacaagtgacaccttgtgccgttgatttccttcccttttccagagctgtgttggtggtgtatctcaaactaaaggaggtaacagaatggactcttgggacgaacctgatttagttagagtttccactcccatcttgaactagtggtataatgtaggaaagcagttctcaaagtgtggacagatgacccatggggatctcctcttaccctttcagggtagcctcaaggtcataactattttcaaaataatagtaagatgctatttattg

SEQ ID NO: 388251 - DNA, 572 bp, Homo sapiens
tacaaagtgatccatgcaaaagtaagtacaggaccttggaaggagcctatgcaagtttggaccctgaagtttaaccttactggcttcatggtcaatctgtcttttgctcaaagaccttgaactgaaacctggagtgatgactgagaagaatatagcagggctgcttggctctttggaccaaaaaagagagaccattttctataaaccttgcctggctgacggtccaggttaataaagatgtaaaaatggtagaaggtgtgagaatatatctaagaacaataacaccaacaacaaatcaagggggattatcctttctaaaccttgactatgtcatctgtgagatgtgtagggaagctgcttctgccgtgtagaggccttgaagagtaaggatactggcaggatgcctgtgcactgatgttacagagtcttagcagagggcagaacggtctccttggacaacgtggacctggctgaactacagcactggggaccacttggtgcaccactgcccagggcatggttttgtttgtttgtttgtttggcttattgtaggatggcccagagattctaaa

SEQ ID NO: 388252 - DNA, 319 bp, Homo sapiens
cttgcagggattttgcttcttggcttgttttgttttgctggaatgaatgaataagtaaatgggaacgattttgacttcaccctaagcctagctaaaagtttgggtagtgacagttttggttattttgtgtaacctgatagtggatcccctttctatgccaaaaaaaaaaaaaatcccccaatactagagtacctgttttcctagggaattgacctcagcaactgaaggagaggcgattcaaagcagggagtgtgatgaataggtcaactctgtcctcgcagccgtccctgagagggcgctgttcccaaatcgaagcccc

SEQ ID NO: 388253 - DNA, 247 bp, Homo sapiens
cagacattcaataaatatttgatgaactaacaaatgtgtttatttttactatatttttaatagatatctcagaaataaattttaggatctagaaacaggtactaactgatactggtgacctctgaatgaaaccaattcaaagttcgagacctaactgaaaagaaagtaatgattaagacaaatatatacggggaaaatggtaagatttctgtcatcttaacagctaaggacatcagaactgtatcaa

SEQ ID NO: 388254 - DNA, 581 bp, Homo sapiens
agggtgcatctgccaaggtcgtgttcactcacctaaagggtgcagaaacaaggggggagagaacgagtgacgacactaggtgatatctatgattttaaagaaaagctgaatgtttagagcttccatatttggctacgtacttcagttagcgacggaaaatagtttttaaagctttattggggaattaattttttttacgttttttgttgcttctagccccatatcctactgatttttagcatgctgcggtcagaaataaacttaattccctatagctgccgcgattaagcgtagagtggcttgcagtttcaaaagctgcttttgcatcaaggcccaagctccgtgggtctcctgctaaaacttttgagcctgtgatctgaattcctaagtgtataaaattctagaatagtgtcttcgagaattgagttgcgttcattttctggtgtggaccatgaagtcaacgttaatgaattgggaataaggtggcttctagttgttttttgttctagtagcttattcagcttggaggcagagaaccttggaatctctgttaaattagtctgccatagaatggaacttga

SEQ ID NO: 388255 - DNA, 756 bp, Homo sapiens
cctgaaaaggctgttaaagatacatctgccttagaaaagattagtggttatcaagagttagagaggtgaggaaggagaaagggaggaaaggaacaagtataaaaacagtagcatgagagacctgtgggatggaactgtactgtgtcttgactgtgatgatggttacataaatctgcatatgtgataaaatcacatagaactaaatatacacacacacacacacacacacgaatgtatgtaggactggtgaaatctgaataaagtcattggattttatcaatgttgacttcttagttgtgatattgtatggtaattatgcatgattattgcataattattgcataataattatgcataattccattggagaaaatcaggtgaaaggttttaggattcctctgtattatttcttacaattgcatgtaaatctacaactccatccaaacaaaaagttaaaaaaatgctttgccttttgcaaatacatatctttatgaggctagaatttctccatatacttcagccaggacaatatattgcaacacgttgaatgcagaaacatataagacaatgcagctgtcttctattaacccaggcataaaagaaatttataaacatatgaaacaataccagtcaacttacctatatgttttagtttggggaaaatgaattatttctaaaaatgtatttaatgttaccatgtaatggaattattaatgttatctttaaaataaagctataaataaatatttaaaaaaa

SEQ ID NO: 388256 - DNA, 104 bp, Homo sapiens
aaaatcaaattgtaataaaattcttttaattttaacacatatgtaatttttgtaactgtcaccacaccacagtcgagatatagaacagttccattacctaaaaa

SEQ ID NO: 388257 - DNA, 284 bp, Homo sapiens
caaactgcaactttgccacgttcccaatgtgggatcttgggcagcttgcttaaccttttggaacccagttttcccactacaaaatggggatatttacacacatataagaatttacataagtaacaatgttcataaatttaggaattcatcatttaccagatattctctatgtgccaggcactgtgctaagcaccttgcatgaatcattttgtttgatctttataataacctttcaatagaggaagcattatctctattttacaaataaagaaacagaggctcag

SEQ ID NO: 388258 - DNA, 3616 bp, Homo sapiens
  misc_feature (1845)..(1845): n is a, c, g, or t
  misc_feature (1848)..(1848): n is a, c, g, or t
  misc_feature (2150)..(2150): n is a, c, g, or t
gtgatcatagttaaataataatagtaatagaaaaaacaggtttgaagtcaagcataactcatttaaatcatatgactgtcactaattagctatatgatcatgggactgtcaatctctcagagtatctatttcctcttttatgaagtcagcataaaaatccctgtttttagagagtttttttcgtaagattgattaaaataatgaacataactcacctggcatatactatgaatggaataatgactggtatgaatttatgataatgatgatgataaaggttgttccttcctatacagcatcagctgaaattaatttgacatggtcccacaagacaagctgaagattattcaagttaacctatggaggctttttcttaaatgagaacaagtctacctttggtggttttcttcactttagcaacatcaaatcatatcatcctttagataatttcatataataccatgaaatgctatcacacagaaggtaaatggggataactgatgtgctatcaactctgccacagagttgtattactagtgttcaatgttgtaatgatagagaaaggactggacgagcgaggtgagagtaactgctgggaaatatggtccaagtgctcctggtcttctctactgtctaccttatctctgtagataaaggtttcaacagttcttggcaagtctctatgaactcggccaactatgcacaaaagaactggtatcaattttaatgtagttaatatattatgtaagcagtttagcctagttctcttaagagcatggattttaggtttagctgaccactagctctgccacttacttcatgtataccctcagacaaattacatggcctctctaagcctttactttcttatctataaaaatacaaatgataaaacctacttcagagggccattatcagcattaaataaaataatctatgtaaaagtctcagtctggtgccaggtacatagttagcactcaaaaattagctaatatttacctaccaaaccactaagtattacttacatcaaaagcaatctctactgagcatgacatttttttcacaaaagttcctagagggaattaagaggtcatagaaaacgaattgggttagaacattcatgcactcatcactaccaccatgcagaagttgtgcaatgtgaactccaaagtgtgtaaaggcttcatttcactgtgtgaattcaggtggtaaatactacggatatttttcaggttatttgcatatttattatttcttttaatagtattaattcttactccaatgtagccctgaccgtgttactgacaatgttgattgaataggtattataagaaatgctaccaagttccttagtgtgagtcctacatgtaccctttcctgtcactattacttccaactttcgtggtatttctgacttccagctgtaaagagcccatgaaactatggtttctctacttgtcctttttgcctcagcctaagaaacatatcttgtgatttacaagaagacagtcaatattatggggcagcttgattgctatcctgcacagaggcgtgagaacagacttgactgcatttcaaggacctttgaatctaaccttgtaattctacttgttgtgatgtatttttttccacaagagatatctgagtgtgtgatacactagttctgcactgtgctaggcactgcagggagatccaaaaattatgaggtagaacccatgcttcagaaaagatgaaaattaactgaggagacagaactcgcaaacataaaacaatcagaagaataggctaatcatgttctccttatggaactcaaaaaaaaaaaaaaaaacaacaaaacaacaacancanaaaaaacgacctctctatcattgtttttcatcttaagtctgtagcttaaggtgtcaatagctgattttgctactggctatgctccaaataaatctctctaagaaatgacttcccatttctgaaaatgtttccactgccatattttctcacacaaaaaaaatgaaactaaattggggatttctaactaatatcctgagtgtaagcaatgttttttctcaaaataacatgtccattatccagataccacactggctttcaatggcagaatttgaatgtcttcataaattttcctattctatagnacaaggcttatatccgaaatcaaaatggccccaagggtgccaatcacactcatggggaaaggtatggtgagttatgtcaaggtggcctgcatagggctctgcacgcctcaatctgtggggagtctctctctacattgacctactggatgagcttatccatttccatagctttagtcatcatctttaggggggtgatctaaaaatgtccatcttcaggacttaatttgctgctcagctctaggcctgccttccaattgtccactagacatcatcttcccaaactagagttcctcaagaattcccacttctatcaagaacaccacaatatttccagttgacttcatagacatatacttgattcctgtccttctctatttcttcacctctaatctgtcaccaagccctgatggttttgcttttaaatatctgtatttgcctattcctcatttccactgtcactttcgtagttcatggtagaatttcacttaacccatggtactagaaacatttctttgtaagatgccccgcttcatctctagcctgcatccattcattctccttacaaaaagcagtctactttcaacaccataaatccacatcaaacagtccatatatatttgttgaaatgagatgaattaaattgcattacaaaatattcctatatgacagacagtttccttatttggaacatgtgcatattaatgatttagggatgctatgaatgctagagaataaacacgatttcaaggtattttgcaagcataatgtcccaggactttgaaataaaaatacatttctatctactatattcacattctatgaaaccatcagaatttttgcagtatgatgtgcttcataataccagcttattaacattgtgtgttcatatctatggtgctgccttttggaaactgagcaaaattctcagagtaaggtactcacagtgagatgggtcatactactggcccatctagggcaataaggaggcaatcactaaattaagctctgatgaatgtgagaggttaacttatttctccaacctaatccatttattttcagctccactaacttactaaaggatcaaacggaatatatttaactatatgatcaaaatataaggatgattcactgacttttctaggttggtagtacagcaattgatttgctggtacaaccctgcagacaccatcttgtacagctacactgcgtgaaacagtgccaggcaagccaccctgcattttcactgaatgaatgcaggccttctttgctgcccttgttgccgcccatttgactcctgtcccaagtcagacaatcttgaattcatgcattctcctgaaaagtgcacatggcccttggcttcttctccattcctatatgtctcctcctctttcacaaagatccagccacatgaaccttctgtggagttcttaaaccaacaatcagcttcttctttcctgtctctgggc

SEQ ID NO: 388259 - DNA, 251 bp, Homo sapiens
tggtatctctactattccattaagagaatttccctgcactctccacaaacactgaagagtgagatttctccttcctaaaagtttgcattttcttcctaagaacactagctgagagggatggatgtacctaaaatgtagagctgattgaaatgtaggcagtatgcacagcctctgggaaccacgcaggctttatccaccaacatttgagtctgtggctgatgggaaaatgtgatagctgaaagtaaccaatg

SEQ ID NO: 388260 - DNA, 340 bp, Homo sapiens
atgcaggaggtggaggttgcagtgagctgagatagcaccgtggcactttagcctgggtgacagtgagaccctgtctcaaaaaaaaagtcactcattggactttgtttttgtagacccttcccttttttcctttctatctattcaggcatacattttaatttaacatatgacagtcattgacagagaatgtgtaagatgagaatttgttcaccttgccgggcgcggtggctcacgcctgtaatcccagcactttgggaggccgaggcgggaggatcacgaggtcaggagatcgagaccatcctggctaacacggtgaaaccccgtctctactaaaactaca

SEQ ID NO: 388261 - DNA, 662 bp, Homo sapiens
actccgtctcaaaaaaaaaaaaaaaaaaaaaaaaaaaaaatgaattgacctgtgacacctgtagcctaataaacatattaagaaaagtacttagtattgtatagatatttggattccaagagaaaatgcaacatttataataagaagtccatactctttttcttacagcagagcgtcacactgagttccattttaaaaaaggactcatttttcaggccaacaactgttgcatttgaatcagatataaataatagattttccacaaacactcagctgattgtagcagtgttatttaagctggtatgtttattttttttttcttggaaggatagctttatattttggctttcattataaattgtgttctgcttgtgtttaaatggcttacttataagctagagcactatatgggagtgttcttctctgtatggtatccttttatttgcttggctgggttcataacagtgtgtgccatattctttcttttcactgattctaagccatgagacttattagcatctggtggcaagctgcagggaccattaacagtgtgtctctttgactacaacgtggatctgccactacgcgctatgtaccattatgtacaatctctatttggctcaacttcgatgaaaaagaaataaatatttgctaaactctca

SEQ ID NO: 388262 - DNA, 419 bp, Homo sapiens
acctgtgcgcatttaggtggcagatgtaatagagcagaggaagtgctctgagacctatgtttgttctggccagttttaaagagaggggaagcgactctctaatctgctttgaagcaagtgggaggagggaagttgcacaggactcccaggaacctgtacacaatctgtctccttctgtgaccagctgaggctgggtggtgactgtaagccctgttcatgagacaggaggagagagccttgaagaaggaaagcctggggtgtttttctgtggtgctgagggacagggacagtaagaggttggagtaaataataccagtatgaatactaatactctgaataaggacagctgacaagcattggttgcttaatgggtgccaagcacagggctaaacatttacctaaattattgtggcactata

SEQ ID NO: 388263 - DNA, 196 bp, Homo sapiens
actgcactccagcctggcgagcgagactttgtctaaaaaaaaaaatcaactctgaaatttttccagtacaagtgtctgcgatttcaccccctttaatattttaggaaaactcatctcacttgcttgctttatttgcctgtgctgttggttccacgcactcatcagctcctccaggggaagccctggttccccacat

SEQ ID NO: 388264 - DNA, 306 bp, Homo sapiens
ttttgtgttttaattctatatcctgctacttttctgaattcatttactggttctaacaagtttttttgtgtgtgtgtgtgtatgtgtgtgtacagcattgttagggttttttaacacataaaatcatatcatctgtaaacagagataattttacttctccctttccaatgtgtatgccttcctttccaatttgtatttatttttcttgcctaattgttctagctagaactttcagtactatgttaaatagtagtggtgaaagcaggcatccttgccttactcctgatcttagggaaaaaacttgtg

SEQ ID NO: 388265 - DNA, 757 bp, Homo sapiens
tccatgcttccccatgtaagatgtgcctttcaccttctgccatgattatgaggcctcccgagccacgtggaactggtcttcattactccagccaaaaaaatagtaatgaaaatggaaacacttcaaggtttctttgaagactagaaataagttggtgaaggatatggcatataacagagctggaacacccttcttctcctgcctttggacatcagaacttcagattctctggccttcagacttcaagacttgcactagtggccccctgggttctcaaggttttggccgcctcggttgagagttacaccatcggcttctttggttctgaggccgttggagttggactgagccatgctaccagcttccctgggtctccagcctgcagattgcctactgtgagatttagcctccataatcacgtaacagaatattggcatgtagcactcctcaaaacatagaaagcagaaacaaatcaattctgcctggaggacctccccgatctcaacacccagtggttttgacagaattgatatagaaatagaagcttcaagcaaccttacgatggaggcagaagaaggattctatggttggaaacctgccagactcacaggctacggagaagaaaggctaaatccaccagactgttggatgcacctaaaacaaattgccctccgtggcttggtttcttattaatatactcatagaaatgcacaagaactgaaagctcgatagggaaaccaaaaaataaaaattaaaa

SEQ ID NO: 388266 - DNA, 400 bp, Homo sapiens
gagattgcttcctgtctagcctcaaggctctgtcctctgaaagccacgcttgggatcttcaggtaacagaatattggcatgtagcactcctcaaaacatagaaagcagaaacaaatcaattctgcctggaggacctccccgatctcaacacccagtggttttgacagaattgatatagaaatagaagcttcaagcaaccttacgatggaggcagaagaaggattctatggttggaaacctgccagactcacaggctacggagaagaaaggctaaatccaccagactgttggatgcacctaaaacaaattgccctccgtggcttggtttcttattaatatactcatagaaatgcacaagaactgaaagctcgatagggaaaccaaaaaataaaaattaaaa

SEQ ID NO: 388267 - DNA, 967 bp, Homo sapiens
catgggggcagacttccccctgctgttcttatgacagtgagtgagttctcatgagatctcattgttcaaaagtgtgtagcacttcccccttcactctctctctcctgctctgccatgtaaagatgtgcctgcttcccctttcattccaccaggattctaagtttcctgaggcctccctagccatgcatcctatacagcctttggaactgtgagtcaattaaacctcttttcttcataaattacccagtctcaggtagttcttaatagcaatgcaagaatgcctaatacagctttcaagtattatttttaaaaagaggcaccacctttactctggcttggctgaagtgatacgtgtcaccagcacagaagaaacagagctgagggatgagctggaacacccttcttctcctgcctttggacatcagaacttcagattctctggccttcagacttcaagacttgcactagtggccccctgggttctcaaggttttggccgcctcggttgagagttacaccatcggcttctttggttctgaggccgttggagttggactgagccatgctaccagcttccctgggtctccagcctgcagattgcctactgtgagatttagcctccataatcacgtaacagaatattggcatgtagcactcctcaaaacatagaaagcagaaacaaatcaattctgcctggaggacctccccgatctcaacacccagtggttttgacagaattgatatagaaatagaagcttcaagcaaccttacgatggaggcagaagaaggattctatggttggaaacctgccagactcacaggctacggagaagaaaggctaaatccaccagactgttggatgcacctaaaacaaattgccctccgtggcttggtttcttattaatatactcatagaaatgcacaagaactgaaagctcgatagggaaaccaaaaaataaaaattaaaa

SEQ ID NO: 388268 - DNA, 810 bp, Homo sapiens
ataatttgaatcgattctactcctgagactagtgtttataaataaaaagcgctttactggtatctccctgcccacaatgctcaactccaggatttccctggctcacctgcctgccatgaccaacaaggaagcagcctttgacaacgcagtggaagaacatgtgatcaaggaggagtacaaaatatggaaaaataacacctcttttccttatgatttggtgatgactcaggctctggagtggcccagcctaactgcacagtggcttccagatgtaaccagaccagaagggaaagatttcagcagtcatcgacttgtcccgggtacacacacatcagttgaacaaaaccaccttgtgcagcttcctagtgatgatgctcagcttgacgcatcacactacaacagcaagaaaggagaatgtggaggttgaggttcggttagtggaaaaattgaaagagaaatcaacaccaagctgaagaagtaaacagggcctgatatattacccaacacccttgtagcatcacaacaaagactccatccagtgatgtttttgtctttgactatacaaaacatccttctaaaccagaccctctgaagagtgcattccagatttgcatctctgtggacatcagaaggcaggctgtgggcttttaaggaacccaaatctcagtggacacttacttattacttcagataaccataccatctgcctatgggacatcagtgctgtttcaaatgaagaaaaagtgttgaatgtaaagaccatctttacagggcatacagcagtatttggagatagagatgcttccagtc

SEQ ID NO: 388269 - DNA, 379 bp, Homo sapiens
ttcttacatcaaatgcagtatatcatatcctctgttctataccttataattttacttaacatgtatctaaattaaaaaaaatttttttatttttagtagaggtgaggttttgccatgttgcccaggctggtctcgaactcctgggctcaagcaatccacccaccttggcttcctgcagtgttgggattacaggcgtgagccaccacacctgggcaaattttctaagtaaacatttatttggtagaagaaatatatcaagttaattatcccctacatttaaaaattctagaaaaaatcatattgtattacaggtgtagcccttcttctttgataaatagtaaagttattttgtatgctttatgttaaaattgtcttttaa

SEQ ID NO: 388270 - DNA, 592 bp, Homo sapiens
agcttaaaaaattgcaacaaaaatttcatatttttagaaagtttacacatttgtgttgggcctcattcaaagctgtcctgggccatgggttggacaagcctgatttaaggagtacattgaagcctaattaaaatgcttttcaccattgagtaaaactttatgatcaggtttgtcaggaacctcatccaaggtagtttagttagtggagtatcaaaagcaccttgttgtcagacactctcactaggacagtggtcccccagcagaggccaacaagcagttatacccaaacttcagcaaaatcaaaataagtagatttggtctaaagtccacaagcagtaaaaaccgttaccttgaaattttctgtaggtgcaaattattcttcagaattaaaggcttgattttcctaagctgtaattctgtttgagtcacttgtgaaaaatgctattttggtaaaagaacaactatgtattctttcaaaggagttttttccctttgtgttaatgcatttgcgtttatttggaattgcaggagatgatgaatgaagtacttgggaagtttaattcagaaatcattttgctttgcttatgtagaa

SEQ ID NO: 388271 - DNA, 955 bp, Homo sapiens
gagaacttcccatcttcccagtaagtcctaccggacagtacagagctgtgggtgtgtctgctttcccttcctgatttccatggccctggccagagtccctaccaacctctgggtttcctgtgcagttatcagtccagccaactcacctgcagagtgtaaagggtctggtgtacctacatttcacaaagcatcaggaatttgaagcatttctaggaatctaggaatatctagaaatcctaaatggaaatacaaccacacacatacacatatcaggcatgtatggtaatggttcaggctgggctgctttatggcttcctctgccataacagatgcagggaatggcctccctgcctcctggggtggggtaaggtgctaagcggaccagggctttgacattaggaagatttgagtttgaatcctggctttgtgaccttgatctcataacttaaactgttagcttcagaattctcttgtttaaaatggggatagtgataggaacacctccagtttttgttaagggcaaaatgataatctcatcagcacactacaagcacccaatatccacggatgtggttcccttttcctagattccctgctgaactccaaattggcagagaggaatattgcctaagtaatggtctcagtacctcagcagtactggaaggaattgccaattagagggaagctattagccagctatccacttcatgtgacccatggcaggattaataagccagtaaagcagggttgctcttcctgtgaattccttaacacttttcatgaggtttactgcctgctggacaatgtatgtattataatctattcctaaaacttgaggaatagttcaataattagcagttaaccactttggatccacacaagctcagcactcggtaatttactgtttctacaaccataggagaaagagtaggaagtaagtcattaaggcagtgat

SEQ ID NO: 388272 - DNA, 491 bp, Homo sapiens
gcccgggatgcatctcagtggaaaagcgcagagagtcaaagacctcagtgtcgggccatacagcactgttcctatggggggcatgatatgcatagagatcaggcttcctgtgggcagaacagaggtggtggcgggtgaggtgggggcacccctcccaggggagcctgtggagagttatgcccagtggggtggtgaaagccccagagagtagaaaggaaaatgccacccaggagaggacaacctggctggggtggggagcacctcgagacatctatctctacttggagggaaaggggaagccacagaggcagcagtgacagtatacgctgaggtggaaggaccactcagggtcagtgcctccaagtcctggcagccacttggccttgcgtgggaacttgcggtttaatcttccgtgaacttccatggttgatacccactgctaccagccagtgcacgcctcagagggcacccaaagctgtgcgtttgagtgc

SEQ ID NO: 388273 - DNA, 368 bp, Homo sapiens
  misc_feature (368)..(368): n is a, c, g, or t
tttccagatattatggaatatgaaaacacacaaaatgtctatacagtcaagataacctgtggaaaaataatgaagacagtggaggaaaggcaaaatggtaaagaagagaagagagagaaacaaaataatcattttccagcctacctaaaataataacctggactttcataaaactggcatatcttctgttttacatggaaaattattttatcttaagtttccatttagttgattaaaaatagggttatgaatgttaaataagtgatgatttattgcaaaggaaatatgtttcgaaaggtcgaataatgtctgtaacaataaaaggctggcctcgttggcctcagcggtggagcttgtcgggccggaan

SEQ ID NO: 388274 - DNA, 413 bp, Homo sapiens
  misc_feature (40)..(40): n is a, c, g, or t
  misc_feature (413)..(413): n is a, c, g, or t
aagaaatggatataaataaagagatatacagacaggcaangaaagcctttagagttaactgaaatggaacttttccagatgaaacatacagtcaagataacctgtggaaaaataatgaagacagtggaggaaaggcaaaatggtaaagaagagaagagagagaaacaaaataatcattttccagcctacctaaaataataacctggactttcataaaactggcatatcttctgttttacatggaaaattattttatcttaagtttccatttagttgattaaaaatagggttatgaatgttaaataagtgatgatttattgcaaaggaaatatgtttcgaaaggtcgaataatgtctgtaacaataaaaggctggcctcgttggcctcagcggtggagcttgtcgggccggaan

SEQ ID NO: 388275 - DNA, 651 bp, Homo sapiens
ggccgagcttctgagctggtgcctgtggatgctcgacggtcccgcagctcccacaatgggatggccaagcagaccctgagatccacagcccccctttagtgaaacaggagggaggtcgctgggcacagggagccgggaacgcctgccctccccgccatcgacggctcccgaggcctgaaccttcgctccagccccagcacaagccggccagggcgcagggccaagtgttgcccgccattccccgggtaccccatgacctcccagctggggctggctcggactgaggagtcgtccctgcccgtcaccctctggggtctccagtgctgcggagctcagctggcttttgcagcgatttgggggagtctctcccgcgggatgagggggggctctccgccgcacccgcactatgatggcccagagacccgagcttgggtcactcccgtcgccctcggggctcggcgagggtgcaggaggcgggcgctgagccggtgacgcgactccgggcggctcccagggtgcgccgcatatatagcagcggcggcggtggcggcggccacaccgggcggcggacacgtggagggacccggcccgcgccttctgcccctgctgccggccgcgccatgcggtgagcgccccaggccgcagagccac

SEQ ID NO: 388276 - DNA, 450 bp, Homo sapiens
ccccacatatactgagggacaactgtatttacatagcacttaattgtattatgtattataaacagtttagaggtgatttaaagtatacaggaggatgtgtgtaggttgtatgcaattactatataattttatatcagagacttgagcatctggggattttggtattctagagaggtcctagaaccaatccccttcaaataccaagagacagctatattttcacaaatcccaggaacccagtggcctcttgcagtgacggccaaaggttagataatatcctgtgtttggaggtactacctgcctaaagcagcaactctttcctgcaggcctgaggtccttgggggaatatctgggtagtgagcttcccagcatctgcctgggagaaggatggatggaacgtttgtttctctagcaatgcttaaatcctctcttctaccttacaaaaaaaaa

SEQ ID NO: 388277 - DNA, 213 bp, Homo sapiens
caaggcatattattaaatatctagtgtttataaaagagggtgaatccctaaaggtatgaagctagcaaacatatcctaagccatacctcctctactaagagaatagtggttctcttagcacaaccagtggttgtgccagccaagcgcatattaacactcagtttcaaattcatccttctatactctgctctgtgctcgggagctggtactctg

SEQ ID NO: 388278 - DNA, 281 bp, Homo sapiens
tcacagctgagagtttagacctaaaaggggcaataaaattgagttcaaatactgtattaagggacttgcccaaaattacataattattttgtgtaaagtccaaattatacaaatcctcagattccgaggtcggggtttcttttcctgtaacatgttccttcaaatatggctgtatccatgtttcatatcaagcagatccgagaaaaattatgaataatcagatagcataatgtggacacagggtcacgagcaataaagggttcttatagagctattaggaa

SEQ ID NO: 388279 - DNA, 347 bp, Homo sapiens
ttttggaggcagagttttgcccttgtaccccaggctggagtgcagtggtgtgatctcagctcacagcaacctccgcctcctgggttcaagcaattctgcctcggcctcccaagtagctgggattacaggcgactgccaccacacccggctaattttttgttttattagtagagatggggtttcaccatgttggccagactgatcttgaactcctgacctcaggtgatccacccgccttggcctcccaaagcgctgggattacaggcgtgagctgccgcacccagctgtaaactggatttctaatggtagatttttaggtattaacaatagataaaaagatacttttt

SEQ ID NO: 388280 - DNA, 433 bp, Homo sapiens
agacccttagtattacttttacttccctctctgtccattcagaattgtctgtagctcttcctgggagctctgaaaacaactctttccatttctttctgaatgccccctctgcggggctatgatctagtccgtggcttgggtggagggacagatgtcatcctgtcctcttagttttcctttcccatatcaccagatttctttcttctttccgtagctaaagcagaagcatataggttttcatcagactcatttagaccctgaatctgatgtagggttagtcagagcctgtgaggtacacacacgatctaggaatctccctcacacacacacacacagaggcacacatacccaggacacccaagatacacacaccccagaatttctgaggtacatatacacccttcctcaagatcctaatttactaattgatagt

SEQ ID NO: 388281 - DNA, 170 bp, Homo sapiens
gcttggctaccttcgggcttgaactgaaatgctggctcttcctaggtttgaagcctgaccagcctttgaatgggaactccaccctcagctctcctgggtctccagcctgccgactcaccctgcagatcttgggacttgcccgcctccataattacacaagccaattcctt

SEQ ID NO: 388282 - DNA, 374 bp, Homo sapiens
gaatgcttattccccacctcaatctcacagctttactacatttcctaattttttatacttacaaagagagatggttctcaaatgatactgcttagttaacatctcaagattctgtccagattttgaaacagcaccaccaactccagaaacaacaatctggaatacaggtttacgtctgggatcctgggagtcttttaaccaactctccctacctactatctccctgcttggtagtagatttttttcttgatgaccccagtgccttaactgtggctgtggaccctaagcagctcagaatctccattccttcttctgacttaagtgcaacttcaagctgtgtcgtctactgccttccatggacgtttataagtgtg

SEQ ID NO: 388283 - DNA, 415 bp, Homo sapiens
gtggaaacatgatggtgaccatgtcctctgagtcatgtctctcagtttcatggtggcatgcagtcattaaaacagagcttcagaatttgtgctgtggttcgtaaaaaaactcagagtatgtatgttggggggacatggggatgctctttgggatacctgtctctgtgtgccacctgtctttgaaagcgaggaggggtggggagagagagagagagaggagagtttatgtctttcttaatctggttcttgaaaaaaaattccactagattgaaaatctgttgcttttagatgtgtcttttctccatcttggatttgaattcaaatttcatttcatttcacattctttaagttggaaccattcatgttaacatgcaaatttatgcaagcatcaaaacagaagaatgtggtgttttcg

SEQ ID NO: 388284 - DNA, 302 bp, Homo sapiens
aattacggacctaggggctccagcagtttccaggctcccctcggcggggctgaatgatcaaaactggtggtgagaatttttccgggccgtttctaggcagccctccccctccaccagctcggacccccccctccctcctttctccttctcctcccttttccttctcccctcccccagcgtctgggctgagtgatcaaaatagaggaagatggttgtcgccgcaatccagggctttgcaaggcgcggtttaatgggccgcctgtcagcttcctgctcgcaggaggaggtgacaagccaagcga

SEQ ID NO: 388285 - DNA, 207 bp, Homo sapiens
gggagctgccaagaccccaggcagcctcagtctgtggggtgcggcctgtggggtgcgaggagaggggcacaggctgggagctccggtcagtcctggccctcctaaagggcttgagttcagctgccttatcagggaaccaagccaaaccagcacagacctaaggatcaccccatggatggaagcccacccttctctctccactctaca

SEQ ID NO: 388286 - DNA, 498 bp, Homo sapiens
taaaaaagacagagtattgctctgtcgcccaggctgaagcacaatggcacagacttggctcactgcaagctccgccttccaggttcaagtgattctgctgcctcagcctcccgagtagctgggactacaggcgcaagccaccatgcacagctactttttgtgtttttagtagagacggggtttcaccatgttggccaggctggtctcgaactcctgagctcatgatctgcccaccttggcctcccaaagtgctgggattacaggtgtgagctactgcacctggccagaaaccattctaaaaaacaaaacaaattccaattttcctttagtatttaacatgccatttcaatcctaagtaactattcttatatctccttgaaatttttgtactaaaaataaattttgtcctattagttaaaaaaaccaacagcaatcttcaaatgtcaatgattaagggtttttgggttacacaaacagtttgaaccactgagttcaata

SEQ ID NO: 388287 - DNA, 367 bp, Homo sapiens
gattctcttcccgcaggtgtcccgtttctcctcccctagtgtccttaagtcctcctccacaggaacatctattgtggcttgattctcttcccgaggatgtccctttctcctcccctagtgtccttaagtcctcctccacagggaacatctatttgagcttcgattcacttcccaggtgtccctttctcctcccctagtgtccttaagtcctcctccacagggaacatctatttgggcttgtgtccctttctcctcccctagtgtccttaagtcctcctccacagggaacatctatttgggctttgatgtttaataaagtagaatctcttcccaggtgtccctttctcctcccctgtgatagagtact

SEQ ID NO: 388288 - DNA, 1041 bp, Homo sapiens
  misc_feature (266)..(266): n is a, c, g, or t
atccgggacttcagggtcagtacattacaatgcctgacaaatcctagccagttctatcaaattatatctttcttacaggcttttaagctattagtctcataaagatacatttaatcagcgaggtaatggcatgatgagtgtttttaggttaaaaagagaacaggaactgttgccagcagaatggcgatattcaagacaacacgcacaagaagaggcgggtcctacgcgcttcgctagggaagcccgggtcagctcgctgcgcaggngcagtgagttcgacacaccatgccgactgtcagcgtgaagcgtgatctgctcttccaagccctgggccgcacctacactgacgaagaatttgatgaactatgttttgaatttggtctggagcttgatgaaattacatctgagaaggaaataataagtaaagaacaaggtaatgtaaaggcagcaggagcctctgatgttgttctttacaaaattgacgtccctgccaatagatatgatctcctgtgtctggaaggattggttcgaggacttcaggtcttcaaagaaaggataaaggctccagtgtataaacgggtaatgcctgatggaaaaatccagaaattgattatcacagaagagacagctaagatacgtccttttgcggtagcagcagttctccgtaatataaagtttactaaagatcgatatgacagcttcattgaacttcaggagaaattacatcagaatatttgcaggaaaagagcactggttgccattggtacccatgatttggacactttgtcgggcccatttacttatactgcaaagcgtccttcagatatcaaattcaagcctctaaataagaccaaggagtatacagcctgtgaactgatgaacatatacaagactgacaatcacctgaaacattatttacatatcattgaaaacaaacccctgtatccagttatctatgatagcaatggtgtcgtcctttcaatgcctcccatcatcaatgggggtcatcccaataaaggataccgaacatttttgatgcgg

SEQ ID NO: 388289 - DNA, 3143 bp, Homo sapiens
  misc_feature (3)..(3): n is a, c, g, or t
  misc_feature (2958)..(2958): n is a, c, g, or t
tgnacaaaaagcaggcgggacgcggtcggaattccggcatgccgactgtcagcgtgaagcgtgatctgctcttccaagccctgggccgcacctacactgacgaagaatttgatgaactatgttttgaatttggtctggagcttgatgaaattacatctgagaaggaaataataagtaaagaacaaggtaatgtaaaggcagcaggagcctctgatgttgttctttacaaaattgacgtccctgccaatagatatgatctcctgtgtctggaaggattggttcgaggacttcaggtcttcaaagaaaggataaaggctccagtgtataaacgggtaatgcctgatggaaaaatccagaaattgattatcacagaagagacagctaagatacgtccttttgcggtagcagcagttctccgtaatataaagtttactaaagatcgatatgacagcttcattgaacttcaggagaaattacatcagaatatttgcaggaaaagagcactggttgccattggtacccatgatttggacactttgtcgggcccatttacttatactgcaaagcgtccttcagatatcaaattcaagcctctaaataagaccaaggagtatacagcctgtgaactgatgaacatatacaagactgacaatcacctgaaacattatttacatatcattgaaaacaaacccctgtatccagttatctatgatagcaatggtgtcgtcctttcaatgcctcccatcatcaatggggatcattccagaataacagtaaatactagaaatatttttattgaatgcacgggaactgactttactaaggcaaaaatagttcttgatattattgtcaccatgttcagtgaatattgtgagaatcaatttacggtcgaagctgctgaagtggtttttcctaatggaaaatcacatacctttccagaattagcttaccgaaaggagatggtgagagctgacctaattaacaaaaaagttggaatcagagaaactccagaaaatcttgccaaacttctgaccaggatgtatttaaaatcagaagtcataggtgatgggaatcagattgagattgaaatccctccaaccagagctgacattatccatgcatgtgatattgtagaagatgcagctattgcttatggatataacaacattcagatgactctcccgaaaacttacaccatagctaatcaatttcctcttaataagctcactgaacttctccgacatgacatggcagccgctggcttcactgaagcacttacctttgccctgtgctcccaagaagatattgctgataaactaggtgtggatatctctgcaacaaaggcagtccacataagtaatcctaaaacagctgaatttcaggtggcacgcactacccttcttcctggcctcctgaagaccatagcagcaaatcgtaagatgccccttccactgaaactgtttgaaatctctgacattgtaataaaagattctaatacagatgtaggtgcaaaaaactacagacatctctgtgctgtttattacaacaagaatcctgggtttgagatcattcatgggctgctggacagaattatgcagttgctcgatgtgcctcctggtgaagacaaggggggatatgtgatcaaagcatcagaagggcctgctttcttccccgggcgatgtgcagagatctttgccaggggtcaaagcgtcgggaagcttggggtccttcatcctgacgttatcaccaaatttgagctgaccatgccctgctcctccctagaaatcaatattggaccctttttgtgaagattggtctctgtggtgtgattctcttcccaggtgtccctttctcctcccctagtgtccttaagtcctcctccacagggaacatctatttgggctttgatgtttaataaagtagaaagcactgtctggctgtgtgggtagagaccatcctttccctgcatattaggccagcttgtgccatataccaatgtggtgtctgtgtgtgaagctgcattgttgggtaaaagccccgtggagtgctggagaaatgcactagcagagtgcaggatctgttctgaaaggcagacgtgctcctcagacatcagaacatcacattggaacggattactcctgcataacaagatcccatttctttccttattgataaaacaagataatcgatgagaattcatgttgcatgagttcgagataactgaggggtttagctttgattttctacatttgacatgtattcatcattgagaaacactaaaataacaatatttttagaaaacgtttaagaatcaattatggtccaacaattatagcttctgaggtcagtttaaagtgaaagaaaaatctgtaatacaaggattcaaaatatgtgagggtgcataggtattttttactctatctgtgatactctaagatagagtacatgcaacaaagatctgttctgctgtaagagttaaaatggacaagtattgatatcaatgcagtatgaacattaggaaacaatgagaagcttatttttgccataggccatacatgttactgtaatcagtcagttataaaatcatggttttaaatacttaattgagctactagtttctctattgtcccagggagatattagacctctctttttctgaagctaagcttcagccaatcctccttgttttatatcctaatttcctttcttacttcaatctagaattctccagtaggtaccatctctggaaaaaagctgggtctcatgtttgagacaagttcccaggtactattgaagtaataagaaatatgataaaatataatactttaaagtcccagtagaaatagctaacaaaggctgggtgcgctgtggctcatgcctgtaatcctagcactttgggaggctgaggtgggcagatcacttgaggccaatagttcgagatcagcctgaccaacatgntgaaatgccatctccactaaaaatataaaaattagccaggcatggtggtgtgggcctgcagtcccagctacctgggaggctgagtcaggaaaatctcttgaaccaggaggtggacgttgcagtgatcccagattgtgccactgccctccagcctgggtgacagagtgagattctgtctacaaaaa

SEQ ID NO: 388290 - DNA, 2191 bp, Homo sapiens
  misc_feature (3)..(3): n is a, c, g, or t
tgnacaaaaagcaggcgggacgcggtcggaattccggcatgccgactgtcagcgtgaagcgtgatctgctcttccaagccctgggccgcacctacactgacgaagaatttgatgaactatgttttgaatttggtctggagcttgatgaaattacatctgagaaggaaataataagtaaagaacaaggtaatgtaaaggcagcaggagcctctgatgttgttctttacaaaattgacgtccctgccaatagatatgatctcctgtgtctggaaggattggttcgaggacttcaggtcttcaaagaaaggataaaggctccagtgtataaacgggtaatgcctgatggaaaaatccagaaattgattatcacagaagagacagctaagatacgtccttttgcggtagcagcagttctccgtaatataaagtttactaaagatcgatatgacagcttcattgaacttcaggagaaattacatcagaatatttgcaggaaaagagcactggttgccattggtacccatgatttggacactttgtcgggcccatttacttatactgcaaagcgtccttcagatatcaaattcaagcctctaaataagaccaaggagtatacagcctgtgaactgatgaacatatacaagactgacaatcacctgaaacattatttacatatcattgaaaacaaacccctgtatccagttatctatgatagcaatggtgtcgtcctttcaatgcctcccatcatcaatggggatcattccagaataacagtaaatactagaaatatttttattgaatgcacgggaactgactttactaaggcaaaaatagttcttgatattattgtcaccatgttcagtgaatattgtgagaatcaatttacggtcgaagctgctgaagtggtttttcctaatggaaaatcacatacctttccagaattagcttaccgaaaggagatggtgagagctgacctaattaacaaaaaagttggaatcagagaaactccagaaaatcttgccaaacttctgaccaggatgtatttaaaatcagaagtcataggtgatgggaatcagattgagattgaaatccctccaaccagagctgacattatccatgcatgtgatattgtagaagatgcagctattgcttatggatataacaacattcagatgactctcccgaaaacttacaccatagctaatcaatttcctcttaataagctcactgaacttctccgacatgacatggcagccgctggcttcactgaagcacttacctttgccctgtgctcccaagaagatattgctgataaactaggtgtggatatctctgcaacaaaggcagtccacataagtaatcctaaaacagctgaatttcaggtggcacgcactacccttcttcctggcctcctgaagaccatagcagcaaatcgtaagatgccccttccactgaaactgtttgaaatctctgacattgtaataaaagattctaatacagatgtaggtgcaaaaaactacagacatctctgtgctgtttattacaacaagaatcctgggtttgagatcattcatgggctgctggacagaattatgcagttgctcgatgtgcctcctggtgaagacaaggggggatatgtgatcaaagcatcagaagggcctgctttcttccccgggcgatgtgcagagatctttgccaggggtcaaagcgtcgggaagcttggggtccttcatcctgacgttatcaccaaatttgagctgaccatgccctgctcctccctagaaatcaatattggaccctttttgtgaagattggtctctgtggtgtgattctcttcccaggtgtccctttctcctcccctagtgtccttaagtcctcctccacagggaacatctatttgggctttgatgtttaataaagtagaaagcactgtctggctgtgtgggtagagaccatcctttccctgcatattaggccagcttgtgccatataccaatgtggtgtctgtgtgtgaagctgcattgttgggtaaaagccccgtggagtgctggagaaatgcactagcagagtgcaggatctgttctgaaaggcagacgtggcttcttcaagacctttaagaaacaaccacatttgggaaaccggattaacttccctggcattaaacagggaacccccattttctttttccttt

SEQ ID NO: 388291 - DNA, 3077 bp, Homo sapiens
  misc_feature (2892)..(2892): n is a, c, g, or t
agcaggctggtacgccccggcgtttggcatgccgactgtcagcgtgaagcgtgatctgctcttccaagccctgggccgcacctacaacatctgagaaggaaataataagtaaagaacaaggtaatgtaaaggcagcaggagcctctgatgttgttctttacaaaattgacgtccctgccaatagatatgatctcctgtgtctggaaggattggttcgaggacttcaggtcttcaaagaaaggataaaggctccagtgtataaacgggtaatgcctgatggaaaaatccagaaattgattatcacagaagagacagctaagatacgtccttttgcggtagcagcagttctccgtaatataaagtttactaaagatcgatatgacagcttcattgaacttcaggagaaattacatcagaatatttgcaggaaaagagcactggttgccattggtacccatgatttggacactttgtcgggcccatttacttatactgcaaagcgtccttcagatatcaaattcaagcctctaaataagaccaaggagtatacagcctgtgaactgatgaacatatacaagactgacaatcacctgaaacattatttacatatcattgaaaacaaacccctgtatccagttatctatgatagcaatggtgtcgtcctttcaatgcctcccatcatcaatggggatcattccagaataacagtaaatactagaaatatttttattgaatgcacgggaactgactttactaaggcaaaaatagttcttgatattattgtcaccatgttcagtgaatattgtgagaatcaatttacggtcgaagctgctgaagtggtttttcctaatggaaaatcacatacctttccagaattagcttaccgaaaggagatggtgagagctgacctaattaacaaaaaagttggaatcagagaaactccagaaaatcttgccaaacttctgaccaggatgtatttaaaatcagaagtcataggtgatgggaatcagattgagattgaaatccctccaaccagagctgacattatccatgcatgtgatattgtagaagatgcagctattgcttatggatataacaacattcagatgactctcccgaaaacttacaccatagctaatcaatttcctcttaataagctcactgaacttctccgacatgacatggcagccgctggcttcactgaagcacttacctttgccctgtgctcccaagaagatattgctgataaactaggtgtggatatctctgcaacaaaggcagtccacataagtaatcctaaaacagctgaatttcaggtggcacgcactacccttcttcctggcctcctgaagaccatagcagcaaatcgtaagatgccccttccactgaaactgtttgaaatctctgacattgtaataaaagattctaatacagatgtaggtgcaaaaaactacagacatctctgtgctgtttattacaacaagaatcctgggtttgagatcattcatgggctgctggacagaattatgcagttgctcgatgtgcctcctggtgaagacaaggggggatatgtgatcaaagcatcagaagggcctgctttcttccccgggcgatgtgcagagatctttgccaggggtcaaagcgtcgggaagcttggggtccttcatcctgacgttatcaccaaatttgagctgaccatgccctgctcctccctagaaatcaatattggaccctttttgtgaagattggtctctgtggtgtgattctcttcccaggtgtccctttctcctcccctagtgtccttaagtcctcctccacagggaacatctatttgggctttgatgtttaataaagtagaaagcactgtctggctgtgtgggtagagaccatcctttccctgcatattaggccagcttgtgccatataccaatgtggtgtctgtgtgtgaagctgcattgttgggtaaaagccccgtggagtgctggagaaatgcactagcagagtgcaggatctgttctgaaaggcagacgtgctcctcagacatcagaacatcacattggaacggattactcctgcataacaagatcccatttctttccttattgataaaacaagataatcgatgagaattcatgttgcatgagttcgagataactgaggggtttagctttgattttctacatttgacatgtattcatcattgagaaacactaaaataacaatatttttagaaaacgtttaagaatcaattatggtccaacaattatagcttctgaggtcagtttaaagtgaaagaaaaatctgtaatacaaggattcaaaatatgtgagggtgcataggtattttttactctatctgtgatactctaagatagagtacatgcaacaaagatctgttctgctgtaagagttaaaatggacaagtattgatatcaatgcagtatgaacattaggaaacaatgagaagcttatttttgccataggccatacatgttactgtaatcagtcagttataaaatcatggttttaaatacttaattgagctactagtttctctattgtcccagggagatattagacctctctttttctgaagctaagcttcagccaatcctccttgttttatatcctaatttcctttcttacttcaatctagaattctccagtaggtaccatctctggaaaaaagctgggtctcatgtttgagacaagttcccaggtactattgaagtaataagaaatatgataaaatataatactttaaagtcccagtagaaatagctaacaaaggctgggtgcgctgtggctcatgcctgtaatcctagcactttgggaggctgaggtgggcagatcacttgaggccaatagttcgagatcagcctgaccaacatgntgaaatgccatctccactaaaaatataaaaattagccaggcatggtggtgtgggcctgcagtcccagctacctgggaggctgagtcaggaaaatctcttgaaccaggaggtggacgttgcagtgatcccagattgtgccactgccctccagcctgggtgacagagtgagattctgtctacaaaaa

SEQ ID NO: 388292 - DNA, 3042 bp, Homo sapiens
  misc_feature (2857)..(2857): n is a, c, g, or t
agcaggctggtacgccccggcgtttggcatgccgactgtcagcgtgaagcgtgatctgctcttccaagccctgggccgcacctacactgacgaagaatttgatgaactatgttttgaatttggtctggagcttgatgaaattccaatagatatgatctcctgtgtctggaaggattggttcgaggacttcaggtcttcaaagaaaggataaaggctccagtgtataaacgggtaatgcctgatggaaaaatccagaaattgattatcacagaagagacagctaagatacgtccttttgcggtagcagcagttctccgtaatataaagtttactaaagatcgatatgacagcttcattgaacttcaggagaaattacatcagaatatttgcaggaaaagagcactggttgccattggtacccatgatttggacactttgtcgggcccatttacttatactgcaaagcgtccttcagatatcaaattcaagcctctaaataagaccaaggagtatacagcctgtgaactgatgaacatatacaagactgacaatcacctgaaacattatttacatatcattgaaaacaaacccctgtatccagttatctatgatagcaatggtgtcgtcctttcaatgcctcccatcatcaatggggatcattccagaataacagtaaatactagaaatatttttattgaatgcacgggaactgactttactaaggcaaaaatagttcttgatattattgtcaccatgttcagtgaatattgtgagaatcaatttacggtcgaagctgctgaagtggtttttcctaatggaaaatcacatacctttccagaattagcttaccgaaaggagatggtgagagctgacctaattaacaaaaaagttggaatcagagaaactccagaaaatcttgccaaacttctgaccaggatgtatttaaaatcagaagtcataggtgatgggaatcagattgagattgaaatccctccaaccagagctgacattatccatgcatgtgatattgtagaagatgcagctattgcttatggatataacaacattcagatgactctcccgaaaacttacaccatagctaatcaatttcctcttaataagctcactgaacttctccgacatgacatggcagccgctggcttcactgaagcacttacctttgccctgtgctcccaagaagatattgctgataaactaggtgtggatatctctgcaacaaaggcagtccacataagtaatcctaaaacagctgaatttcaggtggcacgcactacccttcttcctggcctcctgaagaccatagcagcaaatcgtaagatgccccttccactgaaactgtttgaaatctctgacattgtaataaaagattctaatacagatgtaggtgcaaaaaactacagacatctctgtgctgtttattacaacaagaatcctgggtttgagatcattcatgggctgctggacagaattatgcagttgctcgatgtgcctcctggtgaagacaaggggggatatgtgatcaaagcatcagaagggcctgctttcttccccgggcgatgtgcagagatctttgccaggggtcaaagcgtcgggaagcttggggtccttcatcctgacgttatcaccaaatttgagctgaccatgccctgctcctccctagaaatcaatattggaccctttttgtgaagattggtctctgtggtgtgattctcttcccaggtgtccctttctcctcccctagtgtccttaagtcctcctccacagggaacatctatttgggctttgatgtttaataaagtagaaagcactgtctggctgtgtgggtagagaccatcctttccctgcatattaggccagcttgtgccatataccaatgtggtgtctgtgtgtgaagctgcattgttgggtaaaagccccgtggagtgctggagaaatgcactagcagagtgcaggatctgttctgaaaggcagacgtgctcctcagacatcagaacatcacattggaacggattactcctgcataacaagatcccatttctttccttattgataaaacaagataatcgatgagaattcatgttgcatgagttcgagataactgaggggtttagctttgattttctacatttgacatgtattcatcattgagaaacactaaaataacaatatttttagaaaacgtttaagaatcaattatggtccaacaattatagcttctgaggtcagtttaaagtgaaagaaaaatctgtaatacaaggattcaaaatatgtgagggtgcataggtattttttactctatctgtgatactctaagatagagtacatgcaacaaagatctgttctgctgtaagagttaaaatggacaagtattgatatcaatgcagtatgaacattaggaaacaatgagaagcttatttttgccataggccatacatgttactgtaatcagtcagttataaaatcatggttttaaatacttaattgagctactagtttctctattgtcccagggagatattagacctctctttttctgaagctaagcttcagccaatcctccttgttttatatcctaatttcctttcttacttcaatctagaattctccagtaggtaccatctctggaaaaaagctgggtctcatgtttgagacaagttcccaggtactattgaagtaataagaaatatgataaaatataatactttaaagtcccagtagaaatagctaacaaaggctgggtgcgctgtggctcatgcctgtaatcctagcactttgggaggctgaggtgggcagatcacttgaggccaatagttcgagatcagcctgaccaacatgntgaaatgccatctccactaaaaatataaaaattagccaggcatggtggtgtgggcctgcagtcccagctacctgggaggctgagtcaggaaaatctcttgaaccaggaggtggacgttgcagtgatcccagattgtgccactgccctccagcctgggtgacagagtgagattctgtctacaaaaa

SEQ ID NO: 388293 - DNA, 3030 bp, Homo sapiens
  misc_feature (2845)..(2845): n is a, c, g, or t
ataagcagccctggaagacatccgggtactatcaggagcacatctgagaaggaaataataagtaaagaacaaggtaatgtaaaggcagcaggagcctctgatgttgttctttacaaaattgacgtccctgccaatagatatgatctcctgtgtctggaaggattggttcgaggacttcaggtcttcaaagaaaggataaaggctccagtgtataaacgggtaatgcctgatggaaaaatccagaaattgattatcacagaagagacagctaagatacgtccttttgcggtagcagcagttctccgtaatataaagtttactaaagatcgatatgacagcttcattgaacttcaggagaaattacatcagaatatttgcaggaaaagagcactggttgccattggtacccatgatttggacactttgtcgggcccatttacttatactgcaaagcgtccttcagatatcaaattcaagcctctaaataagaccaaggagtatacagcctgtgaactgatgaacatatacaagactgacaatcacctgaaacattatttacatatcattgaaaacaaacccctgtatccagttatctatgatagcaatggtgtcgtcctttcaatgcctcccatcatcaatggggatcattccagaataacagtaaatactagaaatatttttattgaatgcacgggaactgactttactaaggcaaaaatagttcttgatattattgtcaccatgttcagtgaatattgtgagaatcaatttacggtcgaagctgctgaagtggtttttcctaatggaaaatcacatacctttccagaattagcttaccgaaaggagatggtgagagctgacctaattaacaaaaaagttggaatcagagaaactccagaaaatcttgccaaacttctgaccaggatgtatttaaaatcagaagtcataggtgatgggaatcagattgagattgaaatccctccaaccagagctgacattatccatgcatgtgatattgtagaagatgcagctattgcttatggatataacaacattcagatgactctcccgaaaacttacaccatagctaatcaatttcctcttaataagctcactgaacttctccgacatgacatggcagccgctggcttcactgaagcacttacctttgccctgtgctcccaagaagatattgctgataaactaggtgtggatatctctgcaacaaaggcagtccacataagtaatcctaaaacagctgaatttcaggtggcacgcactacccttcttcctggcctcctgaagaccatagcagcaaatcgtaagatgccccttccactgaaactgtttgaaatctctgacattgtaataaaagattctaatacagatgtaggtgcaaaaaactacagacatctctgtgctgtttattacaacaagaatcctgggtttgagatcattcatgggctgctggacagaattatgcagttgctcgatgtgcctcctggtgaagacaaggggggatatgtgatcaaagcatcagaagggcctgctttcttccccgggcgatgtgcagagatctttgccaggggtcaaagcgtcgggaagcttggggtccttcatcctgacgttatcaccaaatttgagctgaccatgccctgctcctccctagaaatcaatattggaccctttttgtgaagattggtctctgtggtgtgattctcttcccaggtgtccctttctcctcccctagtgtccttaagtcctcctccacagggaacatctatttgggctttgatgtttaataaagtagaaagcactgtctggctgtgtgggtagagaccatcctttccctgcatattaggccagcttgtgccatataccaatgtggtgtctgtgtgtgaagctgcattgttgggtaaaagccccgtggagtgctggagaaatgcactagcagagtgcaggatctgttctgaaaggcagacgtgctcctcagacatcagaacatcacattggaacggattactcctgcataacaagatcccatttctttccttattgataaaacaagataatcgatgagaattcatgttgcatgagttcgagataactgaggggtttagctttgattttctacatttgacatgtattcatcattgagaaacactaaaataacaatatttttagaaaacgtttaagaatcaattatggtccaacaattatagcttctgaggtcagtttaaagtgaaagaaaaatctgtaatacaaggattcaaaatatgtgagggtgcataggtattttttactctatctgtgatactctaagatagagtacatgcaacaaagatctgttctgctgtaagagttaaaatggacaagtattgatatcaatgcagtatgaacattaggaaacaatgagaagcttatttttgccataggccatacatgttactgtaatcagtcagttataaaatcatggttttaaatacttaattgagctactagtttctctattgtcccagggagatattagacctctctttttctgaagctaagcttcagccaatcctccttgttttatatcctaatttcctttcttacttcaatctagaattctccagtaggtaccatctctggaaaaaagctgggtctcatgtttgagacaagttcccaggtactattgaagtaataagaaatatgataaaatataatactttaaagtcccagtagaaatagctaacaaaggctgggtgcgctgtggctcatgcctgtaatcctagcactttgggaggctgaggtgggcagatcacttgaggccaatagttcgagatcagcctgaccaacatgntgaaatgccatctccactaaaaatataaaaattagccaggcatggtggtgtgggcctgcagtcccagctacctgggaggctgagtcaggaaaatctcttgaaccaggaggtggacgttgcagtgatcccagattgtgccactgccctccagcctgggtgacagagtgagattctgtctacaaaaa

SEQ ID NO: 388294 - DNA, 3063 bp, Homo sapiens
  misc_feature (2878)..(2878): n is a, c, g, or t
agcaggctggtacgccccggcgtttggcatgccgactgtcagcgtgaagcgtgatctgctcttccaagccctgggccgcacctacactgacgaagaatttgatgaactatgttttgaatttggtctggagcttgatgaaattacatctgagaaggaaataataagtaaagaacaaggtaatgtaaaggcagcaggagcctctgatgttgttctttacaaaattgacgtccctgccaatagatatgatctcctgtgtctggaaggattggttcgaggacttcaggtcttcaaagaaagacagctaagatacgtccttttgcggtagcagcagttctccgtaatataaagtttactaaagatcgatatgacagcttcattgaacttcaggagaaattacatcagaatatttgcaggaaaagagcactggttgccattggtacccatgatttggacactttgtcgggcccatttacttatactgcaaagcgtccttcagatatcaaattcaagcctctaaataagaccaaggagtatacagcctgtgaactgatgaacatatacaagactgacaatcacctgaaacattatttacatatcattgaaaacaaacccctgtatccagttatctatgatagcaatggtgtcgtcctttcaatgcctcccatcatcaatggggatcattccagaataacagtaaatactagaaatatttttattgaatgcacgggaactgactttactaaggcaaaaatagttcttgatattattgtcaccatgttcagtgaatattgtgagaatcaatttacggtcgaagctgctgaagtggtttttcctaatggaaaatcacatacctttccagaattagcttaccgaaaggagatggtgagagctgacctaattaacaaaaaagttggaatcagagaaactccagaaaatcttgccaaacttctgaccaggatgtatttaaaatcagaagtcataggtgatgggaatcagattgagattgaaatccctccaaccagagctgacattatccatgcatgtgatattgtagaagatgcagctattgcttatggatataacaacattcagatgactctcccgaaaacttacaccatagctaatcaatttcctcttaataagctcactgaacttctccgacatgacatggcagccgctggcttcactgaagcacttacctttgccctgtgctcccaagaagatattgctgataaactaggtgtggatatctctgcaacaaaggcagtccacataagtaatcctaaaacagctgaatttcaggtggcacgcactacccttcttcctggcctcctgaagaccatagcagcaaatcgtaagatgccccttccactgaaactgtttgaaatctctgacattgtaataaaagattctaatacagatgtaggtgcaaaaaactacagacatctctgtgctgtttattacaacaagaatcctgggtttgagatcattcatgggctgctggacagaattatgcagttgctcgatgtgcctcctggtgaagacaaggggggatatgtgatcaaagcatcagaagggcctgctttcttccccgggcgatgtgcagagatctttgccaggggtcaaagcgtcgggaagcttggggtccttcatcctgacgttatcaccaaatttgagctgaccatgccctgctcctccctagaaatcaatattggaccctttttgtgaagattggtctctgtggtgtgattctcttcccaggtgtccctttctcctcccctagtgtccttaagtcctcctccacagggaacatctatttgggctttgatgtttaataaagtagaaagcactgtctggctgtgtgggtagagaccatcctttccctgcatattaggccagcttgtgccatataccaatgtggtgtctgtgtgtgaagctgcattgttgggtaaaagccccgtggagtgctggagaaatgcactagcagagtgcaggatctgttctgaaaggcagacgtgctcctcagacatcagaacatcacattggaacggattactcctgcataacaagatcccatttctttccttattgataaaacaagataatcgatgagaattcatgttgcatgagttcgagataactgaggggtttagctttgattttctacatttgacatgtattcatcattgagaaacactaaaataacaatatttttagaaaacgtttaagaatcaattatggtccaacaattatagcttctgaggtcagtttaaagtgaaagaaaaatctgtaatacaaggattcaaaatatgtgagggtgcataggtattttttactctatctgtgatactctaagatagagtacatgcaacaaagatctgttctgctgtaagagttaaaatggacaagtattgatatcaatgcagtatgaacattaggaaacaatgagaagcttatttttgccataggccatacatgttactgtaatcagtcagttataaaatcatggttttaaatacttaattgagctactagtttctctattgtcccagggagatattagacctctctttttctgaagctaagcttcagccaatcctccttgttttatatcctaatttcctttcttacttcaatctagaattctccagtaggtaccatctctggaaaaaagctgggtctcatgtttgagacaagttcccaggtactattgaagtaataagaaatatgataaaatataatactttaaagtcccagtagaaatagctaacaaaggctgggtgcgctgtggctcatgcctgtaatcctagcactttgggaggctgaggtgggcagatcacttgaggccaatagttcgagatcagcctgaccaacatgntgaaatgccatctccactaaaaatataaaaattagccaggcatggtggtgtgggcctgcagtcccagctacctgggaggctgagtcaggaaaatctcttgaaccaggaggtggacgttgcagtgatcccagattgtgccactgccctccagcctgggtgacagagtgagattctgtctacaaaaa

SEQ ID NO: 388295 - DNA, 2687 bp, Homo sapiens
  misc_feature (1)..(1): n is a, c, g, or t
  misc_feature (2502)..(2502): n is a, c, g, or t
nctaagcggaatgactctataactaccacggctaccagaaaagagcactggttgccattggtacccatgatttggacactttgtcgggcccatttacttatactgcaaagcgtccttcagatatcaaattcaagcctctaaataagaccaaggagtatacagcctgtgaactgatgaacatatacaagactgacaatcacctgaaacattatttacatatcattgaaaacaaacccctgtatccagttatctatgatagcaatggtgtcgtcctttcaatgcctcccatcatcaatggggatcattccagaataacagtaaatactagaaatatttttattgaatgcacgggaactgactttactaaggcaaaaatagttcttgatattattgtcaccatgttcagtgaatattgtgagaatcaatttacggtcgaagctgctgaagtggtttttcctaatggaaaatcacatacctttccagaattagcttaccgaaaggagatggtgagagctgacctaattaacaaaaaagttggaatcagagaaactccagaaaatcttgccaaacttctgaccaggatgtatttaaaatcagaagtcataggtgatgggaatcagattgagattgaaatccctccaaccagagctgacattatccatgcatgtgatattgtagaagatgcagctattgcttatggatataacaacattcagatgactctcccgaaaacttacaccatagctaatcaatttcctcttaataagctcactgaacttctccgacatgacatggcagccgctggcttcactgaagcacttacctttgccctgtgctcccaagaagatattgctgataaactaggtgtggatatctctgcaacaaaggcagtccacataagtaatcctaaaacagctgaatttcaggtggcacgcactacccttcttcctggcctcctgaagaccatagcagcaaatcgtaagatgccccttccactgaaactgtttgaaatctctgacattgtaataaaagattctaatacagatgtaggtgcaaaaaactacagacatctctgtgctgtttattacaacaagaatcctgggtttgagatcattcatgggctgctggacagaattatgcagttgctcgatgtgcctcctggtgaagacaaggggggatatgtgatcaaagcatcagaagggcctgctttcttccccgggcgatgtgcagagatctttgccaggggtcaaagcgtcgggaagcttggggtccttcatcctgacgttatcaccaaatttgagctgaccatgccctgctcctccctagaaatcaatattggaccctttttgtgaagattggtctctgtggtgtgattctcttcccaggtgtccctttctcctcccctagtgtccttaagtcctcctccacagggaacatctatttgggctttgatgtttaataaagtagaaagcactgtctggctgtgtgggtagagaccatcctttccctgcatattaggccagcttgtgccatataccaatgtggtgtctgtgtgtgaagctgcattgttgggtaaaagccccgtggagtgctggagaaatgcactagcagagtgcaggatctgttctgaaaggcagacgtgctcctcagacatcagaacatcacattggaacggattactcctgcataacaagatcccatttctttccttattgataaaacaagataatcgatgagaattcatgttgcatgagttcgagataactgaggggtttagctttgattttctacatttgacatgtattcatcattgagaaacactaaaataacaatatttttagaaaacgtttaagaatcaattatggtccaacaattatagcttctgaggtcagtttaaagtgaaagaaaaatctgtaatacaaggattcaaaatatgtgagggtgcataggtattttttactctatctgtgatactctaagatagagtacatgcaacaaagatctgttctgctgtaagagttaaaatggacaagtattgatatcaatgcagtatgaacattaggaaacaatgagaagcttatttttgccataggccatacatgttactgtaatcagtcagttataaaatcatggttttaaatacttaattgagctactagtttctctattgtcccagggagatattagacctctctttttctgaagctaagcttcagccaatcctccttgttttatatcctaatttcctttcttacttcaatctagaattctccagtaggtaccatctctggaaaaaagctgggtctcatgtttgagacaagttcccaggtactattgaagtaataagaaatatgataaaatataatactttaaagtcccagtagaaatagctaacaaaggctgggtgcgctgtggctcatgcctgtaatcctagcactttgggaggctgaggtgggcagatcacttgaggccaatagttcgagatcagcctgaccaacatgntgaaatgccatctccactaaaaatataaaaattagccaggcatggtggtgtgggcctgcagtcccagctacctgggaggctgagtcaggaaaatctcttgaaccaggaggtggacgttgcagtgatcccagattgtgccactgccctccagcctgggtgacagagtgagattctgtctacaaaaa

SEQ ID NO: 388296 - DNA, 1971 bp, Homo sapiens
  misc_feature (3)..(3): n is a, c, g, or t
tgnacaaaaagcaggcgggacgcggtcggaattccggcatgccgactgtcagcgtgaagcgtgatctgctcttccaagccctgggccgcacctacactgacgaagaatttgatgaactatgttttgaatttggtctggagcttgatgaaattacatctgagaaggaaataataagtaaagaacaaggtaatgtaaaggcagcaggagcctctgatgttgttctttacaaaattgacgtccctgccaatagatatgatctcctgtgtctggaaggattggttcgaggacttcaggtcttcaaagaaaggataaaggctccagtgtataaacgggtaatgcctgatggaaaaatccagaaattgattatcacagaagagacagctaagatacgtccttttgcggtagcagcagttctccgtaatataaagtttactaaagatcgatatgacagcttcattgaacttcaggagaaattacatcagaatatttgcaggaaaagagcactggttgccattggtacccatgatttggacactttgtcgggcccatttacttatactgcaaagcgtccttcagatatcaaattcaagcctctaaataagaccaaggagtatacagcctgtgaactgatgaacatatacaagactgacaatcacctgaaacattatttacatatcattgaaaacaaacccctgtatccagttatctatgatagcaatggtgtcgtcctttcaatgcctcccatcatcaatggggatcattccagaataacagtaaatactagaaatatttttattgaatgcacgggaactgactttactaaggcaaaaatagttcttgatattattgtcaccatgttcagtgaatattgtgagaatcaatttacggtcgaagctgctgaagtggtttttcctaatggaaaatcacatacctttccagaattagcttaccgaaaggagatggtgagagctgacctaattaacaaaaaagttggaatcagagaaactccagaaaatcttgccaaacttctgaccaggatgtatttaaaatcagaagtcataggtgatgggaatcagattgagattgaaatccctccaaccagagctgacattatccatgcatgtgatattgtagaagatgcagctattgcttatggatataacaacattcagatgactctcccgaaaacttacaccatagctaatcaatttcctcttaataagctcactgaacttctccgacatgacatggcagccgctggcttcactgaagcacttacctttgccctgtgctcccaagaagatattgctgataaactaggtgtggatatctctgcaacaaaggcagtccacataagtaatcctaaaacagctgaatttcaggtggcacgcactacccttcttcctggcctcctgaagaccatagcagcaaatcgtaagatgccccttccactgaaactgtttgaaatctctgacattgtaataaaagattctaatacagatgtaggtgcaaaaaactacagacatctctgtgctgtttattacaacaagaatcctgggtttgagatcattcatgggctgctggacagaattatgcagttgctcgatgtgcctcctggtgaagacaaggggggatatgtgatcaaagcatcagaagggcctgctttcttccccgggcgatgtgcagagatctttgccaggggtcaaagcgtcgggaagcttggggtccttcatcctgacgttatcaccaaatttgagctgaccatgccctgctcctccctagaaatcaatattggaccctttttgtgaagattggtctctgtggtgtgattctcttcccaggtgtccctttctcctcccctagtgtccttaagtcctcctccacagggaacatctatttgggctttgatgtttaataaagtagaatgcggccactcacacatataaagaaataaagaaccagacccacacc

SEQ ID NO: 388297 - DNA, 2600 bp, Homo sapiens
  misc_feature (3)..(3): n is a, c, g, or t
tgnacaaaaagcaggcgggacgcggtcggaattccggcatgccgactgtcagcgtgaagcgtgatctgctcttccaagccctgggccgcacctacactgacgaagaatttgatgaactatgttttgaatttggtctggagcttgatgaaattacatctgagaaggaaataataagtaaagaacaaggtaatgtaaaggcagcaggagcctctgatgttgttctttacaaaattgacgtccctgccaatagatatgatctcctgtgtctggaaggattggttcgaggacttcaggtcttcaaagaaaggataaaggctccagtgtataaacgggtaatgcctgatggaaaaatccagaaattgattatcacagaagagacagctaagatacgtccttttgcggtagcagcagttctccgtaatataaagtttactaaagatcgatatgacagcttcattgaacttcaggagaaattacatcagaatatttgcaggaaaagagcactggttgccattggtacccatgatttggacactttgtcgggcccatttacttatactgcaaagcgtccttcagatatcaaattcaagcctctaaataagaccaaggagtatacagcctgtgaactgatgaacatatacaagactgacaatcacctgaaacattatttacatatcattgaaaacaaacccctgtatccagttatctatgatagcaatggtgtcgtcctttcaatgcctcccatcatcaatggggatcattccagaataacagtaaatactagaaatatttttattgaatgcacgggaactgactttactaaggcaaaaatagttcttgatattattgtcaccatgttcagtgaatattgtgagaatcaatttacggtcgaagctgctgaagtggtttttcctaatggaaaatcacatacctttccagaattagcttaccgaaaggagatggtgagagctgacctaattaacaaaaaagttggaatcagagaaactccagaaaatcttgccaaacttctgaccaggatgtatttaaaatcagaagtcataggtgatgggaatcagattgagattgaaatccctccaaccagagctgacattatccatgcatgtgatattgtagaagatgcagctattgcttatggatataacaacattcagatgactctcccgaaaacttacaccatagctaatcaatttcctcttaataagctcactgaacttctccgacatgacatggcagccgctggcttcactgaagcacttacctttgccctgtgctcccaagaagatattgctgataaactaggtgtggatatctctgcaacaaaggcagtccacataagtaatcctaaaacagctgaatttcaggtggcacgcactacccttcttcctggcctcctgaagaccatagcagcaaatcgtaagatgccccttccactgaaactgtttgaaatctctgacattgtaataaaagattctaatacagatgtaggtgcaaaaaactacagacatctctgtgctgtttattacaacaagaatcctgggtttgagatcattcatgggctgctggacagaattatgcagttgctcgatgtgcctcctggtgaagacaaggggggatatgtgatcaaagcatcagaagggcctgctttcttccccgggcgatgtgcagagatctttgccaggggtcaaagcgtcgggaagcttggggtccttcatcctgacgttatcaccaaatttgagctgaccatgccctgctcctccctagaaatcaatattggaccctttttgtgaagattggtctctgtggtgtgattctcttcccaggtgtccctttctcctcccctagtgtccttaagtcctcctccacagggaacatctatttgggctttgatgtttaataaagtagaaaaaaaaaaaaaaaaaaaaaaaaaaaaaaaaaaaaaaaaaaaaaaaggggggggcccccaaaaattccccccgagagggggccccaaagttgtaaccgcgcgtgatcccacgaggtttttgtgtggagaacaaggggggcgcccaaaagaggaggaggcggcgtatttaaaagcacgaaggacgcaagggggccgggggtaaaacaacaccgggaggagacgggagagaaacacggcgaagcgggggagaacctgggaggaagagagaacccataagcacggggggcggggagacaccaaaggggcgccaccaatcccccaacagagaaatttaagagccccagaggggcacattataacaccttaaagggggacaaccggtggctaacacaatggggggaaatattgtgggaggcgatggtaaaaaaattgtggctaaacagagagggattatcttttgggagaaaaattttttgccggggagctgtgtttataaatatgaagaaagtacaaaacaaaaaaaaaaaaagacaaaaaagagaaaaaaaagaaagagaaaacatggggacaaaagacgtaaccgaaaaaaggcaaaaaaacgactggtagagaggaaaaggaggacacagaagaagaaaccaaaaaaaaaacacaacaaccaacacgagacaaccac

SEQ ID NO: 388298 - DNA, 3366 bp, Homo sapiens
  misc_feature (3181)..(3181): n is a, c, g, or t
agcaggctggtacgccccggcgtttggcatgccgactgtcagcgtgaagcgtgatctgctcttccaagccctgggccgcacctacactgacgaagaatttgatgaactatgttttgaatttggtctggagcttgatgaaattacatctgagaaggaaataataagtaaagaacaaggtaatgtaaaggcagcaggagcctctgatgttgttctttacaaaattgacgtccctgccaatagatatgatctcctgtgtctggaaggattggttcgaggacttcaggtcttcaaagaaaggataaaggctccagtgtataaacgggtaatgcctgatggaaaaatccagaaattgattatcacagaagagacagctaagatacgtccttttgcggtagcagcagttctccgtaatataaagtttactaaagatcgatatgacagcttcattgaacttcaggagaaattacatcagaatatttgcaggaaaagagcactggttgccattggtacccatgatttggacactttgtcgggcccatttacttatactgcaaagcgtccttcagatatcaaattcaagcctctaaataagaccaaggagtatacagcctgtgaactgatgaacatatacaagactgacaatcacctgaaacattatttacatatcattgaaaacaaacccctgtatccagttatctatgatagcaatggtgtcgtcctttcaatgcctcccatcatcaatggggatcattccagaataacagtaaatactagaaatatttttattgaatgcacgggaactgactttactaaggcaaaaatagttcttgatattattgtcaccatgttcagtgaatattgtgagaatcaatttacggtcgaagctgctgaagtggtttttcctaatggaaaatcacatacctttccagaattagcttaccgaaaggagatggtgagagctgacctaattaacaaaaaagttggaatcaggtatgctctgaaaacttcacttaattcaagaacaaagtacacgtatgactaattttttttttgcgatccttcagagtctgttaaggaatgataaaacatcagttaagatatctggtttctgatagaactcaaaaagaaaagttactgtttcagctagtagcatatgttgaaacacaatgtaacattaaaaaaataatccaatgaagtttatggtttgttcattcctttttcagagaaactccagaaaatcttgccaaacttctgaccaggatgtatttaaaatcagaagtcataggtgatgggaatcagattgagattgaaatccctccaaccagagctgacattatccatgcatgtgatattgtagaagatgcagctattgcttatggatataacaacattcagatgactctcccgaaaacttacaccatagctaatcaatttcctcttaataagctcactgaacttctccgacatgacatggcagccgctggcttcactgaagcacttacctttgccctgtgctcccaagaagatattgctgataaactaggtgtggatatctctgcaacaaaggcagtccacataagtaatcctaaaacagctgaatttcaggtggcacgcactacccttcttcctggcctcctgaagaccatagcagcaaatcgtaagatgccccttccactgaaactgtttgaaatctctgacattgtaataaaagattctaatacagatgtaggtgcaaaaaactacagacatctctgtgctgtttattacaacaagaatcctgggtttgagatcattcatgggctgctggacagaattatgcagttgctcgatgtgcctcctggtgaagacaaggggggatatgtgatcaaagcatcagaagggcctgctttcttccccgggcgatgtgcagagatctttgccaggggtcaaagcgtcgggaagcttggggtccttcatcctgacgttatcaccaaatttgagctgaccatgccctgctcctccctagaaatcaatattggaccctttttgtgaagattggtctctgtggtgtgattctcttcccaggtgtccctttctcctcccctagtgtccttaagtcctcctccacagggaacatctatttgggctttgatgtttaataaagtagaaagcactgtctggctgtgtgggtagagaccatcctttccctgcatattaggccagcttgtgccatataccaatgtggtgtctgtgtgtgaagctgcattgttgggtaaaagccccgtggagtgctggagaaatgcactagcagagtgcaggatctgttctgaaaggcagacgtgctcctcagacatcagaacatcacattggaacggattactcctgcataacaagatcccatttctttccttattgataaaacaagataatcgatgagaattcatgttgcatgagttcgagataactgaggggtttagctttgattttctacatttgacatgtattcatcattgagaaacactaaaataacaatatttttagaaaacgtttaagaatcaattatggtccaacaattatagcttctgaggtcagtttaaagtgaaagaaaaatctgtaatacaaggattcaaaatatgtgagggtgcataggtattttttactctatctgtgatactctaagatagagtacatgcaacaaagatctgttctgctgtaagagttaaaatggacaagtattgatatcaatgcagtatgaacattaggaaacaatgagaagcttatttttgccataggccatacatgttactgtaatcagtcagttataaaatcatggttttaaatacttaattgagctactagtttctctattgtcccagggagatattagacctctctttttctgaagctaagcttcagccaatcctccttgttttatatcctaatttcctttcttacttcaatctagaattctccagtaggtaccatctctggaaaaaagctgggtctcatgtttgagacaagttcccaggtactattgaagtaataagaaatatgataaaatataatactttaaagtcccagtagaaatagctaacaaaggctgggtgcgctgtggctcatgcctgtaatcctagcactttgggaggctgaggtgggcagatcacttgaggccaatagttcgagatcagcctgaccaacatgntgaaatgccatctccactaaaaatataaaaattagccaggcatggtggtgtgggcctgcagtcccagctacctgggaggctgagtcaggaaaatctcttgaaccaggaggtggacgttgcagtgatcccagattgtgccactgccctccagcctgggtgacagagtgagattctgtctacaaaaa

SEQ ID NO: 388299 - DNA, 1930 bp, Homo sapiens
  misc_feature (3)..(3): n is a, c, g, or t
tgnacaaaaagcaggcgggacgcggtcggaattccggcatgccgactgtcagcgtgaagcgtgatctgctcttccaagccctgggccgcacctacactgacgaagaatttgatgaactatgttttgaatttggtctggagcttgatgaaattacatctgagaaggaaataataagtaaagaacaaggtaatgtaaaggcagcaggagcctctgatgttgttctttacaaaattgacgtccctgccaatagatatgatctcctgtgtctggaaggattggttcgaggacttcaggtcttcaaagaaaggataaaggctccagtgtataaacgggtaatgcctgatggaaaaatccagaaattgattatcacagaagagacagctaagatacgtccttttgcggtagcagcagttctccgtaatataaagtttactaaagatcgatatgacagcttcattgaacttcaggagaaattacatcagaatatttgcaggaaaagagcactggttgccattggtacccatgatttggacactttgtcgggcccatttacttatactgcaaagcgtccttcagatatcaaattcaagcctctaaataagaccaaggagtatacagcctgtgaactgatgaacatatacaagactgacaatcacctgaaacattatttacatatcattgaaaacaaacccctgtatccagttatctatgatagcaatggtgtcgtcctttcaatgcctcccatcatcaatggggatcattccagaataacagtaaatactagaaatatttttattgaatgcacgggaactgactttactaaggcaaaaatagttcttgatattattgtcaccatgttcagtgaatattgtgagaatcaatttacggtcgaagctgctgaagtggtttttcctaatggaaaatcacatacctttccagaattagcttaccgaaaggagatggtgagagctgacctaattaacaaaaaagttggaatcagagaaactccagaaaatcttgccaaacttctgaccaggatgtatttaaaatcagaagtcataggtgatgggaatcagattgagattgaaatccctccaaccagagctgacattatccatgcatgtgatattgtagaagatgcagctattgcttatggatataacaacattcagatgactctcccgaaaacttacaccatagctaatcaatttcctcttaataagctcactgaacttctccgacatgacatggcagccgctggcttcactgaagcacttacctttgccctgtgctcccaagaagatattgctgataaactaggtgtggatatctctgcaacaaaggcagtccacataagtaatcctaaaacagctgaatttcaggtggcacgcactacccttcttcctggcctcctgaagaccatagcagcaaatcgtaagatgccccttccactgaaactgtttgaaatctctgacattgtaataaaagattctaatacagatgtaggtgcaaaaaactacagacatctctgtgctgtttattacaacaagaatcctgggtttgagatcattcatgggctgctggacagaattatgcagttgctcgatgtgcctcctggtgaagacaaggggggatatgtgatcaaagcatcagaagggcctgctttcttccccgggcgatgtgcagagatctttgccaggggtcaaagcgtcgggaagcttggggtccttcatcctgacgttatcaccaaatttgagctgaccatgccctgctcctccctagaaatcaatattggaccctttttgtgaagattggtctctgtggtgtgattctcttcccagcacaccctatagtgtcatttttttatcgtaacccaattgtctgaaatgctttgaaaatggtttcttaatattaaaaggcatatgcatgt

SEQ ID NO: 388300 - DNA, 3091 bp, Homo sapiens
  misc_feature (3)..(3): n is a, c, g, or t
  misc_feature (2906)..(2906): n is a, c, g, or t
tgnacaaaaagcaggcgggacgcggtcggaattccggcatgccgactgtcagcgtgaagcgtgatctgctcttccaagccctgggccgcacctacactgacgaagaatttgatgaactatgttttgaatttggtctggagcttgatgaaattacatctgagaaggaaataataagtaaagaacaaggtaatgtaaaggcagcaggagcctctgatgttgttctttacaaaattgacgtccctgccaatagatatgatctcctgtgtctggaaggattggttcgaggacttcaggtcttcaaagaaaggataaaggctccagtgtataaacgggtaatgcctgatggaaaaatccagaaattgattatcacagaagagacagctaagatacgtccttttgcggtagcagcagttctccgtaatataaagtttactaaagatcgatatgacagcttcattgaacttcaggagaaattacatcagaatatttgcaggaaaagagcactggttgccattggtacccatgatttggacactttgtcgggcccatttacttatactgcaaagcgtccttcagatatcaaattcaagcctctaaataagaccaaggagtatacagcctgtgaactgatgaacatatacaagactgacaatcacctgaaacattatttacatatcattgaaaacaaacccctgtatccagttatctatgatagcaatggtgtcgtcctttcaatgcctcccatcatcaatggggatcattccagaataacagtaaatactagaaatatttttattgaatgcacgggaactgactttactaaggcaaaaatagttcttgatattattgtcaccatgttcagtgaatattgtgagaatcaatttacggtcgaagctgctgaagtggtttttcctaatggaaaatcacatacctttccagaattagcttaccgaaaggagatggtgagagctgacctaattaacaaaaaagttggaatcagagaaactccagaaaatcttgccaaacttctgaccaggatgtatttaaaatcagaagtcataggtgatgggaatcagattgagattgaaatccctccaaccagagctgacattatccatgcatgtgatattgtagaagatgcagctattgcttatggatataacaacattcagatgactctcccgaaaacttacaccatagctaatcaatttcctcttaataagctcactgaacttctccgacatgacatggcagccgctggcttcactgaagcacttacctttgccctgtgctcccaagaagatattgctgataaactaggtgtggatatctctgcaacaaaggcagtccacataagtaatcctaaaacagctgaatttcaggtggcacgcactacccttcttcctggcctcctgaagaccatagcagcaaatcgtaagatgccccttccactgaaactgtttgaaatctctgacattgtaataaaagattctaatacagatgtaggtgcaaaaaactacagacatctctgtgctgtttattacaacaagaatcctgggtttgagatcattcatgggctgctggacagaattatgcagttgctcgatgtgcctcctggtgaagacaaggggggatatgtgatcaaagcatcagaagcgtcgggaagcttggggtccttcatcctgacgttatcaccaaatttgagctgaccatgccctgctcctccctagaaatcaatattggaccctttttgtgaagattggtctctgtggtgtgattctcttcccaggtgtccctttctcctcccctagtgtccttaagtcctcctccacagggaacatctatttgggctttgatgtttaataaagtagaaagcactgtctggctgtgtgggtagagaccatcctttccctgcatattaggccagcttgtgccatataccaatgtggtgtctgtgtgtgaagctgcattgttgggtaaaagccccgtggagtgctggagaaatgcactagcagagtgcaggatctgttctgaaaggcagacgtgctcctcagacatcagaacatcacattggaacggattactcctgcataacaagatcccatttctttccttattgataaaacaagataatcgatgagaattcatgttgcatgagttcgagataactgaggggtttagctttgattttctacatttgacatgtattcatcattgagaaacactaaaataacaatatttttagaaaacgtttaagaatcaattatggtccaacaattatagcttctgaggtcagtttaaagtgaaagaaaaatctgtaatacaaggattcaaaatatgtgagggtgcataggtattttttactctatctgtgatactctaagatagagtacatgcaacaaagatctgttctgctgtaagagttaaaatggacaagtattgatatcaatgcagtatgaacattaggaaacaatgagaagcttatttttgccataggccatacatgttactgtaatcagtcagttataaaatcatggttttaaatacttaattgagctactagtttctctattgtcccagggagatattagacctctctttttctgaagctaagcttcagccaatcctccttgttttatatcctaatttcctttcttacttcaatctagaattctccagtaggtaccatctctggaaaaaagctgggtctcatgtttgagacaagttcccaggtactattgaagtaataagaaatatgataaaatataatactttaaagtcccagtagaaatagctaacaaaggctgggtgcgctgtggctcatgcctgtaatcctagcactttgggaggctgaggtgggcagatcacttgaggccaatagttcgagatcagcctgaccaacatgntgaaatgccatctccactaaaaatataaaaattagccaggcatggtggtgtgggcctgcagtcccagctacctgggaggctgagtcaggaaaatctcttgaaccaggaggtggacgttgcagtgatcccagattgtgccactgccctccagcctgggtgacagagtgagattctgtctacaaaaa

SEQ ID NO: 388301 - DNA, 2589 bp, Homo sapiens
  misc_feature (33)..(33): n is a, c, g, or t
  misc_feature (2404)..(2404): n is a, c, g, or t
tggaaggggaagaggaagaagggaaggaggtanctgcaaagactctcttaagaaaagagcactggttgccattggtacccatgatttggacactttgtcgggcccatttacttatactgcaaagcgtccttcagatatcaaataccaaggagtatacagcctgtgaactgatgaacatatacaagactgacaatcacctgaaacattatttacatatcattgacagttatctatgatagcaatggtgtcgtcctttcaatgcctcccatcatcaatgggatcattccagaataacagtaaatactaagcacggaaactgactttactaaggcaaaaatagttcttgatattattgtcaccatgttcagtgaatattgtgagaatcaatttacgtcgacctaatgaaaatcacatacctttccagaattagcttaccgaaaggagatggtgacagctgacctaattaacaaaaaaagtggaatgagagaaacttctgaccgaggatgttttaaaatcaaaagtcttaggggatgggaaataaattgagattaaatccctccccccgggtaccttaccacgcatgtcattgtagaaacgcaggtattggtctggatatacccaattagagggatttcccgaaaccttcccccaaggtaacaatttccttttaatagcccatgtaattttctgacatacaaggcaccgccgggttcacttaagcacttccctttgccttgctcccaagaagatattgctgataaactaggtgtggatatctctgcaacaaaggcagtccacataagtaatcctaaaacagctgaatttcaggtggcacgcactacccttcttcctggcctcctgaagaccatagcagcaaatcgtaagatgccccttccactgaaactgtttgaaatctctgacattgtaataaaagattctaatacagatgtaggtgcaaaaaactacagacatctctgtgctgtttattacaacaagaatcctgggtttgagatcattcatgggctgctggacagaattatgcagttgctcgatgtgcctcctggtgaagacaaggggggatatgtgatcaaagcatcagaagggcctgctttcttccccgggcgatgtgcagagatctttgccaggggtcaaagcgtcgggaagcttggggtccttcatcctgacgttatcaccaaatttgagctgaccatgccctgctcctccctagaaatcaatattggaccctttttgtgaagattggtctctgtggtgtgattctcttcccaggtgtccctttctcctcccctagtgtccttaagtcctcctccacagggaacatctatttgggctttgatgtttaataaagtagaaagcactgtctggctgtgtgggtagagaccatcctttccctgcatattaggccagcttgtgccatataccaatgtggtgtctgtgtgtgaagctgcattgttgggtaaaagccccgtggagtgctggagaaatgcactagcagagtgcaggatctgttctgaaaggcagacgtgctcctcagacatcagaacatcacattggaacggattactcctgcataacaagatcccatttctttccttattgataaaacaagataatcgatgagaattcatgttgcatgagttcgagataactgaggggtttagctttgattttctacatttgacatgtattcatcattgagaaacactaaaataacaatatttttagaaaacgtttaagaatcaattatggtccaacaattatagcttctgaggtcagtttaaagtgaaagaaaaatctgtaatacaaggattcaaaatatgtgagggtgcataggtattttttactctatctgtgatactctaagatagagtacatgcaacaaagatctgttctgctgtaagagttaaaatggacaagtattgatatcaatgcagtatgaacattaggaaacaatgagaagcttatttttgccataggccatacatgttactgtaatcagtcagttataaaatcatggttttaaatacttaattgagctactagtttctctattgtcccagggagatattagacctctctttttctgaagctaagcttcagccaatcctccttgttttatatcctaatttcctttcttacttcaatctagaattctccagtaggtaccatctctggaaaaaagctgggtctcatgtttgagacaagttcccaggtactattgaagtaataagaaatatgataaaatataatactttaaagtcccagtagaaatagctaacaaaggctgggtgcgctgtggctcatgcctgtaatcctagcactttgggaggctgaggtgggcagatcacttgaggccaatagttcgagatcagcctgaccaacatgntgaaatgccatctccactaaaaatataaaaattagccaggcatggtggtgtgggcctgcagtcccagctacctgggaggctgagtcaggaaaatctcttgaaccaggaggtggacgttgcagtgatcccagattgtgccactgccctccagcctgggtgacagagtgagattctgtctacaaaaa

SEQ ID NO: 388302 - DNA, 1438 bp, Homo sapiens
  misc_feature (3)..(3): n is a, c, g, or t
tgnacaaaaagcaggcgggacgcggtcggaattccggcatgccgactgtcagcgtgaagcgtgatctgctcttccaagccctgggccgcacctacactgacgaagaatttgatgaactatgttttgaatttggtctggagcttgatgaaattacatctgagaaggaaataataagtaaagaacaaggtaatgtaaaggcagcaggagcctctgatgttgttctttacaaaattgacgtccctgccaatagatatgatctcctgtgtctggaaggattggttcgaggacttcaggtcttcaaagaaaggataaaggctccagtgtataaacgggtaatgcctgatggaaaaatccagaaattgattatcacagaagagacagctaagatacgtccttttgcggtagcagcagttctccgtaatataaagtttactaaagatcgatatgacagcttcattgaacttcaggagaaattacatcagaatatttgcaggaaaagagcactggttgccattggtacccatgatttggacactttgtcgggcccatttacttatactgcaaagcgtccttcagatatcaaattcaagcctctaaataagaccaaggagtatacagcctgtgaactgatgaacatatacaagactgacaatcacctgaaacattatttacatatcattgaaaacaaacccctgtatccagttatctatgatagcaatggtgtcgtcctttcaatgcctcccatcatcaatggggatcattccagaataacagtaaatactagaaatatttttattgaatgcacgggaactgactttactaaggcaaaaatagttcttgatattattgtcaccatgttcagtgaatattgtgagaatcaatttacggtcgaagctgctgaagtggtttttcctaatggaaaatcacatacctttccagaattagcttaccgaaaggagatggtgagagctgacctaattaacaaaaaagttggaatcagagaaactccagaaaatcttgccaaacttctgaccaggatgtatttaaaatcagaagtcataggtgatgggaatcagattgagattgaaatccctccaaccagagctgacattatccatgcatgtgatattgtagaagatgcagctattgcttatggatataacaacattcagatgactctcccgaaaacttacaccatagctaatcaatttcctcttaataagctcactgaacttctccgacatgacatggcagctcgcccctgagttagcagctcgttcctgagttagcagctcgcccctgagttagcagcgcgcccctgagtttcagctcgcccctcagttacagctcgcccctgagttgcaggctcgcccctgagttcctgctcgcccctgagatcacgctcgcccctgagttcgagctcgctggtcagttgttg

SEQ ID NO: 388303 - DNA, 784 bp, Homo sapiens
agcaggctggtacgccccggcgtttggcatgccgactgtcagcgtgaagcgtgatctgctcttccaagccctgggccgcacctacactgacgaagaatttgatgaactatgttttgaatttggtctggagcttgatgaaattacatctgagaaggaaataataagtaaagaacaaggtaatgtaaaggcagcaggagcctctgatgttgttctttacaaaattgacgtccctgccaatagatatgatctcctgtgtctggaaggattggttcgaggacttcaggtcttcaaagaaaggataaaggctccagtgtataaacgggtaatgcctgatggaaaaatccagaaattgattatcacagaagagacagctaagatacgtccttttgcggtagcagcagttctccgtaatataaagtttactaaagatcgatatgacagcttcattgaacttcaggagaaattacatcagaatatttgcaggaaaagagcactggttgccattggtacccatgatttggacactttgtcgggcccatttacttatactgcaaagcgtccttcagatatcaaattcaagcctctaaataagaccaaggagtatacagcctgtgaactgatgaacatatacaagactgacaatcacctgaaacattatttacatatcattgaaaacaaacccctgtatccagttatctatgatagcaatggtgtcgtcctttcaatgcctcccatcatcaatgggggtcatcccaataaaggataccgaacatttttgatgcgg

SEQ ID NO: 388304 - DNA, 1600 bp, Homo sapiens
  misc_feature (17)..(17): n is a, c, g, or t
  misc_feature (65)..(65): n is a, c, g, or t
  misc_feature (1415)..(1415): n is a, c, g, or t
gagggagaaggcaaaanagcagactttgtaaacttatgacatcacatttgtcttgaattactganatatgtgttcttcattgcaccttgcacataccaccatttatatatgacggcctgctttcttccccgggcgatgtgcagagatctttgccaggggtcaaagcgtcgggaagcttggggtccttcatcctgacgttatcaccaaatttgagctgaccatgccctgctcctccctagaaatcaatattggaccctttttgtgaagattggtctctgtggtgtgattctcttcccaggtgtccctttctcctcccctagtgtccttaagtcctcctccacagggaacatctatttgggctttgatgtttaataaagtagaaagcactgtctggctgtgtgggtagagaccatcctttccctgcatattaggccagcttgtgccatataccaatgtggtgtctgtgtgtgaagctgcattgttgggtaaaagccccgtggagtgctggagaaatgcactagcagagtgcaggatctgttctgaaaggcagacgtgctcctcagacatcagaacatcacattggaacggattactcctgcataacaagatcccatttctttccttattgataaaacaagataatcgatgagaattcatgttgcatgagttcgagataactgaggggtttagctttgattttctacatttgacatgtattcatcattgagaaacactaaaataacaatatttttagaaaacgtttaagaatcaattatggtccaacaattatagcttctgaggtcagtttaaagtgaaagaaaaatctgtaatacaaggattcaaaatatgtgagggtgcataggtattttttactctatctgtgatactctaagatagagtacatgcaacaaagatctgttctgctgtaagagttaaaatggacaagtattgatatcaatgcagtatgaacattaggaaacaatgagaagcttatttttgccataggccatacatgttactgtaatcagtcagttataaaatcatggttttaaatacttaattgagctactagtttctctattgtcccagggagatattagacctctctttttctgaagctaagcttcagccaatcctccttgttttatatcctaatttcctttcttacttcaatctagaattctccagtaggtaccatctctggaaaaaagctgggtctcatgtttgagacaagttcccaggtactattgaagtaataagaaatatgataaaatataatactttaaagtcccagtagaaatagctaacaaaggctgggtgcgctgtggctcatgcctgtaatcctagcactttgggaggctgaggtgggcagatcacttgaggccaatagttcgagatcagcctgaccaacatgntgaaatgccatctccactaaaaatataaaaattagccaggcatggtggtgtgggcctgcagtcccagctacctgggaggctgagtcaggaaaatctcttgaaccaggaggtggacgttgcagtgatcccagattgtgccactgccctccagcctgggtgacagagtgagattctgtctacaaaaa

SEQ ID NO: 388305 - DNA, 1417 bp, Homo sapiens
  misc_feature (54)..(54): n is a, c, g, or t
  misc_feature (1232)..(1232): n is a, c, g, or t
atggacaatggattaccgaatttcgagctttcggtacccacgctccacctcggncaaaatcaatattggaccctttttgtgaagattggtctctgtggtgtgattctcttcccaggtgtccctttctcctcccctagtgtccttaagtcctcctccacagggaacatctatttgggctttgatgtttaataaagtagaaagcactgtctggctgtgtgggtagagaccatcctttccctgcatattaggccagcttgtgccatataccaatgtggtgtctgtgtgtgaagctgcattgttgggtaaaagccccgtggagtgctggagaaatgcactagcagagtgcaggatctgttctgaaaggcagacgtgctcctcagacatcagaacatcacattggaacggattactcctgcataacaagatcccatttctttccttattgataaaacaagataatcgatgagaattcatgttgcatgagttcgagataactgaggggtttagctttgattttctacatttgacatgtattcatcattgagaaacactaaaataacaatatttttagaaaacgtttaagaatcaattatggtccaacaattatagcttctgaggtcagtttaaagtgaaagaaaaatctgtaatacaaggattcaaaatatgtgagggtgcataggtattttttactctatctgtgatactctaagatagagtacatgcaacaaagatctgttctgctgtaagagttaaaatggacaagtattgatatcaatgcagtatgaacattaggaaacaatgagaagcttatttttgccataggccatacatgttactgtaatcagtcagttataaaatcatggttttaaatacttaattgagctactagtttctctattgtcccagggagatattagacctctctttttctgaagctaagcttcagccaatcctccttgttttatatcctaatttcctttcttacttcaatctagaattctccagtaggtaccatctctggaaaaaagctgggtctcatgtttgagacaagttcccaggtactattgaagtaataagaaatatgataaaatataatactttaaagtcccagtagaaatagctaacaaaggctgggtgcgctgtggctcatgcctgtaatcctagcactttgggaggctgaggtgggcagatcacttgaggccaatagttcgagatcagcctgaccaacatgntgaaatgccatctccactaaaaatataaaaattagccaggcatggtggtgtgggcctgcagtcccagctacctgggaggctgagtcaggaaaatctcttgaaccaggaggtggacgttgcagtgatcccagattgtgccactgccctccagcctgggtgacagagtgagattctgtctacaaaaa

SEQ ID NO: 388306 - DNA, 1535 bp, Homo sapiens
  misc_feature (1350)..(1350): n is a, c, g, or t
agcaggctggtacgccccggcgtttggcatgccgactgtcagcgtgaagcgtgatctgctcttccaagccctgggccgcacctacactgacgaagaatttgatgaactatgttttgaatttggtctggagcttgatgaaattacatctgagaaggaaataataagtaaagaacaaggtaatgtaaaggcagcaggagcctctgatgttgttctttacaaaattgacgtccctggtgtccctttctcctcccctagtgtccttaagtcctcctccacagggaacatctatttgggctttgatgtttaataaagtagaaagcactgtctggctgtgtgggtagagaccatcctttccctgcatattaggccagcttgtgccatataccaatgtggtgtctgtgtgtgaagctgcattgttgggtaaaagccccgtggagtgctggagaaatgcactagcagagtgcaggatctgttctgaaaggcagacgtgctcctcagacatcagaacatcacattggaacggattactcctgcataacaagatcccatttctttccttattgataaaacaagataatcgatgagaattcatgttgcatgagttcgagataactgaggggtttagctttgattttctacatttgacatgtattcatcattgagaaacactaaaataacaatatttttagaaaacgtttaagaatcaattatggtccaacaattatagcttctgaggtcagtttaaagtgaaagaaaaatctgtaatacaaggattcaaaatatgtgagggtgcataggtattttttactctatctgtgatactctaagatagagtacatgcaacaaagatctgttctgctgtaagagttaaaatggacaagtattgatatcaatgcagtatgaacattaggaaacaatgagaagcttatttttgccataggccatacatgttactgtaatcagtcagttataaaatcatggttttaaatacttaattgagctactagtttctctattgtcccagggagatattagacctctctttttctgaagctaagcttcagccaatcctccttgttttatatcctaatttcctttcttacttcaatctagaattctccagtaggtaccatctctggaaaaaagctgggtctcatgtttgagacaagttcccaggtactattgaagtaataagaaatatgataaaatataatactttaaagtcccagtagaaatagctaacaaaggctgggtgcgctgtggctcatgcctgtaatcctagcactttgggaggctgaggtgggcagatcacttgaggccaatagttcgagatcagcctgaccaacatgntgaaatgccatctccactaaaaatataaaaattagccaggcatggtggtgtgggcctgcagtcccagctacctgggaggctgagtcaggaaaatctcttgaaccaggaggtggacgttgcagtgatcccagattgtgccactgccctccagcctgggtgacagagtgagattctgtctacaaaaa

SEQ ID NO: 388307 - DNA, 638 bp, Homo sapiens
tgatgttgttctttacaaaattgacgtccctgccaatagatatgatctcctgtgtctggaaggattggttcgaggacttcaggtcttcaaagaaaggtaaggaaatatgttccttaaagactttgctaagttgggttttcttttctttccttgtcattatcagcagccatgtttaaatttctaggaaaaagcttgtagaggaacgtagctttagctctcaatagagggttgatttgaggaattagattcatgcagattgtagccatttgaaaatttccatgaaaattttagtcatagccattcatctttgagaacatattttaaaactggtgtttaatgcttttatggcgtcttaaaaaattatttagcaggtgtgtgtgattcccctccgtgatctaattggaatgagtagttcactggatgtgttaaaagttgagaggaaatggagagctagcaataaatacccttacattatgagttctaaggaagctcaggagtgaagcctcctaactggaaaaaccaaagatcttatgacggctctgtgatcttgagcaagttagttggcctctctagtttcaatttcctaatctataatgaagaagatttataaggccccttccagcttttcatttaatgaa

SEQ ID NO: 388308 - DNA, 652 bp, Homo sapiens
ttttaacctaggaatgaaaaagaacaaagcctttgctttccataaataattttggataataatatccaatgcatgtttaaaacacatttgagatataattgtttaaattgtggaacattaatgaaattttaaaagattttaaacttttcagaggggttgtttggtaaatatatgaattatgagcaaactttttctcaattatttaatacattttcagaaatcttactgaaatataaattctgtgaaggtagtgactttttctcttgtttaccactttattacttgttgactgaataaattaatatatacttgtttgaatgaaaatgtatgccagtggcaagaatgcagctaccttcctattacaagatattacaaagaaaagccttactgtttgctatctctaatgatattatgaatttcagacagctaagatacgtccttttgcggtagcagcagttctccgtaatataaagtttactaaagatcgatatgacagcttcattgaacttcaggagaaattacatcagaatatttgcaggtttgtggttgcattttctttcttccttgccttcccctttccctttgtctccctatctcctttccatcctgatccctctccctcttctctcttgccacttctgccttctttctc

SEQ ID NO: 388309 - DNA, 3133 bp, Homo sapiens
  misc_feature (2948)..(2948): n is a, c, g, or t
agcaggctggtacgccccggcgtttggcatgccgactgtcagcgtgaagcgtgatctgctcttccaagccctgggccgcacctacactgacgaagaatttgatgaactatgttttgaatttggtctggagcttgatgaaattacatctgagaaggaaataataagtaaagaacaaggtaatgtaaaggcagcaggagcctctgatgttgttctttacaaaattgacgtccctgccaatagatatgatctcctgtgtctggaaggattggttcgaggacttcaggtcttcaaagaaaggataaaggctccagtgtataaacgggtaatgcctgatggaaaaatccagaaattgattatcacagaagagacagctaagatacgtccttttgcggtagcagcagttctccgtaatataaagtttactaaagatcgatatgacagcttcattgaacttcaggagaaattacatcagaatatttgcaggaaaagagcactggttgccattggtacccatgatttggacactttgtcgggcccatttacttatactgcaaagcgtccttcagatatcaaattcaagcctctaaataagaccaaggagtatacagcctgtgaactgatgaacatatacaagactgacaatcacctgaaacattatttacatatcattgaaaacaaacccctgtatccagttatctatgatagcaatggtgtcgtcctttcaatgcctcccatcatcaatggggatcattccagaataacagtaaatactagaaatatttttattgaatgcacgggaactgactttactaaggcaaaaatagttcttgatattattgtcaccatgttcagtgaatattgtgagaatcaatttacggtcgaagctgctgaagtggtttttcctaatggaaaatcacatacctttccagaattagcttaccgaaaggagatggtgagagctgacctaattaacaaaaaagttggaatcagagaaactccagaaaatcttgccaaacttctgaccaggatgtatttaaaatcagaagtcataggtgatgggaatcagattgagattgaaatccctccaaccagagctgacattatccatgcatgtgatattgtagaagatgcagctattgcttatggatataacaacattcagatgactctcccgaaaacttacaccatagctaatcaatttcctcttaataagctcactgaacttctccgacatgacatggcagccgctggcttcactgaagcacttacctttgccctgtgctcccaagaagatattgctgataaactaggtgtggatatctctgcaacaaaggcagtccacataagtaatcctaaaacagctgaatttcaggtggcacgcactacccttcttcctggcctcctgaagaccatagcagcaaatcgtaagatgccccttccactgaaactgtttgaaatctctgacattgtaataaaagattctaatacagatgtaggtgcaaaaaactacagacatctctgtgctgtttattacaacaagaatcctgggtttgagatcattcatgggctgctggacagaattatgcagttgctcgatgtgcctcctggtgaagacaaggggggatatgtgatcaaagcatcagaagggcctgctttcttccccgggcgatgtgcagagatctttgccaggggtcaaagcgtcgggaagcttggggtccttcatcctgacgttatcaccaaatttgagctgaccatgccctgctcctccctagaaatcaatattggaccctttttgtgaagattggtctctgtggtgtgattctcttcccaggtgtccctttctcctcccctagtgtccttaagtcctcctccacagggaacatctatttgggctttgatgtttaataaagtagaaagcactgtctggctgtgtgggtagagaccatcctttccctgcatattaggccagcttgtgccatataccaatgtggtgtctgtgtgtgaagctgcattgttgggtaaaagccccgtggagtgctggagaaatgcactagcagagtgcaggatctgttctgaaaggcagacgtgctcctcagacatcagaacatcacattggaacggattactcctgcataacaagatcccatttctttccttattgataaaacaagataatcgatgagaattcatgttgcatgagttcgagataactgaggggtttagctttgattttctacatttgacatgtattcatcattgagaaacactaaaataacaatatttttagaaaacgtttaagaatcaattatggtccaacaattatagcttctgaggtcagtttaaagtgaaagaaaaatctgtaatacaaggattcaaaatatgtgagggtgcataggtattttttactctatctgtgatactctaagatagagtacatgcaacaaagatctgttctgctgtaagagttaaaatggacaagtattgatatcaatgcagtatgaacattaggaaacaatgagaagcttatttttgccataggccatacatgttactgtaatcagtcagttataaaatcatggttttaaatacttaattgagctactagtttctctattgtcccagggagatattagacctctctttttctgaagctaagcttcagccaatcctccttgttttatatcctaatttcctttcttacttcaatctagaattctccagtaggtaccatctctggaaaaaagctgggtctcatgtttgagacaagttcccaggtactattgaagtaataagaaatatgataaaatataatactttaaagtcccagtagaaatagctaacaaaggctgggtgcgctgtggctcatgcctgtaatcctagcactttgggaggctgaggtgggcagatcacttgaggccaatagttcgagatcagcctgaccaacatgntgaaatgccatctccactaaaaatataaaaattagccaggcatggtggtgtgggcctgcagtcccagctacctgggaggctgagtcaggaaaatctcttgaaccaggaggtggacgttgcagtgatcccagattgtgccactgccctccagcctgggtgacagagtgagattctgtctacaaaaa

SEQ ID NO: 388310 - DNA, 3658 bp, Homo sapiens
  misc_feature (3473)..(3473): n is a, c, g, or t
agcaggctggtacgccccggcgtttggcatgccgactgtcagcgtgaagcgtgatctgctcttccaagccctgggccgcacctacactgacgaagaatttgatgaactatgttttgaatttggtctggagcttgatgaaattgctccgtagaatttgtgacagccctggctgacctccgagcagaggctagctgtcccatctgtctggactacttgaaagacccagtgaccatcagctgtgggcataacttctgtctctcctgcatcattatgtcctggaaggatctagatgatagtttcccctgccccttttgccacttgtgctgtccagaaaggaaatttataagcaatccccagctgggtagtttgactgaaattgctaagcaactccagctaagaagcaagaggaagaggcaggaagagaagcatgtgtgtaagaagcataatcaggttttgactttcttctctcagaaagacctagagcttttatgtccaaggtgcagtttgtccactgatcaccagcatcgctgtgtttggcccataaagaaggctgcctcctatcaggaaaaaactggagcaatacaatgcaccgtggaaggagagagtggaactaattgaaaaagtcataactatacaaaccagaaaatcactggaactgaagaaaaagacatctgagaaggaaataataagtaaagaacaaggtaatgtaaaggcagcaggagcctctgatgttgttctttacaaaattgacgtccctgccaatagatatgatctcctgtgtctggaaggattggttcgaggacttcaggtcttcaaagaaaggataaaggctccagtgtataaacgggtaatgcctgatggaaaaatccagaaattgattatcacagaagagacagctaagatacgtccttttgcggtagcagcagttctccgtaatataaagtttactaaagatcgatatgacagcttcattgaacttcaggagaaattacatcagaatatttgcaggaaaagagcactggttgccattggtacccatgatttggacactttgtcgggcccatttacttatactgcaaagcgtccttcagatatcaaattcaagcctctaaataagaccaaggagtatacagcctgtgaactgatgaacatatacaagactgacaatcacctgaaacattatttacatatcattgaaaacaaacccctgtatccagttatctatgatagcaatggtgtcgtcctttcaatgcctcccatcatcaatggggatcattccagaataacagtaaatactagaaatatttttattgaatgcacgggaactgactttactaaggcaaaaatagttcttgatattattgtcaccatgttcagtgaatattgtgagaatcaatttacggtcgaagctgctgaagtggtttttcctaatggaaaatcacatacctttccagaattagcttaccgaaaggagatggtgagagctgacctaattaacaaaaaagttggaatcagagaaactccagaaaatcttgccaaacttctgaccaggatgtatttaaaatcagaagtcataggtgatgggaatcagattgagattgaaatccctccaaccagagctgacattatccatgcatgtgatattgtagaagatgcagctattgcttatggatataacaacattcagatgactctcccgaaaacttacaccatagctaatcaatttcctcttaataagctcactgaacttctccgacatgacatggcagccgctggcttcactgaagcacttacctttgccctgtgctcccaagaagatattgctgataaactaggtgtggatatctctgcaacaaaggcagtccacataagtaatcctaaaacagctgaatttcaggtggcacgcactacccttcttcctggcctcctgaagaccatagcagcaaatcgtaagatgccccttccactgaaactgtttgaaatctctgacattgtaataaaagattctaatacagatgtaggtgcaaaaaactacagacatctctgtgctgtttattacaacaagaatcctgggtttgagatcattcatgggctgctggacagaattatgcagttgctcgatgtgcctcctggtgaagacaaggggggatatgtgatcaaagcatcagaagggcctgctttcttccccgggcgatgtgcagagatctttgccaggggtcaaagcgtcgggaagcttggggtccttcatcctgacgttatcaccaaatttgagctgaccatgccctgctcctccctagaaatcaatattggaccctttttgtgaagattggtctctgtggtgtgattctcttcccaggtgtccctttctcctcccctagtgtccttaagtcctcctccacagggaacatctatttgggctttgatgtttaataaagtagaaagcactgtctggctgtgtgggtagagaccatcctttccctgcatattaggccagcttgtgccatataccaatgtggtgtctgtgtgtgaagctgcattgttgggtaaaagccccgtggagtgctggagaaatgcactagcagagtgcaggatctgttctgaaaggcagacgtgctcctcagacatcagaacatcacattggaacggattactcctgcataacaagatcccatttctttccttattgataaaacaagataatcgatgagaattcatgttgcatgagttcgagataactgaggggtttagctttgattttctacatttgacatgtattcatcattgagaaacactaaaataacaatatttttagaaaacgtttaagaatcaattatggtccaacaattatagcttctgaggtcagtttaaagtgaaagaaaaatctgtaatacaaggattcaaaatatgtgagggtgcataggtattttttactctatctgtgatactctaagatagagtacatgcaacaaagatctgttctgctgtaagagttaaaatggacaagtattgatatcaatgcagtatgaacattaggaaacaatgagaagcttatttttgccataggccatacatgttactgtaatcagtcagttataaaatcatggttttaaatacttaattgagctactagtttctctattgtcccagggagatattagacctctctttttctgaagctaagcttcagccaatcctccttgttttatatcctaatttcctttcttacttcaatctagaattctccagtaggtaccatctctggaaaaaagctgggtctcatgtttgagacaagttcccaggtactattgaagtaataagaaatatgataaaatataatactttaaagtcccagtagaaatagctaacaaaggctgggtgcgctgtggctcatgcctgtaatcctagcactttgggaggctgaggtgggcagatcacttgaggccaatagttcgagatcagcctgaccaacatgntgaaatgccatctccactaaaaatataaaaattagccaggcatggtggtgtgggcctgcagtcccagctacctgggaggctgagtcaggaaaatctcttgaaccaggaggtggacgttgcagtgatcccagattgtgccactgccctccagcctgggtgacagagtgagattctgtctacaaaaa

SEQ ID NO: 388311 - DNA, 3179 bp, Homo sapiens
  misc_feature (2994)..(2994): n is a, c, g, or t
gtgcaatgagttcgacggagcatgccgactgtcagtgtgaaacgtgatctagttcttgccaagcccactggagactgccatgctacatctgcatcgatggcaagtttgtatgtaactatgtttatagaacgttctgcggtcgtggcagactgtgaaatcgaaactgtacactactgtagcagagaggaacatctgagaaggaaataataagtaaagaacaaggtaatgtaaaggcagcaggagcctctgatgttgttctttacaaaattgacgtccctgccaatagatatgatctcctgtgtctggaaggattggttcgaggacttcaggtcttcaaagaaaggataaaggctccagtgtataaacgggtaatgcctgatggaaaaatccagaaattgattatcacagaagagacagctaagatacgtccttttgcggtagcagcagttctccgtaatataaagtttactaaagatcgatatgacagcttcattgaacttcaggagaaattacatcagaatatttgcaggaaaagagcactggttgccattggtacccatgatttggacactttgtcgggcccatttacttatactgcaaagcgtccttcagatatcaaattcaagcctctaaataagaccaaggagtatacagcctgtgaactgatgaacatatacaagactgacaatcacctgaaacattatttacatatcattgaaaacaaacccctgtatccagttatctatgatagcaatggtgtcgtcctttcaatgcctcccatcatcaatggggatcattccagaataacagtaaatactagaaatatttttattgaatgcacgggaactgactttactaaggcaaaaatagttcttgatattattgtcaccatgttcagtgaatattgtgagaatcaatttacggtcgaagctgctgaagtggtttttcctaatggaaaatcacatacctttccagaattagcttaccgaaaggagatggtgagagctgacctaattaacaaaaaagttggaatcagagaaactccagaaaatcttgccaaacttctgaccaggatgtatttaaaatcagaagtcataggtgatgggaatcagattgagattgaaatccctccaaccagagctgacattatccatgcatgtgatattgtagaagatgcagctattgcttatggatataacaacattcagatgactctcccgaaaacttacaccatagctaatcaatttcctcttaataagctcactgaacttctccgacatgacatggcagccgctggcttcactgaagcacttacctttgccctgtgctcccaagaagatattgctgataaactaggtgtggatatctctgcaacaaaggcagtccacataagtaatcctaaaacagctgaatttcaggtggcacgcactacccttcttcctggcctcctgaagaccatagcagcaaatcgtaagatgccccttccactgaaactgtttgaaatctctgacattgtaataaaagattctaatacagatgtaggtgcaaaaaactacagacatctctgtgctgtttattacaacaagaatcctgggtttgagatcattcatgggctgctggacagaattatgcagttgctcgatgtgcctcctggtgaagacaaggggggatatgtgatcaaagcatcagaagggcctgctttcttccccgggcgatgtgcagagatctttgccaggggtcaaagcgtcgggaagcttggggtccttcatcctgacgttatcaccaaatttgagctgaccatgccctgctcctccctagaaatcaatattggaccctttttgtgaagattggtctctgtggtgtgattctcttcccaggtgtccctttctcctcccctagtgtccttaagtcctcctccacagggaacatctatttgggctttgatgtttaataaagtagaaagcactgtctggctgtgtgggtagagaccatcctttccctgcatattaggccagcttgtgccatataccaatgtggtgtctgtgtgtgaagctgcattgttgggtaaaagccccgtggagtgctggagaaatgcactagcagagtgcaggatctgttctgaaaggcagacgtgctcctcagacatcagaacatcacattggaacggattactcctgcataacaagatcccatttctttccttattgataaaacaagataatcgatgagaattcatgttgcatgagttcgagataactgaggggtttagctttgattttctacatttgacatgtattcatcattgagaaacactaaaataacaatatttttagaaaacgtttaagaatcaattatggtccaacaattatagcttctgaggtcagtttaaagtgaaagaaaaatctgtaatacaaggattcaaaatatgtgagggtgcataggtattttttactctatctgtgatactctaagatagagtacatgcaacaaagatctgttctgctgtaagagttaaaatggacaagtattgatatcaatgcagtatgaacattaggaaacaatgagaagcttatttttgccataggccatacatgttactgtaatcagtcagttataaaatcatggttttaaatacttaattgagctactagtttctctattgtcccagggagatattagacctctctttttctgaagctaagcttcagccaatcctccttgttttatatcctaatttcctttcttacttcaatctagaattctccagtaggtaccatctctggaaaaaagctgggtctcatgtttgagacaagttcccaggtactattgaagtaataagaaatatgataaaatataatactttaaagtcccagtagaaatagctaacaaaggctgggtgcgctgtggctcatgcctgtaatcctagcactttgggaggctgaggtgggcagatcacttgaggccaatagttcgagatcagcctgaccaacatgntgaaatgccatctccactaaaaatataaaaattagccaggcatggtggtgtgggcctgcagtcccagctacctgggaggctgagtcaggaaaatctcttgaaccaggaggtggacgttgcagtgatcccagattgtgccactgccctccagcctgggtgacagagtgagattctgtctacaaaaa

SEQ ID NO: 388312 - DNA, 3112 bp, Homo sapiens
  misc_feature (2927)..(2927): n is a, c, g, or t
agcaggctggtacgccccggcgtttggcatgccgactgtcagcgtgaagcgtgatctgctcttccaagccctgggccgcacctacatatgttttgaatttggtctggagcttgatgaaattacatctgagaaggaaataataagtaaagaacaaggtaatgtaaaggcagcaggagcctctgatgttgttctttacaaaattgacgtccctgccaatagatatgatctcctgtgtctggaaggattggttcgaggacttcaggtcttcaaagaaaggataaaggctccagtgtataaacgggtaatgcctgatggaaaaatccagaaattgattatcacagaagagacagctaagatacgtccttttgcggtagcagcagttctccgtaatataaagtttactaaagatcgatatgacagcttcattgaacttcaggagaaattacatcagaatatttgcaggaaaagagcactggttgccattggtacccatgatttggacactttgtcgggcccatttacttatactgcaaagcgtccttcagatatcaaattcaagcctctaaataagaccaaggagtatacagcctgtgaactgatgaacatatacaagactgacaatcacctgaaacattatttacatatcattgaaaacaaacccctgtatccagttatctatgatagcaatggtgtcgtcctttcaatgcctcccatcatcaatggggatcattccagaataacagtaaatactagaaatatttttattgaatgcacgggaactgactttactaaggcaaaaatagttcttgatattattgtcaccatgttcagtgaatattgtgagaatcaatttacggtcgaagctgctgaagtggtttttcctaatggaaaatcacatacctttccagaattagcttaccgaaaggagatggtgagagctgacctaattaacaaaaaagttggaatcagagaaactccagaaaatcttgccaaacttctgaccaggatgtatttaaaatcagaagtcataggtgatgggaatcagattgagattgaaatccctccaaccagagctgacattatccatgcatgtgatattgtagaagatgcagctattgcttatggatataacaacattcagatgactctcccgaaaacttacaccatagctaatcaatttcctcttaataagctcactgaacttctccgacatgacatggcagccgctggcttcactgaagcacttacctttgccctgtgctcccaagaagatattgctgataaactaggtgtggatatctctgcaacaaaggcagtccacataagtaatcctaaaacagctgaatttcaggtggcacgcactacccttcttcctggcctcctgaagaccatagcagcaaatcgtaagatgccccttccactgaaactgtttgaaatctctgacattgtaataaaagattctaatacagatgtaggtgcaaaaaactacagacatctctgtgctgtttattacaacaagaatcctgggtttgagatcattcatgggctgctggacagaattatgcagttgctcgatgtgcctcctggtgaagacaaggggggatatgtgatcaaagcatcagaagggcctgctttcttccccgggcgatgtgcagagatctttgccaggggtcaaagcgtcgggaagcttggggtccttcatcctgacgttatcaccaaatttgagctgaccatgccctgctcctccctagaaatcaatattggaccctttttgtgaagattggtctctgtggtgtgattctcttcccaggtgtccctttctcctcccctagtgtccttaagtcctcctccacagggaacatctatttgggctttgatgtttaataaagtagaaagcactgtctggctgtgtgggtagagaccatcctttccctgcatattaggccagcttgtgccatataccaatgtggtgtctgtgtgtgaagctgcattgttgggtaaaagccccgtggagtgctggagaaatgcactagcagagtgcaggatctgttctgaaaggcagacgtgctcctcagacatcagaacatcacattggaacggattactcctgcataacaagatcccatttctttccttattgataaaacaagataatcgatgagaattcatgttgcatgagttcgagataactgaggggtttagctttgattttctacatttgacatgtattcatcattgagaaacactaaaataacaatatttttagaaaacgtttaagaatcaattatggtccaacaattatagcttctgaggtcagtttaaagtgaaagaaaaatctgtaatacaaggattcaaaatatgtgagggtgcataggtattttttactctatctgtgatactctaagatagagtacatgcaacaaagatctgttctgctgtaagagttaaaatggacaagtattgatatcaatgcagtatgaacattaggaaacaatgagaagcttatttttgccataggccatacatgttactgtaatcagtcagttataaaatcatggttttaaatacttaattgagctactagtttctctattgtcccagggagatattagacctctctttttctgaagctaagcttcagccaatcctccttgttttatatcctaatttcctttcttacttcaatctagaattctccagtaggtaccatctctggaaaaaagctgggtctcatgtttgagacaagttcccaggtactattgaagtaataagaaatatgataaaatataatactttaaagtcccagtagaaatagctaacaaaggctgggtgcgctgtggctcatgcctgtaatcctagcactttgggaggctgaggtgggcagatcacttgaggccaatagttcgagatcagcctgaccaacatgntgaaatgccatctccactaaaaatataaaaattagccaggcatggtggtgtgggcctgcagtcccagctacctgggaggctgagtcaggaaaatctcttgaaccaggaggtggacgttgcagtgatcccagattgtgccactgccctccagcctgggtgacagagtgagattctgtctacaaaaa

SEQ ID NO: 388313 - DNA, 2703 bp, Homo sapiens
  misc_feature (2518)..(2518): n is a, c, g, or t
gtgagcatatcccggtgttagaggtatcaatgattagactgagaagaaacctggaaaagagcactggttgccattggtacccatgatttggacactttgtcgggcccatttacttatactgcaaagcgtccttcagatatcaaattcaagcctctaaataagaccaaggagtatacagcctgtgaactgatgaacatatacaagactgacaatcacctgaaacattatttacatatcattgaaaacaaacccctgtatccagttatctatgatagcaatggtgtcgtcctttcaatgcctcccatcatcaatggggatcattccagaataacagtaaatactagaaatatttttattgaatgcacgggaactgactttactaaggcaaaaatagttcttgatattattgtcaccatgttcagtgaatattgtgagaatcaatttacggtcgaagctgctgaagtggtttttcctaatggaaaatcacatacctttccagaattagcttaccgaaaggagatggtgagagctgacctaattaacaaaaaagttggaatcagagaaactccagaaaatcttgccaaacttctgaccaggatgtatttaaaatcagaagtcataggtgatgggaatcagattgagattgaaatccctccaaccagagctgacattatccatgcatgtgatattgtagaagatgcagctattgcttatggatataacaacattcagatgactctcccgaaaacttacaccatagctaatcaatttcctcttaataagctcactgaacttctccgacatgacatggcagccgctggcttcactgaagcacttacctttgccctgtgctcccaagaagatattgctgataaactaggtgtggatatctctgcaacaaaggcagtccacataagtaatcctaaaacagctgaatttcaggtggcacgcactacccttcttcctggcctcctgaagaccatagcagcaaatcgtaagatgccccttccactgaaactgtttgaaatctctgacattgtaataaaagattctaatacagatgtaggtgcaaaaaactacagacatctctgtgctgtttattacaacaagaatcctgggtttgagatcattcatgggctgctggacagaattatgcagttgctcgatgtgcctcctggtgaagacaaggggggatatgtgatcaaagcatcagaagggcctgctttcttccccgggcgatgtgcagagatctttgccaggggtcaaagcgtcgggaagcttggggtccttcatcctgacgttatcaccaaatttgagctgaccatgccctgctcctccctagaaatcaatattggaccctttttgtgaagattggtctctgtggtgtgattctcttcccaggtgtccctttctcctcccctagtgtccttaagtcctcctccacagggaacatctatttgggctttgatgtttaataaagtagaaagcactgtctggctgtgtgggtagagaccatcctttccctgcatattaggccagcttgtgccatataccaatgtggtgtctgtgtgtgaagctgcattgttgggtaaaagccccgtggagtgctggagaaatgcactagcagagtgcaggatctgttctgaaaggcagacgtgctcctcagacatcagaacatcacattggaacggattactcctgcataacaagatcccatttctttccttattgataaaacaagataatcgatgagaattcatgttgcatgagttcgagataactgaggggtttagctttgattttctacatttgacatgtattcatcattgagaaacactaaaataacaatatttttagaaaacgtttaagaatcaattatggtccaacaattatagcttctgaggtcagtttaaagtgaaagaaaaatctgtaatacaaggattcaaaatatgtgagggtgcataggtattttttactctatctgtgatactctaagatagagtacatgcaacaaagatctgttctgctgtaagagttaaaatggacaagtattgatatcaatgcagtatgaacattaggaaacaatgagaagcttatttttgccataggccatacatgttactgtaatcagtcagttataaaatcatggttttaaatacttaattgagctactagtttctctattgtcccagggagatattagacctctctttttctgaagctaagcttcagccaatcctccttgttttatatcctaatttcctttcttacttcaatctagaattctccagtaggtaccatctctggaaaaaagctgggtctcatgtttgagacaagttcccaggtactattgaagtaataagaaatatgataaaatataatactttaaagtcccagtagaaatagctaacaaaggctgggtgcgctgtggctcatgcctgtaatcctagcactttgggaggctgaggtgggcagatcacttgaggccaatagttcgagatcagcctgaccaacatgntgaaatgccatctccactaaaaatataaaaattagccaggcatggtggtgtgggcctgcagtcccagctacctgggaggctgagtcaggaaaatctcttgaaccaggaggtggacgttgcagtgatcccagattgtgccactgccctccagcctgggtgacagagtgagattctgtctacaaaaa

SEQ ID NO: 388314 - DNA, 2724 bp, Homo sapiens
  misc_feature (2539)..(2539): n is a, c, g, or t
tttcgttcacgctgtatttccaaaggttttgtctctttaataacatgttaaattttaacttattaaagagcttagaaaagagcactggttgccattggtacccatgatttggacactttgtcgggcccatttacttatactgcaaagcgtccttcagatatcaaattcaagcctctaaataagaccaaggagtatacagcctgtgaactgatgaacatatacaagactgacaatcacctgaaacattatttacatatcattgaaaacaaacccctgtatccagttatctatgatagcaatggtgtcgtcctttcaatgcctcccatcatcaatggggatcattccagaataacagtaaatactagaaatatttttattgaatgcacgggaactgactttactaaggcaaaaatagttcttgatattattgtcaccatgttcagtgaatattgtgagaatcaatttacggtcgaagctgctgaagtggtttttcctaatggaaaatcacatacctttccagaattagcttaccgaaaggagatggtgagagctgacctaattaacaaaaaagttggaatcagagaaactccagaaaatcttgccaaacttctgaccaggatgtatttaaaatcagaagtcataggtgatgggaatcagattgagattgaaatccctccaaccagagctgacattatccatgcatgtgatattgtagaagatgcagctattgcttatggatataacaacattcagatgactctcccgaaaacttacaccatagctaatcaatttcctcttaataagctcactgaacttctccgacatgacatggcagccgctggcttcactgaagcacttacctttgccctgtgctcccaagaagatattgctgataaactaggtgtggatatctctgcaacaaaggcagtccacataagtaatcctaaaacagctgaatttcaggtggcacgcactacccttcttcctggcctcctgaagaccatagcagcaaatcgtaagatgccccttccactgaaactgtttgaaatctctgacattgtaataaaagattctaatacagatgtaggtgcaaaaaactacagacatctctgtgctgtttattacaacaagaatcctgggtttgagatcattcatgggctgctggacagaattatgcagttgctcgatgtgcctcctggtgaagacaaggggggatatgtgatcaaagcatcagaagggcctgctttcttccccgggcgatgtgcagagatctttgccaggggtcaaagcgtcgggaagcttggggtccttcatcctgacgttatcaccaaatttgagctgaccatgccctgctcctccctagaaatcaatattggaccctttttgtgaagattggtctctgtggtgtgattctcttcccaggtgtccctttctcctcccctagtgtccttaagtcctcctccacagggaacatctatttgggctttgatgtttaataaagtagaaagcactgtctggctgtgtgggtagagaccatcctttccctgcatattaggccagcttgtgccatataccaatgtggtgtctgtgtgtgaagctgcattgttgggtaaaagccccgtggagtgctggagaaatgcactagcagagtgcaggatctgttctgaaaggcagacgtgctcctcagacatcagaacatcacattggaacggattactcctgcataacaagatcccatttctttccttattgataaaacaagataatcgatgagaattcatgttgcatgagttcgagataactgaggggtttagctttgattttctacatttgacatgtattcatcattgagaaacactaaaataacaatatttttagaaaacgtttaagaatcaattatggtccaacaattatagcttctgaggtcagtttaaagtgaaagaaaaatctgtaatacaaggattcaaaatatgtgagggtgcataggtattttttactctatctgtgatactctaagatagagtacatgcaacaaagatctgttctgctgtaagagttaaaatggacaagtattgatatcaatgcagtatgaacattaggaaacaatgagaagcttatttttgccataggccatacatgttactgtaatcagtcagttataaaatcatggttttaaatacttaattgagctactagtttctctattgtcccagggagatattagacctctctttttctgaagctaagcttcagccaatcctccttgttttatatcctaatttcctttcttacttcaatctagaattctccagtaggtaccatctctggaaaaaagctgggtctcatgtttgagacaagttcccaggtactattgaagtaataagaaatatgataaaatataatactttaaagtcccagtagaaatagctaacaaaggctgggtgcgctgtggctcatgcctgtaatcctagcactttgggaggctgaggtgggcagatcacttgaggccaatagttcgagatcagcctgaccaacatgntgaaatgccatctccactaaaaatataaaaattagccaggcatggtggtgtgggcctgcagtcccagctacctgggaggctgagtcaggaaaatctcttgaaccaggaggtggacgttgcagtgatcccagattgtgccactgccctccagcctgggtgacagagtgagattctgtctacaaaaa

SEQ ID NO: 388315 - DNA, 2358 bp, Homo sapiens
  misc_feature (24)..(24): n is a, c, g, or t
  misc_feature (32)..(32): n is a, c, g, or t
  misc_feature (2173)..(2173): n is a, c, g, or t
ctcgtttgtaactgactctcttanctaccagngctaacggcaaaaatagttcttgatattattgtcaccatgttcagtgaatattgtgagaatcaatttacggtcgaagctgctgaagtggtttttcctaatggaaaatcacatacctttccagaattagcttaccgaaaggagatggtgagagctgacctaattaacaaaaaagttggaatcagagaaactccagaaaatcttgccaaacttctgaccaggatgtatttaaaatcagaagtcataggtgatgggaatcagattgagattgaaatccctccaaccagagctgacattatccatgcatgtgatattgtagaagatgcagctattgcttatggatataacaacattcagatgactctcccgaaaacttacaccatagctaatcaatttcctcttaataagctcactgaacttctccgacatgacatggcagccgctggcttcactgaagcacttacctttgccctgtgctcccaagaagatattgctgataaactaggtgtggatatctctgcaacaaaggcagtccacataagtaatcctaaaacagctgaatttcaggtggcacgcactacccttcttcctggcctcctgaagaccatagcagcaaatcgtaagatgccccttccactgaaactgtttgaaatctctgacattgtaataaaagattctaatacagatgtaggtgcaaaaaactacagacatctctgtgctgtttattacaacaagaatcctgggtttgagatcattcatgggctgctggacagaattatgcagttgctcgatgtgcctcctggtgaagacaaggggggatatgtgatcaaagcatcagaagggcctgctttcttccccgggcgatgtgcagagatctttgccaggggtcaaagcgtcgggaagcttggggtccttcatcctgacgttatcaccaaatttgagctgaccatgccctgctcctccctagaaatcaatattggaccctttttgtgaagattggtctctgtggtgtgattctcttcccaggtgtccctttctcctcccctagtgtccttaagtcctcctccacagggaacatctatttgggctttgatgtttaataaagtagaaagcactgtctggctgtgtgggtagagaccatcctttccctgcatattaggccagcttgtgccatataccaatgtggtgtctgtgtgtgaagctgcattgttgggtaaaagccccgtggagtgctggagaaatgcactagcagagtgcaggatctgttctgaaaggcagacgtgctcctcagacatcagaacatcacattggaacggattactcctgcataacaagatcccatttctttccttattgataaaacaagataatcgatgagaattcatgttgcatgagttcgagataactgaggggtttagctttgattttctacatttgacatgtattcatcattgagaaacactaaaataacaatatttttagaaaacgtttaagaatcaattatggtccaacaattatagcttctgaggtcagtttaaagtgaaagaaaaatctgtaatacaaggattcaaaatatgtgagggtgcataggtattttttactctatctgtgatactctaagatagagtacatgcaacaaagatctgttctgctgtaagagttaaaatggacaagtattgatatcaatgcagtatgaacattaggaaacaatgagaagcttatttttgccataggccatacatgttactgtaatcagtcagttataaaatcatggttttaaatacttaattgagctactagtttctctattgtcccagggagatattagacctctctttttctgaagctaagcttcagccaatcctccttgttttatatcctaatttcctttcttacttcaatctagaattctccagtaggtaccatctctggaaaaaagctgggtctcatgtttgagacaagttcccaggtactattgaagtaataagaaatatgataaaatataatactttaaagtcccagtagaaatagctaacaaaggctgggtgcgctgtggctcatgcctgtaatcctagcactttgggaggctgaggtgggcagatcacttgaggccaatagttcgagatcagcctgaccaacatgntgaaatgccatctccactaaaaatataaaaattagccaggcatggtggtgtgggcctgcagtcccagctacctgggaggctgagtcaggaaaatctcttgaaccaggaggtggacgttgcagtgatcccagattgtgccactgccctccagcctgggtgacagagtgagattctgtctacaaaaa

SEQ ID NO: 388316 - DNA, 3073 bp, Homo sapiens
  misc_feature (2888)..(2888): n is a, c, g, or t
agcaggctggtacgccccggcgtttggcatgccgactgtcagcgtgaagcgtgatctgctcttccaagccctgggccgcacctacactgacgaagaatttgatgaactatgttttgaatttggtctggagcttgatgaaattacatctgagaaggaaataataagtaaagaacaaggtaatgtaaaggcagcaggagcctctgatgttgttctttacaaaattgacgtccctgccaatagatatgatctcctgtgtctggaaggattggttcgaggacttcaggtcttcaaagaaaggataaaggctccagtgtataaacgggtaatgcctgatggaaaaatccagaaattgattatcacagaagagacagctaagatacgtccttttgcggtagcagcagttctccgtaatataaagtttactaaagatcgatatgacagcttcattgaacttcaggagaaattacatcagaatatttgcaggaaaagagcactggttgccattggtacccatgatttggacactttgtcgggcccatttacttatactgcaaagcgtccttcagatatcaaattcaagcctctaaataagaccaaggagtatacagcctgtgaactgatgaacatatacaagactgacaatcacctgaaacattatttacatatcattgaaaacaaacccctgtatccagttatctatgatagcaatggtgtcgtcctttcaatgcctcccatcatcaatggggatcattccagaataacagtaaatactagaaatatttttattgaatgcacgggaactgactttactaaggcaaaaatagttcttgatattattgtcaccatgttcagtgaatattgtgagaatcaatttacgtcgacctaatgaaaatcacatacctttccagaattagcttaccgaaaggagatggtgacagctgacctaattaacaaaaaaagtggaatgagagaaacttctgaccgaggatgttttaaaatcaaaagtcttaggggatgggaaataaattgagattaaatccctccccccgggtaccttaccacgcatgtcattgtagaaacgcaggtattggtctggatatacccaattagagggatttcccgaaaccttcccccaaggtaacaatttccttttaatagcccatgtaattttctgacatacaaggcaccgccgggttcacttaagcacttccctttgccttgctcccaagaagatattgctgataaactaggtgtggatatctctgcaacaaaggcagtccacataagtaatcctaaaacagctgaatttcaggtggcacgcactacccttcttcctggcctcctgaagaccatagcagcaaatcgtaagatgccccttccactgaaactgtttgaaatctctgacattgtaataaaagattctaatacagatgtaggtgcaaaaaactacagacatctctgtgctgtttattacaacaagaatcctgggtttgagatcattcatgggctgctggacagaattatgcagttgctcgatgtgcctcctggtgaagacaaggggggatatgtgatcaaagcatcagaagggcctgctttcttccccgggcgatgtgcagagatctttgccaggggtcaaagcgtcgggaagcttggggtccttcatcctgacgttatcaccaaatttgagctgaccatgccctgctcctccctagaaatcaatattggaccctttttgtgaagattggtctctgtggtgtgattctcttcccaggtgtccctttctcctcccctagtgtccttaagtcctcctccacagggaacatctatttgggctttgatgtttaataaagtagaaagcactgtctggctgtgtgggtagagaccatcctttccctgcatattaggccagcttgtgccatataccaatgtggtgtctgtgtgtgaagctgcattgttgggtaaaagccccgtggagtgctggagaaatgcactagcagagtgcaggatctgttctgaaaggcagacgtgctcctcagacatcagaacatcacattggaacggattactcctgcataacaagatcccatttctttccttattgataaaacaagataatcgatgagaattcatgttgcatgagttcgagataactgaggggtttagctttgattttctacatttgacatgtattcatcattgagaaacactaaaataacaatatttttagaaaacgtttaagaatcaattatggtccaacaattatagcttctgaggtcagtttaaagtgaaagaaaaatctgtaatacaaggattcaaaatatgtgagggtgcataggtattttttactctatctgtgatactctaagatagagtacatgcaacaaagatctgttctgctgtaagagttaaaatggacaagtattgatatcaatgcagtatgaacattaggaaacaatgagaagcttatttttgccataggccatacatgttactgtaatcagtcagttataaaatcatggttttaaatacttaattgagctactagtttctctattgtcccagggagatattagacctctctttttctgaagctaagcttcagccaatcctccttgttttatatcctaatttcctttcttacttcaatctagaattctccagtaggtaccatctctggaaaaaagctgggtctcatgtttgagacaagttcccaggtactattgaagtaataagaaatatgataaaatataatactttaaagtcccagtagaaatagctaacaaaggctgggtgcgctgtggctcatgcctgtaatcctagcactttgggaggctgaggtgggcagatcacttgaggccaatagttcgagatcagcctgaccaacatgntgaaatgccatctccactaaaaatataaaaattagccaggcatggtggtgtgggcctgcagtcccagctacctgggaggctgagtcaggaaaatctcttgaaccaggaggtggacgttgcagtgatcccagattgtgccactgccctccagcctgggtgacagagtgagattctgtctacaaaaa

SEQ ID NO: 388317 - DNA, 1077 bp, Homo sapiens
agcaggctggtacgccccggcgtttggcatgccgactgtcagcgtgaagcgtgatctgctcttccaagccctgggccgcacctacactgacgaagaatttgatgaactatgttttgaatttggtctggagcttgatgaaattacatctgagaaggaaataataagtaaagaacaaggtaatgtaaaggcagcaggagcctctgatgttgttctttacaaaattgacgtccctgccaatagatatgatctcctgtgtctggaaggattggttcgaggacttcaggtcttcaaagaaaggataaaggctccagtgtataaacgggtaatgcctgatggaaaaatccagaaattgattatcacagaagagacagctaagatacgtccttttgcggtagcagcagttctccgtaatataaagtttactaaagatcgatatgacagcttcattgaacttcaggagaaattacatcagaatatttgcaggaaaagagcactggttgccattggtacccatgatttggacactttgtcgggcccatttacttatactgcaaagcgtccttcagatatcaaattcaagcctctaaataagaccaaggagtatacagcctgtgaactgatgaacatatacaagactgacaatcacctgaaacattatttacatatcattgaaaacaaacccctgtatccagttatctatgatagcaatggtgtcgtcctttcaatgcctcccatcatcaatggggatcattccagaataacagtaaatactagaaatatttttattgaatgcacgggaactgactttactaaggcaaaaatagttcttgatattattgtcaccatgttcagtgaatattgtgagaatcaatttacgtcgaaagctgctgaaagtggtttttcctaagtggaaaatccacattaccgttccagaaataaggtttaccggacggcgaatgctgacaaggctggcttattaaaccaaaacggtggcatgcaggaaaccggaaaatttggccagctttgacccggaggttttacaaccaaagcactagggggggaacacacggcactgac

SEQ ID NO: 388318 - DNA, 1852 bp, Homo sapiens
agcaggctggtacgccccggcgtttggcatgccgactgtcagcgtgaagcgtgatctgctcttccaagccctgggccgcacctacactgacgaagaatttgatgaactatgttttgaatttggtctggagcttgatgaaattgctccgtagaatttgtgacagccctggctgacctccgagcagaggctagctgtcccatctgtctggactacttgaaagacccagtgaccatcagctgtgggcataacttctgtctctcctgcatcattatgtcctggaaggatctagatgatagtttcccctgccccttttgccacttgtgctgtccagaaaggaaatttataagcaatccccagctgggtagtttgactgaaattgctaagcaactccagctaagaagcaagaggaagaggcaggaagagaagcatgtgtgtaagaagcataatcaggttttgactttcttctctcagaaagacctagagcttttatgtccaaggtgcagtttgtccactgatcaccagcatcgctgtgtttggcccataaagaaggctgcctcctatcaggaaaaaactggagcaatacaatgcaccgtggaaggagagagtggaactaattgaaaaagtcataactatacaaaccagaaaatcactggaactgaagaaaaaggtaaaacatacggcagaagaagtcaagtctgaatttgagcaacttaggttatttctgcaaaatgagcaagagactgtttttgggcaattacaagatgacgagatggatattttagcacaactaaatgaaagcctaacaaaattttcagattatacctcctcattaaaatatctactaaagaagatagagagcatatatgtgaagtcagaactggaattactggctgatgttaaggatatctatcacagacataagaatttaaaattccctaaaccttttttattcaaattaaaagaatatggttaccatctgtctccacaatattgtggccaaaacaaaattatcaagcgatttcaagtagatgtaattctagatcctgaagcagcacatcgtaaacttatagtctcagaagatagaaaaactgtgcgatatggaaatacaacacaaaacttacctcataacccaagaagattttatctgctcccagctgttctgggttctaagggataaaattgtggcaggcagtaccgggaagtagaagttaaagacatgcctgaatggattcttggtgtctgtagtgactctcctcccacaaggaggaagagtcaaccaattttagtacaggatggattatggagaatttggtaatctagtcggaataattatattgtattgggccataaggaaattattctgctgccaaaagtaacacctagtaagattggcatttttttagactgtgaaatgaatgaggtttccttttataatttgaatgatagatctcttctctgtacttttaatgatgattttacaggagaactttggccttatttttatactggaactgactcaaaacctcttaaaatttctacagtaacagattctgtattttctttcacctagtagacataactgagccagttaatctagttttggccattctgtattttgtccagtttttctcataaaaaaacaatattttttatctcaatttcagcaacttccaaaaaatgtgattatgggacctactttataataaattatggggtcaatgacaaagtactttagaaattctacggtaaaatacttgaaaaatatattactgaaggaacgtattatgtaagaaaatctattacttttgtaattgccaataaaagcccaatttttttctcaaaaaaaaaaaaa

SEQ ID NO: 388319 - DNA, 782 bp, Homo sapiens
agcaggctggtacgccccggcgtttggcatgccgactgtcagcgtgaagcgtgatctgctcttccaagccctgggccgcacctacactgacgaagaatttgatgaactatgttttgaatttggtctggagcttgatgaaattgtatgtattggatatttgtctatttttcaaagattgtgtgcataagcttatttttcagggttatactgtatttcatctttgttaccttatagttagactaaggtgataatgtttgtgggccatgatttctgtgttcagagggctaagctccatgtctgtctgttgccttgactaaaatctcaaaaggagttcatgccttattccatctacaatcaccttgttaccaggctcatgcctataataccagcacttgggaggctgaggtggatggattacctgaagttgggagttgagactagcctgaccaacatggagaaaccttctctctactaaaaatacacaaattaattggatgtggtgagtagctgggattacaggaaggagtccttatcttggacctgaggctgctttcttgaagaaaacttgactttatttcatttagtgggaagagcagcagcccagctaataagttctaatatgcaataggctgcaggctgtgaagtctgaagctaaggagctgagggcttaacaagtttctagaagctgccatcaacatgccaagtcagtaaaactgaaagctggtcagatttcaaggtctggggaggaatccactgcatagtgggtcttgagctctagagag

SEQ ID NO: 388320 - DNA, 343 bp, Homo sapiens
cctgatgactgtaaaagccaggcagctaaatttaataagacatttgtcaaggagatggaagattatggccaattttggtagacagatagttgccggctaaaacaaagcatgtattgaactgttttggagtaggaagaagcattgctatgacaacaaattacttatatttgatttagaagaaggagagcagtgtagcttaatggtttagaaagctcatgagaacaattgttggcacgggtttatgttaaaatataaaatgttaagtaggatctgttaaataattgagcacctcagtgcattctgtctcttctctcactgtctctaaccaatagaagacaatata

SEQ ID NO: 388321 - DNA, 406 bp, Homo sapiens
  misc_feature (178)..(178): n is a, c, g, or t
  misc_feature (188)..(188): n is a, c, g, or t
aatatacaagaactggaattaccagttgcaacacaaattgcaatttaaaacacacacacagagatcagcacagatgattcccaaggagacttcctacgcttcattgaaagaaaaaagcataaccccatgcaggacagtgaaatgaacagaagagacaggaaactgagtttttcctccngactagctcntatttgcatgacctcaagcaagtatcttaacctatatagaaacctttgtaaagacaggctatttccaaggacggtagcaaagacgaaatgacagaagaggtgtgaagggcctatggtttcagattgttactgttcatgcttcagaaaatgtcaccgtctccagcagctcacttcccaactttgatcagatgtagtcaagactggccaactaaagattt

SEQ ID NO: 388322 - DNA, 544 bp, Homo sapiens
ttagagtatcctaccctcctaccccacgccagtgggtctaaacaaccacatcctatccatggataggtctagtcataacactttagagagaatgtcagagcaggagggaggcaagccgcctcttctcggccatcgactgcagatgatgaaagagcgggattcaactttgttttcttttcctgtggccccagtgaaacctcctgccctccctgcacgtctgtgtcttcatttctaaaatgggggtgatgctttcatattgacctaaccccatactacctcacagatgtgttgtgaggattaataaaattatgtctatggtattttcagtttctggagaaaaatacttatagacagtttaactattacatagatatataagtgatctcagtttcttgtttgctgtgatactaatgtgttgttttaacttattccataaaatgacagtccccacggtgtgctaagcgaggagtccgagtgtgtgagcttgagagccgcgcgctagagcgacccggcgagggatggcggccaccgggaccgcggccgc

SEQ ID NO: 388323 - DNA, 338 bp, Homo sapiens
ccccctcctgtggacattacacccctactgtttgcgccctccataccttgccttgcccaatgtgccctgggtcccatacccctccacatccccaggaataggaatttgcccatgggccccaaggttaattgccccctggatcccccttctttgcctttaagccttttttttcttttttttttttttggcaaatgaatgtaccatttcaactttgattttaatagtgctagttgatattggtaataatgctaaccaagagatcaatgccagatttttctcttggggtaagttagctgaagtcatttaaacatacaagatggtagtcacagacagtaccg

SEQ ID NO: 388324 - DNA, 5039 bp, Homo sapiens
ccccgggctcgggcggctgggatggagcagaagagcgcggagcaccggagggcacgcagctgacggagctgcgctgcgttcgcctcgtttgcctcgcgccctccactggagctgttcgcgcctcccggctcccaccgcagcccacccggcagaggagtcgctaccagcgcccagtgcgctctgtcagtccgcaaactccttgccgcccgccccgggctgggcaccaaataccaggctaccatggtctacaagactctcttcgctctttgcatcttaactgcaggatggagggtacagagtctgcctacatcagctcctttgtctgtttctcttccgacaaacattgtaccaccgaccaccatctggactagctctccacaaaacactgatgcagacactgcctccccatccaacggcactcacaacaactcggtgctcccagttacagcatcagccccaacatctctgcttcctaagaacatttccatagagtccagagaagaggagatcaccagcccaggttcgaattgggaaggcacaaacacagacccctcaccttctgggttctcgtcaacaagcggtggagtccacttaacaaccacgttggaggaacacagctcgggcactcctgaagcaggcgtggcagctacactgtcgcagtccgctgctgagcctcccacactcatctcccctcaagctccagcctcatcaccctcatccctatcaacctcaccacctgaggtcttttctgcctccgttactaccaaccatagctccactgtgaccagcacccaacccactggagctccaactgcaccagagtccccgacagaggagtccagctctgaccacacacccacttcacatgccacagctgagccagtaccccaggagaaaacacccccaacaactgtgtcaggcaaagtgatgtgtgagctcatagacatggagaccaccaccacctttcccagggtgatcatgcaggaagtagaacatgcattaagttcaggcagcatcgccgccattaccgtgacagtcattgccgtggtgctgctggtgtttggagttgcagcctacctaaaaatcaggcattcctcctatggaagacttttggacgaccatgactacgggtcctggggaaactacaacaaccctctgtacgatgactcctaacaatggaatatggcctgggatgaggattaactgttctttatttataagtgcttatccagtagaattaataagtacctgatgcgcattgaacgacaatcttaagccctgttttgttggtatggttgtttttgttttcctccctctcctctggctgctacaacttcccctttctggtacaagaagaaccattctttaaaggtgagtggaggctgatttgcagctgaagtgggccagccttgcaccagccaggccagaccaccatggtgaaggcttctttccccactgcaggacccactttgagaaggaccgaggaggaggatttgggttgttttgttaggggttactttcaggggaacatttcatttgtgttatttcttaaacttctatttaggaaattacattaagtattaatgaggggaaaggaaatgagctctacgaggatttcaccctgcatgggagagagcagggttttctcagattcctttttaatctctatttatctggttgtttctgacaggatgctgcctgcttggctctacaagctggaaagcagcttcttagctgcctaattaatgaaagatgaaaataggaagtgccctggagggggccagcaggtcacggggcagaatctctcaggttgctgtgggatctcagtgtgcccctacctgttctcccctccaggccacctgtctctgtaaaggatgtctgctctgttcaaaaggcagctgggatcccagcccacaagtgatcagcagagttgcatttccaaagaaaaaggctatgagatgagctgagttatagagagaaagggagaggcatgtacggtgtggggaagtggaagagaagctggcgggggagaaggaggctaacctgcactgagtacttcattaggacaagtgagaatcagctattgataatggccagagatatccacagcttggaggagcccagagaccgtttgctttatacccacacagcaactggtccactgctttactgtctgttggataatggctgtaaaatgtttaaaaacaaaacaaaacaaaaaagaggcactagtctatctgcaattactcaacgaggcattttcataggaaacagactatgattaatccatttattcttcccacacacttaccttactaagtctttgctttaataaatgagcaaccctgggtatagtcttaaaattctgcacaataaattttgagaaagaattgttcctctttgtaggtatctgtgtattgcaatcattctcaaccaggaggtgattttgccccctgactccaccccagggacattcaaaaatgtctggtgacagttttcattgtcatgacttgggggtgctactagaggccaggaatgctgccaaacattctaccatgcacagcacaacctacaacagcaaagaatcatccaccccaaaatatcagtagtgccgagattgagaaaccctgatttatcacaatgcccactgtgacagaacaagacactcacagattagtgatacgttttatttttaacaaaatgaaatgatgtgttaagtttttatttccaaagtgtttagtttattggctgatgggttgttcttggtatgcatggtgacctttttatttctgtgtgcttcctagagagctttatttcatggcgacaactctgtcttcttgtaacagctggtattagcaagcagcatcttatgtcctgatttcatatagtagaaaacaaacattgggtccgacttcaaaatgtgttgtattgtcctacagtgtcataaagaacctgaaaatgaacttttgtttctaaagttggaccttgctgccatgactgtttagtttacagaaacttgaccccggctcatcctgtctctggctgtggcccggcaaagcactgaaaacccctctggtctcagagacagtaggggcagtgccactttctacaacctgccaacccacacactggagtaattctgaaaaaaattattcctaaactctctaagtgtggacggagaatgagcaagccccagaagtattttacaaccagagtgggtaatgaggagggggcttactggaatcgtcatatctctgaatattgaaaacaacaactaaaaaagtggaccttctcagaaaaaaagggcagcaaatgaccaagggcgccccttctggccgtgcttggcttgagtaactgtctctctttccccacccccatcacagggctttcagtttggcaaaggaaaagcagataaaaacagaacattccatatgtttctttctccatcggccaaaaacattttgacacaatgtttgtgaaacacctttggagaggtgcacttctgaatgctgcctctgccgtaaatcctggggcaagggatcagcctcttcccaggaaccatcgccttctataaaccgtgaactcaagcaggcattttttttttcttaccgaaaggctgctattgtgcaagggcacataatgggtctgttgctcttattggcttccaaatgtgcatggcaaagagagagatgtgggcctagagcagatatattcagcaaggtgacagcttcccataacaattctaacacttcttatcttatgtgagaataaaatatttaagggttgaaccttattttgccaaatgtatcttttctgcttttgaattgggcagaagattttagcaactatattctacaaatgttacttataacacacacacacacatctgaaatatatgccgaaaattgacgtctttgacctcagggagagcacctgtccaggtctgcctaaaggaaatggctccagtgggtctaaacaaccacatcctatccatggataggtctagtcataacactttagagagaatgtcagagcaggagggaggcaagccgcctcttctcggccatcgactgcagatgatgaaagagcgggattcaactttgttttcttttcctgtggccccagtgaaacctcctgccctccctgcacgtctgtgtcttcatttctaaaatgggggtgatgctttcatattgacctaaccccatactacctcacagatgtgttgtgaggattaataaaattatgtctatggtattttcagtttctggagaaaaatacttatagacagtttaactattacatagatatataagtgatctcagtttcttgtttgctgtgatactaatgtgttgttttaacttattccataaaatgacagttgtgtcctagccacatcagacagctatctaagctctggactacccctttgtgcagctgaatcactgcagggttgaccatgcctggtgccacagccatggtttccatttctagatgaaaggatggcctaggacataggtctcaaagactcttggatcagaatcaggagattagggaaaacaggatggatacctgagcactaacagcagtagacgtagacctctgtcctttaccatctgaggtcttctggattctttgtggggttaattttgatttgatgtcatctgtttgcccttcatcttgcttgcaagtgtgcatggttcaatccctcacatccaggaaatgaattttgcaattgggccagatgctaatttgcacgttgattcaccttctttgcctttaagccttttttttcttttttttttttttggcaaatgaatgtaccatttcaactttgattttaatagtgctagttgatattggtaataatgctaaccaagagatcaatgccagatttttctcttggggtaagttagctgaagtcatttaaagatggaaaggtgggaaaattctttgatatttgatgtcattgtatccacatttgttgtaagacatattgcataccaattataattatatcaattaaagttgataaaagcttc

SEQ ID NO: 388325 - DNA, 5079 bp, Homo sapiens
ggaactctaaagccaggttggtacattattaaaagccatgggccctgacatcacacatgatgattataatgtgaagagacgagactgagactataaagaaagaccaggagtgagctaacttgaatgataccaaggaagatgatataatatgaagtatatcctcatctggtaaagacagacagaactctgaagtggaaagagcacttgtcaagatatcaggagatgacggctttgtgagttctgtcactaaccagtatcacccttgaaggcagacattgtcctctcaagttacagatgaagaaatggaggagcagaatgctcaggatggagggtacagagtctgcctacatcagctcctttgtctgtttctcttccgacaaacattgtaccaccgaccaccatctggactagctctccacaaaacactgatgcagacactgcctccccatccaacggcactcacaacaactcggtgctcccagttacagcatcagccccaacatctctgcttcctaagaacatttccatagagtccagagaagaggagatcaccagcccaggttcgaattgggaaggcacaaacacagacccctcaccttctgggttctcgtcaacaagcggtggagtccacttaacaaccacgttggaggaacacagctcgggcactcctgaagcaggcgtggcagctacactgtcgcagtccgctgctgagcctcccacactcatctcccctcaagctccagcctcatcaccctcatccctatcaacctcaccacctgaggtcttttctgcctccgttactaccaaccatagctccactgtgaccagcacccaacccactggagctccaactgcaccagagtccccgacagaggagtccagctctgaccacacacccacttcacatgccacagctgagccagtaccccaggagaaaacacccccaacaactgtgtcaggcaaagtgatgtgtgagctcatagacatggagaccaccaccacctttcccagggtgatcatgcaggaagtagaacatgcattaagttcaggcagcatcgccgccattaccgtgacagtcattgccgtggtgctgctggtgtttggagttgcagcctacctaaaaatcaggcattcctcctatggaagacttttggacgaccatgactacgggtcctggggaaactacaacaaccctctgtacgatgactcctaacaatggaatatggcctgggatgaggattaactgttctttatttataagtgcttatccagtagaattaataagtacctgatgcgcattgaacgacaatcttaagccctgttttgttggtatggttgtttttgttttcctccctctcctctggctgctacaacttcccctttctggtacaagaagaaccattctttaaaggtgagtggaggctgatttgcagctgaagtgggccagccttgcaccagccaggccagaccaccatggtgaaggcttctttccccactgcaggacccactttgagaaggaccgaggaggaggatttgggttgttttgttaggggttactttcaggggaacatttcatttgtgttatttcttaaacttctatttaggaaattacattaagtattaatgaggggaaaggaaatgagctctacgaggatttcaccctgcatgggagagagcagggttttctcagattcctttttaatctctatttatctggttgtttctgacaggatgctgcctgcttggctctacaagctggaaagcagcttcttagctgcctaattaatgaaagatgaaaataggaagtgccctggagggggccagcaggtcacggggcagaatctctcaggttgctgtgggatctcagtgtgcccctacctgttctcccctccaggccacctgtctctgtaaaggatgtctgctctgttcaaaaggcagctgggatcccagcccacaagtgatcagcagagttgcatttccaaagaaaaaggctatgagatgagctgagttatagagagaaagggagaggcatgtacggtgtggggaagtggaagagaagctggcgggggagaaggaggctaacctgcactgagtacttcattaggacaagtgagaatcagctattgataatggccagagatatccacagcttggaggagcccagagaccgtttgctttatacccacacagcaactggtccactgctttactgtctgttggataatggctgtaaaatgtttaaaaacaaaacaaaacaaaaaagaggcactagtctatctgcaattactcaacgaggcattttcataggaaacagactatgattaatccatttattcttcccacacacttaccttactaagtctttgctttaataaatgagcaaccctgggtatagtcttaaaattctgcacaataaattttgagaaagaattgttcctctttgtaggtatctgtgtattgcaatcattctcaaccaggaggtgattttgccccctgactccaccccagggacattcaaaaatgtctggtgacagttttcattgtcatgacttgggggtgctactagaggccaggaatgctgccaaacattctaccatgcacagcacaacctacaacagcaaagaatcatccaccccaaaatatcagtagtgccgagattgagaaaccctgatttatcacaatgcccactgtgacagaacaagacactcacagattagtgatacgttttatttttaacaaaatgaaatgatgtgttaagtttttatttccaaagtgtttagtttattggctgatgggttgttcttggtatgcatggtgacctttttatttctgtgtgcttcctagagagctttatttcatggcgacaactctgtcttcttgtaacagctggtattagcaagcagcatcttatgtcctgatttcatatagtagaaaacaaacattgggtccgacttcaaaatgtgttgtattgtcctacagtgtcataaagaacctgaaaatgaacttttgtttctaaagttggaccttgctgccatgactgtttagtttacagaaacttgaccccggctcatcctgtctctggctgtggcccggcaaagcactgaaaacccctctggtctcagagacagtaggggcagtgccactttctacaacctgccaacccacacactggagtaattctgaaaaaaattattcctaaactctctaagtgtggacggagaatgagcaagccccagaagtattttacaaccagagtgggtaatgaggagggggcttactggaatcgtcatatctctgaatattgaaaacaacaactaaaaaagtggaccttctcagaaaaaaagggcagcaaatgaccaagggcgccccttctggccgtgcttggcttgagtaactgtctctctttccccacccccatcacagggctttcagtttggcaaaggaaaagcagataaaaacagaacattccatatgtttctttctccatcggccaaaaacattttgacacaatgtttgtgaaacacctttggagaggtgcacttctgaatgctgcctctgccgtaaatcctggggcaagggatcagcctcttcccaggaaccatcgccttctataaaccgtgaactcaagcaggcattttttttttcttaccgaaaggctgctattgtgcaagggcacataatgggtctgttgctcttattggcttccaaatgtgcatggcaaagagagagatgtgggcctagagcagatatattcagcaaggtgacagcttcccataacaattctaacacttcttatcttatgtgagaataaaatatttaagggttgaaccttattttgccaaatgtatcttttctgcttttgaattgggcagaagattttagcaactatattctacaaatgttacttataacacacacacacacatctgaaatatatgccgaaaattgacgtctttgacctcagggagagcacctgtccaggtctgcctaaaggaaatggctccagtgggtctaaacaaccacatcctatccatggataggtctagtcataacactttagagagaatgtcagagcaggagggaggcaagccgcctcttctcggccatcgactgcagatgatgaaagagcgggattcaactttgttttcttttcctgtggccccagtgaaacctcctgccctccctgcacgtctgtgtcttcatttctaaaatgggggtgatgctttcatattgacctaaccccatactacctcacagatgtgttgtgaggattaataaaattatgtctatggtattttcagtttctggagaaaaatacttatagacagtttaactattacatagatatataagtgatctcagtttcttgtttgctgtgatactaatgtgttgttttaacttattccataaaatgacagttgtgtcctagccacatcagacagctatctaagctctggactacccctttgtgcagctgaatcactgcagggttgaccatgcctggtgccacagccatggtttccatttctagatgaaaggatggcctaggacataggtctcaaagactcttggatcagaatcaggagattagggaaaacaggatggatacctgagcactaacagcagtagacgtagacctctgtcctttaccatctgaggtcttctggattctttgtggggttaattttgatttgatgtcatctgtttgcccttcatcttgcttgcaagtgtgcatggttcaatccctcacatccaggaaatgaattttgcaattgggccagatgctaatttgcacgttgattcaccttctttgcctttaagccttttttttcttttttttttttttggcaaatgaatgtaccatttcaactttgattttaatagtgctagttgatattggtaataatgctaaccaagagatcaatgccagatttttctcttggggtaagttagctgaagtcatttaaagatggaaaggtgggaaaattctttgatatttgatgtcattgtatccacatttgttgtaagacatattgcataccaattataattatatcaattaaagttgataaaagcttc

SEQ ID NO: 388326 - DNA, 4313 bp, Homo sapiens
ccccgggctcgggcggctgggatggagcagaagagcgcggagcaccggagggcacgcagctgacggagctgcgctgcgttcgcctcgtttgcctcgcgccctccactggagctgttcgcgcctcccggctcccaccgcagcccacccggcagaggagtcgctaccagcgcccagtgcgctctgtcagtccgcaaactccttgccgcccgccccgggctgggcaccaaataccaggctaccatggtctacaagactctcttcgctctttgcatcttaactgcaggcagcatcgccgccattaccgtgacagtcattgccgtggtgctgctggtgtttggagttgcagcctacctaaaaatcaggcattcctcctatggaagacttttggacgaccatgactacgggtcctggggaaactacaacaaccctctgtacgatgactcctaacaatggaatatggcctgggatgaggattaactgttctttatttataagtgcttatccagtagaattaataagtacctgatgcgcattgaacgacaatcttaagccctgttttgttggtatggttgtttttgttttcctccctctcctctggctgctacaacttcccctttctggtacaagaagaaccattctttaaaggtgagtggaggctgatttgcagctgaagtgggccagccttgcaccagccaggccagaccaccatggtgaaggcttctttccccactgcaggacccactttgagaaggaccgaggaggaggatttgggttgttttgttaggggttactttcaggggaacatttcatttgtgttatttcttaaacttctatttaggaaattacattaagtattaatgaggggaaaggaaatgagctctacgaggatttcaccctgcatgggagagagcagggttttctcagattcctttttaatctctatttatctggttgtttctgacaggatgctgcctgcttggctctacaagctggaaagcagcttcttagctgcctaattaatgaaagatgaaaataggaagtgccctggagggggccagcaggtcacggggcagaatctctcaggttgctgtgggatctcagtgtgcccctacctgttctcccctccaggccacctgtctctgtaaaggatgtctgctctgttcaaaaggcagctgggatcccagcccacaagtgatcagcagagttgcatttccaaagaaaaaggctatgagatgagctgagttatagagagaaagggagaggcatgtacggtgtggggaagtggaagagaagctggcgggggagaaggaggctaacctgcactgagtacttcattaggacaagtgagaatcagctattgataatggccagagatatccacagcttggaggagcccagagaccgtttgctttatacccacacagcaactggtccactgctttactgtctgttggataatggctgtaaaatgtttaaaaacaaaacaaaacaaaaaagaggcactagtctatctgcaattactcaacgaggcattttcataggaaacagactatgattaatccatttattcttcccacacacttaccttactaagtctttgctttaataaatgagcaaccctgggtatagtcttaaaattctgcacaataaattttgagaaagaattgttcctctttgtaggtatctgtgtattgcaatcattctcaaccaggaggtgattttgccccctgactccaccccagggacattcaaaaatgtctggtgacagttttcattgtcatgacttgggggtgctactagaggccaggaatgctgccaaacattctaccatgcacagcacaacctacaacagcaaagaatcatccaccccaaaatatcagtagtgccgagattgagaaaccctgatttatcacaatgcccactgtgacagaacaagacactcacagattagtgatacgttttatttttaacaaaatgaaatgatgtgttaagtttttatttccaaagtgtttagtttattggctgatgggttgttcttggtatgcatggtgacctttttatttctgtgtgcttcctagagagctttatttcatggcgacaactctgtcttcttgtaacagctggtattagcaagcagcatcttatgtcctgatttcatatagtagaaaacaaacattgggtccgacttcaaaatgtgttgtattgtcctacagtgtcataaagaacctgaaaatgaacttttgtttctaaagttggaccttgctgccatgactgtttagtttacagaaacttgaccccggctcatcctgtctctggctgtggcccggcaaagcactgaaaacccctctggtctcagagacagtaggggcagtgccactttctacaacctgccaacccacacactggagtaattctgaaaaaaattattcctaaactctctaagtgtggacggagaatgagcaagccccagaagtattttacaaccagagtgggtaatgaggagggggcttactggaatcgtcatatctctgaatattgaaaacaacaactaaaaaagtggaccttctcagaaaaaaagggcagcaaatgaccaagggcgccccttctggccgtgcttggcttgagtaactgtctctctttccccacccccatcacagggctttcagtttggcaaaggaaaagcagataaaaacagaacattccatatgtttctttctccatcggccaaaaacattttgacacaatgtttgtgaaacacctttggagaggtgcacttctgaatgctgcctctgccgtaaatcctggggcaagggatcagcctcttcccaggaaccatcgccttctataaaccgtgaactcaagcaggcattttttttttcttaccgaaaggctgctattgtgcaagggcacataatgggtctgttgctcttattggcttccaaatgtgcatggcaaagagagagatgtgggcctagagcagatatattcagcaaggtgacagcttcccataacaattctaacacttcttatcttatgtgagaataaaatatttaagggttgaaccttattttgccaaatgtatcttttctgcttttgaattgggcagaagattttagcaactatattctacaaatgttacttataacacacacacacacatctgaaatatatgccgaaaattgacgtctttgacctcagggagagcacctgtccaggtctgcctaaaggaaatggctccagtgggtctaaacaaccacatcctatccatggataggtctagtcataacactttagagagaatgtcagagcaggagggaggcaagccgcctcttctcggccatcgactgcagatgatgaaagagcgggattcaactttgttttcttttcctgtggccccagtgaaacctcctgccctccctgcacgtctgtgtcttcatttctaaaatgggggtgatgctttcatattgacctaaccccatactacctcacagatgtgttgtgaggattaataaaattatgtctatggtattttcagtttctggagaaaaatacttatagacagtttaactattacatagatatataagtgatctcagtttcttgtttgctgtgatactaatgtgttgttttaacttattccataaaatgacagttgtgtcctagccacatcagacagctatctaagctctggactacccctttgtgcagctgaatcactgcagggttgaccatgcctggtgccacagccatggtttccatttctagatgaaaggatggcctaggacataggtctcaaagactcttggatcagaatcaggagattagggaaaacaggatggatacctgagcactaacagcagtagacgtagacctctgtcctttaccatctgaggtcttctggattctttgtggggttaattttgatttgatgtcatctgtttgcccttcatcttgcttgcaagtgtgcatggttcaatccctcacatccaggaaatgaattttgcaattgggccagatgctaatttgcacgttgattcaccttctttgcctttaagccttttttttcttttttttttttttggcaaatgaatgtaccatttcaactttgattttaatagtgctagttgatattggtaataatgctaaccaagagatcaatgccagatttttctcttggggtaagttagctgaagtcatttaaagatggaaaggtgggaaaattctttgatatttgatgtcattgtatccacatttgttgtaagacatattgcataccaattataattatatcaattaaagttgataaaagcttc

SEQ ID NO: 388327 - DNA, 3539 bp, Homo sapiens
cggtaccccctcctaccccacgggggaacatttcatttgtgttatttcttaaacttctatttaggaaattacattaagtattaatgaggggaaaggaaatgagctctacgaggatttcaccctgcatgggagagagcagggttttctcagattcctttttaatctctatttatctggttgtttctgacaggatgctgcctgcttggctctacaagctggaaagcagcttcttagctgcctaattaatgaaagatgaaaataggaagtgccctggagggggccagcaggtcacggggcagaatctctcaggttgctgtgggatctcagtgtgcccctacctgttctcccctccaggccacctgtctctgtaaaggatgtctgctctgttcaaaaggcagctgggatcccagcccacaagtgatcagcagagttgcatttccaaagaaaaaggctatgagatgagctgagttatagagagaaagggagaggcatgtacggtgtggggaagtggaagagaagctggcgggggagaaggaggctaacctgcactgagtacttcattaggacaagtgagaatcagctattgataatggccagagatatccacagcttggaggagcccagagaccgtttgctttatacccacacagcaactggtccactgctttactgtctgttggataatggctgtaaaatgtttaaaaacaaaacaaaacaaaaaagaggcactagtctatctgcaattactcaacgaggcattttcataggaaacagactatgattaatccatttattcttcccacacacttaccttactaagtctttgctttaataaatgagcaaccctgggtatagtcttaaaattctgcacaataaattttgagaaagaattgttcctctttgtaggtatctgtgtattgcaatcattctcaaccaggaggtgattttgccccctgactccaccccagggacattcaaaaatgtctggtgacagttttcattgtcatgacttgggggtgctactagaggccaggaatgctgccaaacattctaccatgcacagcacaacctacaacagcaaagaatcatccaccccaaaatatcagtagtgccgagattgagaaaccctgatttatcacaatgcccactgtgacagaacaagacactcacagattagtgatacgttttatttttaacaaaatgaaatgatgtgttaagtttttatttccaaagtgtttagtttattggctgatgggttgttcttggtatgcatggtgacctttttatttctgtgtgcttcctagagagctttatttcatggcgacaactctgtcttcttgtaacagctggtattagcaagcagcatcttatgtcctgatttcatatagtagaaaacaaacattgggtccgacttcaaaatgtgttgtattgtcctacagtgtcataaagaacctgaaaatgaacttttgtttctaaagttggaccttgctgccatgactgtttagtttacagaaacttgaccccggctcatcctgtctctggctgtggcccggcaaagcactgaaaacccctctggtctcagagacagtaggggcagtgccactttctacaacctgccaacccacacactggagtaattctgaaaaaaattattcctaaactctctaagtgtggacggagaatgagcaagccccagaagtattttacaaccagagtgggtaatgaggagggggcttactggaatcgtcatatctctgaatattgaaaacaacaactaaaaaagtggaccttctcagaaaaaaagggcagcaaatgaccaagggcgccccttctggccgtgcttggcttgagtaactgtctctctttccccacccccatcacagggctttcagtttggcaaaggaaaagcagataaaaacagaacattccatatgtttctttctccatcggccaaaaacattttgacacaatgtttgtgaaacacctttggagaggtgcacttctgaatgctgcctctgccgtaaatcctggggcaagggatcagcctcttcccaggaaccatcgccttctataaaccgtgaactcaagcaggcattttttttttcttaccgaaaggctgctattgtgcaagggcacataatgggtctgttgctcttattggcttccaaatgtgcatggcaaagagagagatgtgggcctagagcagatatattcagcaaggtgacagcttcccataacaattctaacacttcttatcttatgtgagaataaaatatttaagggttgaaccttattttgccaaatgtatcttttctgcttttgaattgggcagaagattttagcaactatattctacaaatgttacttataacacacacacacacatctgaaatatatgccgaaaattgacgtctttgacctcagggagagcacctgtccaggtctgcctaaaggaaatggctccagtgggtctaaacaaccacatcctatccatggataggtctagtcataacactttagagagaatgtcagagcaggagggaggcaagccgcctcttctcggccatcgactgcagatgatgaaagagcgggattcaactttgttttcttttcctgtggccccagtgaaacctcctgccctccctgcacgtctgtgtcttcatttctaaaatgggggtgatgctttcatattgacctaaccccatactacctcacagatgtgttgtgaggattaataaaattatgtctatggtattttcagtttctggagaaaaatacttatagacagtttaactattacatagatatataagtgatctcagtttcttgtttgctgtgatactaatgtgttgttttaacttattccataaaatgacagttgtgtcctagccacatcagacagctatctaagctctggactacccctttgtgcagctgaatcactgcagggttgaccatgcctggtgccacagccatggtttccatttctagatgaaaggatggcctaggacataggtctcaaagactcttggatcagaatcaggagattagggaaaacaggatggatacctgagcactaacagcagtagacgtagacctctgtcctttaccatctgaggtcttctggattctttgtggggttaattttgatttgatgtcatctgtttgcccttcatcttgcttgcaagtgtgcatggttcaatccctcacatccaggaaatgaattttgcaattgggccagatgctaatttgcacgttgattcaccttctttgcctttaagccttttttttcttttttttttttttggcaaatgaatgtaccatttcaactttgattttaatagtgctagttgatattggtaataatgctaaccaagagatcaatgccagatttttctcttggggtaagttagctgaagtcatttaaagatggaaaggtgggaaaattctttgatatttgatgtcattgtatccacatttgttgtaagacatattgcataccaattataattatatcaattaaagttgataaaagcttc

SEQ ID NO: 388328 - DNA, 3051 bp, Homo sapiens
ggcgtctgaggatccccccaaggatgagaagctggcgggggagaaggaggctaacctgcactgagtacttcattaggacaagtgagaatcagctattgataatggccagagatatccacagcttggaggagcccagagaccgtttgctttatacccacacagcaactggtccactgctttactgtctgttggataatggctgtaaaatgtttaaaaacaaaacaaaacaaaaaagaggcactagtctatctgcaattactcaacgaggcattttcataggaaacagactatgattaatccatttattcttcccacacacttaccttactaagtctttgctttaataaatgagcaaccctgggtatagtcttaaaattctgcacaataaattttgagaaagaattgttcctctttgtaggtatctgtgtattgcaatcattctcaaccaggaggtgattttgccccctgactccaccccagggacattcaaaaatgtctggtgacagttttcattgtcatgacttgggggtgctactagaggccaggaatgctgccaaacattctaccatgcacagcacaacctacaacagcaaagaatcatccaccccaaaatatcagtagtgccgagattgagaaaccctgatttatcacaatgcccactgtgacagaacaagacactcacagattagtgatacgttttatttttaacaaaatgaaatgatgtgttaagtttttatttccaaagtgtttagtttattggctgatgggttgttcttggtatgcatggtgacctttttatttctgtgtgcttcctagagagctttatttcatggcgacaactctgtcttcttgtaacagctggtattagcaagcagcatcttatgtcctgatttcatatagtagaaaacaaacattgggtccgacttcaaaatgtgttgtattgtcctacagtgtcataaagaacctgaaaatgaacttttgtttctaaagttggaccttgctgccatgactgtttagtttacagaaacttgaccccggctcatcctgtctctggctgtggcccggcaaagcactgaaaacccctctggtctcagagacagtaggggcagtgccactttctacaacctgccaacccacacactggagtaattctgaaaaaaattattcctaaactctctaagtgtggacggagaatgagcaagccccagaagtattttacaaccagagtgggtaatgaggagggggcttactggaatcgtcatatctctgaatattgaaaacaacaactaaaaaagtggaccttctcagaaaaaaagggcagcaaatgaccaagggcgccccttctggccgtgcttggcttgagtaactgtctctctttccccacccccatcacagggctttcagtttggcaaaggaaaagcagataaaaacagaacattccatatgtttctttctccatcggccaaaaacattttgacacaatgtttgtgaaacacctttggagaggtgcacttctgaatgctgcctctgccgtaaatcctggggcaagggatcagcctcttcccaggaaccatcgccttctataaaccgtgaactcaagcaggcattttttttttcttaccgaaaggctgctattgtgcaagggcacataatgggtctgttgctcttattggcttccaaatgtgcatggcaaagagagagatgtgggcctagagcagatatattcagcaaggtgacagcttcccataacaattctaacacttcttatcttatgtgagaataaaatatttaagggttgaaccttattttgccaaatgtatcttttctgcttttgaattgggcagaagattttagcaactatattctacaaatgttacttataacacacacacacacatctgaaatatatgccgaaaattgacgtctttgacctcagggagagcacctgtccaggtctgcctaaaggaaatggctccagtgggtctaaacaaccacatcctatccatggataggtctagtcataacactttagagagaatgtcagagcaggagggaggcaagccgcctcttctcggccatcgactgcagatgatgaaagagcgggattcaactttgttttcttttcctgtggccccagtgaaacctcctgccctccctgcacgtctgtgtcttcatttctaaaatgggggtgatgctttcatattgacctaaccccatactacctcacagatgtgttgtgaggattaataaaattatgtctatggtattttcagtttctggagaaaaatacttatagacagtttaactattacatagatatataagtgatctcagtttcttgtttgctgtgatactaatgtgttgttttaacttattccataaaatgacagttgtgtcctagccacatcagacagctatctaagctctggactacccctttgtgcagctgaatcactgcagggttgaccatgcctggtgccacagccatggtttccatttctagatgaaaggatggcctaggacataggtctcaaagactcttggatcagaatcaggagattagggaaaacaggatggatacctgagcactaacagcagtagacgtagacctctgtcctttaccatctgaggtcttctggattctttgtggggttaattttgatttgatgtcatctgtttgcccttcatcttgcttgcaagtgtgcatggttcaatccctcacatccaggaaatgaattttgcaattgggccagatgctaatttgcacgttgattcaccttctttgcctttaagccttttttttcttttttttttttttggcaaatgaatgtaccatttcaactttgattttaatagtgctagttgatattggtaataatgctaaccaagagatcaatgccagatttttctcttggggtaagttagctgaagtcatttaaagatggaaaggtgggaaaattctttgatatttgatgtcattgtatccacatttgttgtaagacatattgcataccaattataattatatcaattaaagttgataaaagcttc

SEQ ID NO: 388329 - DNA, 1105 bp, Homo sapiens
ttagagtatcctaccctcctaccccacgccagtgggtctaaacaaccacatcctatccatggataggtctagtcataacactttagagagaatgtcagagcaggagggaggcaagccgcctcttctcggccatcgactgcagatgatgaaagagcgggattcaactttgttttcttttcctgtggccccagtgaaacctcctgccctccctgcacgtctgtgtcttcatttctaaaatgggggtgatgctttcatattgacctaaccccatactacctcacagatgtgttgtgaggattaataaaattatgtctatggtattttcagtttctggagaaaaatacttatagacagtttaactattacatagatatataagtgatctcagtttcttgtttgctgtgatactaatgtgttgttttaacttattccataaaatgacagttgtgtcctagccacatcagacagctatctaagctctggactacccctttgtgcagctgaatcactgcagggttgaccatgcctggtgccacagccatggtttccatttctagatgaaaggatggcctaggacataggtctcaaagactcttggatcagaatcaggagattagggaaaacaggatggatacctgagcactaacagcagtagacgtagacctctgtcctttaccatctgaggtcttctggattctttgtggggttaattttgatttgatgtcatctgtttgcccttcatcttgcttgcaagtgtgcatggttcaatccctcacatccaggaaatgaattttgcaattgggccagatgctaatttgcacgttgattcaccttctttgcctttaagccttttttttcttttttttttttttggcaaatgaatgtaccatttcaactttgattttaatagtgctagttgatattggtaataatgctaaccaagagatcaatgccagatttttctcttggggtaagttagctgaagtcatttaaagatggaaaggtgggaaaattctttgatatttgatgtcattgtatccacatttgttgtaagacatattgcataccaattataattatatcaattaaagttgataaaagcttc

SEQ ID NO: 388330 - DNA, 881 bp, Homo sapiens
  misc_feature (29)..(29): n is a, c, g, or t
gcggcagcgtgctccgggcgtctagaggnccccagacctaaccccatactacctcacagatgtgttgtgaggattaataaaattatgtctatggtattttcagtttctggagaaaaatacttatagacagtttaactattacatagatatataagtgatctcagtttcttgtttgctgtgatactaatgtgttgttttaacttattccataaaatgacagttgtgtcctagccacatcagacagctatctaagctctggactacccctttgtgcagctgaatcactgcagggttgaccatgcctggtgccacagccatggtttccatttctagatgaaaggatggcctaggacataggtctcaaagactcttggatcagaatcaggagattagggaaaacaggatggatacctgagcactaacagcagtagacgtagacctctgtcctttaccatctgaggtcttctggattctttgtggggttaattttgatttgatgtcatctgtttgcccttcatcttgcttgcaagtgtgcatggttcaatccctcacatccaggaaatgaattttgcaattgggccagatgctaatttgcacgttgattcaccttctttgcctttaagccttttttttcttttttttttttttggcaaatgaatgtaccatttcaactttgattttaatagtgctagttgatattggtaataatgctaaccaagagatcaatgccagatttttctcttggggtaagttagctgaagtcatttaaagatggaaaggtgggaaaattctttgatatttgatgtcattgtatccacatttgttgtaagacatattgcataccaattataattatatcaattaaagttgataaaagcttc

SEQ ID NO: 388331 - DNA, 2288 bp, Homo sapiens
  misc_feature (2238)..(2238): n is a, c, g, or t
  misc_feature (2241)..(2241): n is a, c, g, or t
  misc_feature (2243)..(2244): n is a, c, g, or t
  misc_feature (2276)..(2278): n is a, c, g, or t
ccccgggctcgggcggctgggatggagcagaagagcgcggagcaccggagggcacgcagctgacggagctgcgctgcgttcgcctcgtttgcctcgcgccctccactggagctgttcgcgcctcccggctcccaccgcagcccacccggcagaggagtcgctaccagcgcccagtgcgctctgtcagtccgcaaactccttgccgcccgccccgggctgggcaccaaataccaggctaccatggtctacaagactctcttcgctctttgcatcttaactgcaggatggagggtacagagtctgcctacatcagctcctttgtctgtttctcttccgacaaacattgtaccaccgaccaccatctggactagctctccacaaaacactgatgcagacactgcctccccatccaacggcactcacaacaactcggtgctcccagttacagcatcagccccaacatctctgcttcctaagaacatttccatagagtccagagaagaggagatcaccagcccaggttcgaattgggaaggcacaaacacagacccctcaccttctgggttctcgtcaacaagcggtggagtccacttaacaaccacgttggaggaacacagctcgggcactcctgaagcaggcgtggcagctacactgtcgcagtccgctgctgagcctcccacactcatctcccctcaagctccagcctcatcaccctcatccctatcaacctcaccacctgaggtcttttctgcctccgttactaccaaccatagctccactgtgaccagcacccaacccactggagctccaactgcaccagagtccccgacagaggagtccagctctgaccacacacccacttcacatgccacagctgagccagtaccccaggagaaaacacccccaacaactgtgtcaggcaaagtgatgtgtgagctcatagacatggagaccaccaccacctttcccagggtgatcatgcaggaagtagaacatgcattaagttcaggcagcatcgccgccattaccgtgacagtcattgccgtggtgctgctggtgtttggagttgcagcctacctaaaaatcaggcattcctcctatggaagacttttggacgaccatgactacgggtcctggggaaactacaacaaccctctgtacgatgactcctaacaatggaatatggcctgggatgaggattaactgttctttatttataagtgcttatccagtagaattaataagtacctgatgcgcattgaacgacaatcttaagccctgttttgttggtatggttgtttttgttttcctccctctcctctggctgctacaacttcccctttctggtacaagaagaaccattctttaaaggtgagtggaggctgatttgcagctgaagtgggccagccttgcaccagccaggccagaccaccatggtgaaggcttctttccccactgcaggacccactttgagaaggaccgaggaggaggatttgggttgttttgttaggggttactttcaggggaacatttcatttgtgttatttcttaaacttctatttaggaaattacattaagtattaatgaggggaaaggaaatgagctctacgaggatttcaccctgcatgggagagagcagggttttctcagattcctttttaatctctatttatctggttgtttctgacaggatgctgcctgcttggctctacaagctggaaagcagcttcttagctgcctaattaatgaaagatgaaaataggaagtgccctggagggggccagcaggtcacggggcagaatctctcaggttgctgtgggatctcagtgtgcccctacctgttctcccctccaggccacctgtctctgtaaaggatgtctgctctgttcaaaaggcagctgggatcccagcccacaagtgatcagcagagttgcatttccaaagaaaaaggctatgagatgagctgagttatagagagaaagggagaggcatgtacggtgtggggaagtggaagagaagctggcgggggagaaggaggctaacctgcactgagtacttcattaggacaagtgagaatcagctattgataatggccagagatatccacagcttggaggagcccagagaccgtttgctttatacccacacagcaactggtccactgctttactgtctgttggataatggctgtgtagtgaataaaagccgttctaaggaaaagaggcacttgcggccgcnagntnnttgcctgtagttacggctacattgttatgttnnntccgggattt

SEQ ID NO: 388332 - DNA, 946 bp, Homo sapiens
ccccgggctcgggcggctgggatggagcagaagagcgcggagcaccggagggcacgcagctgacggagctgcgctgcgttcgcctcgtttgcctcgcgccctccactggagctgttcgcgcctcccggctcccaccgcagcccacccggcagaggagtcgctaccagcgcccagtgcgctctgtcagtccgcaaactccttgccgcccgccccgggctgggcaccaaataccaggctaccatggtctacaagactctcttcgctctttgcatcttaactgcaggatggagggtacagagtctgcctacatcagctcctttgtctgtttctcttccgacaaacattgtaccaccgaccaccatctggactagctctccacaaaacactgatgcagacactgcctccccatccaacggcactcacaacaactcggtgctcccagttacagcatcagccccaacatctctgcttcctaagaacatttccatagagtccagagaagaggagatcaccagcccaggttcgaattgggaaggcacaaacacagacccctcaccttctgggttctcgtcaacaagcggtggagtccacttaacaaccacgttggaggaacacagctcgggcactcctgaagcaggcgtggcagctacactgtcgcagtccgctgctgagcctcccacactcatctcccctcaagctccagcctcatcaccctcatccctatcaacctcaccacctgaggtcttttctgcctccgttactaccaaccatagctccactgtgaccagcacccaacccactggagctccaactgcaccagagtccccgacagaggagtccagctctgaccacacacccacttcacatgccacagctgagccagtaccccaggagaaaacccaaatgtgttggcggtgtggcgctcgctgggcccccccttccgggg

SEQ ID NO: 388333 - DNA, 4985 bp, Homo sapiens
ccccgggctcgggcggctgggatggagcagaagagcgcggagcaccggagggcacgcagctgacggagctgcgctgcgttcgcctcgtttgcctcgcgccctccactggagctgttcgcgcctcccggctcccaccgcagcccacccggcagaggagtcgctaccagcgcccagtgcgctctgtcagtccgcaaactccttgccgcccgccccgggctgggcaccaaataccaggctaccatggtctacaagactctcttcgctctttgcatcttaactgcaggatggagggtacagagtctgcctacatcagctcctttgtctgtttctcttccgacaaacattgtaccaccgaccaccatctggactagctctccacaaaacactgatgcagacactgcctccccatccaacggcactcacaacaactcggtgctcccagttacagcatcagccccaacatctctgcttcctaagaacatttccatagagtccagagaagaggagatcaccagcccaggttcgaattgggaaggcacaaacacagacccctcaccttctgggttctcgtcaacaagcggtggagtccacttaacaaccacgttggaggaacacagctcgggcactcctgaagcaggcgtggcagctacactgtcgcagtccgctgctgagcctcccacactcatctcccctcaagctccagcctcatcaccctcatccctatcaacctcaccacctgaggtcttttctgcctccgttactaccaaccatagctccactgtgaccagcacccaacccactggagctccaactgcaccagagtccccgacagaggagtccagctctgaccacacacccacttcacatgccacagctgagccagtaccccaggagaaaacacccccaacaactgtgtcaggcaaagtgatgtgtgagctcatagacatggagaccaccaccacctttcccagggtgatcatgcaggaagtagaacatgcattaagttcaggcagcatcgccgccattaccgtgacagtcattgccgtggtgctgctggtgtttggagttgcagcctacctaaaaatcaggcattcctcctatggaagacttttggacgaccatgactacgggtcctggggaaactacaacaaccctctgtacgatgactcctaacaatggaatatggcctgggatgaggattaactgttctttatttataagtgcttatccagtagaattaataagtacctgatgcgcattgaacgacaatcttaagccctgttttgttggtatggttgtttttgttttcctccctctcctctggctgctacaacttcccctttctggtacaagaagaaccattctttaaaggtgagtggaggctgatttgcagctgaagtgggccagccttgcaccagccaggccagaccaccatggtgaaggcttctttccccactgcaggacccactttgagaaggaccgaggaggaggatttgggttgttttgttaggggttactttcaggggaacatttcatttgtgttatttcttaaacttctatttaggaaattacattaagtattaatgaggggaaaggaaatgagctctacgaggatttcaccctgcatgggagagagcagggttttctcagattcctttttaatctctatttatctggttgtttctgacaggatgctgcctgcttggctctacaagctggaaagcagcttcttagctgcctaattaatgaaagatgaaaataggaagtgccctggagggggccagcaggtcacggggcagaatctctcaggttgctgtgggatctcagtgtgcccctacctgttctcccctccaggccacctgtctctgtaaaggatgtctgctctgttcaaaaggcagctgggatcccagcccacaagtgatcagcagagttgcatttccaaagaaaaaggctatgagatgagctgagttatagagagaaagggagaggcatgtacggtgtggggaagtggaagagaagctggcgggggagaaggaggctaacctgcactgagtacttcattaggacaagtgagaatcagctattgataatggccagagatatccacagcttggaggagcccagagaccgtttgctttatacccacacagcaactggtccactgctttactgtctgttggataatggctgtaaaatgtttaaaaacaaaacaaaacaaaaaagaggcactagtctatctgcaattactcaacgaggcattttcataggaaacagactatgattaatccatttattcttcccacacacttaccttactaagtctttgctttaataaatgagcaaccctgggtatagtcttaaaattctgcacaataaattttgagaaagaattgttcctctttgtaggtatctgtgtattgcaatcattctcaaccaggaggtgattttgccccctgactccaccccagggacattcaaaaatgtctggtgacagttttcattgtcatgacttgggggtgctactagaggccaggaatgctgccaaacattctaccatgcacagcacaacctacaacagcaaagaatcatccaccccaaaatatcagtagtgccgagattgagaaaccctgatttatcacaatgcccactgtgacagaacaagacactcacagattagtgatacgttttatttttaacaaaatgaaatgatgtgttaagtttttatttccaaagtgtttagtttattggctgatgggttgttcttggtatgcatggtgacctttttatttctgtgtgcttcctagagagctttatttcatggcgacaactctgtcttcttgtaacagctggtattagcaagcagcatcttatgtcctgatttcatatagtagaaaacaaacattgggtccgacttcaaaatgtgttgtattgtcctacagtgtcataaagaacctgaaaatgaacttttgtttctaaagttggaccttgctgccatgactgtttagtttacagaaacttgaccccggctcatcctgtctctggctgtggcccggcaaagcactgaaaacccctctggtctcagagacagtaggggcagtgccactttctacaacctgccaacccacacactggagtaattctgaaaaaaattattcctaaactctctaagtgtggacggagaatgagcaagccccagaagtattttacaaccagagtgggtaatgaggagggggcttactggaatcgtcatatctctgaatattgaaaacaacaactaaaaaagtggaccttctcagaaaaaaagggcagcaaatgaccaagggcgccccttctggccgtgcttggcttgagtaactgtctctctttccccacccccatcacagggctttcagtttggcaaaggaaaagcagataaaaacagaacattccatatgtttctttctccatcggccaaaaacattttgacacaatgtttgtgaaacacctttggagaggtgcacttctgaatgctgcctctgccgtaaatcctggggcaagggatcagcctcttcccaggaaccatcgccttctataaaccgtgaactcaagcaggcattttttttttcttaccgaaaggctgctattgtgcaagggcacataatgggtctgttgctcttattggcttccaaatgtgcatggcaaagagagagatgtgggcctagagcagatatattcagcaaggtgacagcttcccataacaattctaacacttcttatcttatgtgagaataaaatatttaagggttgaaccttattttgccaaatgtatcttttctgcttttgaattgggcagaagattttagcaactatattctacaaatgttacttataacacacacacacacatctgaaatatatgccgaaaattgacgtctttgacctcagggagagcacctgtccaggtctgcctaaaggaaatggctccagtgggtctaaacaaccacatcctatccatggataggtctagtcataacactttagagagaatgtcagagcaggagggaggcaagccgcctcttctcggccatcgactgcagatgatgaaagagcgggattcaactttgttttcttttcctgtggccccagtgaaacctcctgccctccctgcacgtctgtgtcttcatttctaaaatgggggtgatgctttcatattgacctaaccccatactacctcacagatgtgttgtgaggattaataaaattatgtctatggtattttcagtttctggagaaaaatacttatagacagtttaactattacatagatatataagtgatctcagtttcttgtttgctgtgatactaatgtgttgttttaacttattccataaaatgacagttgtgtcctagccacatcagacagctatctaagctctggactacccctttgtgcagctgaatcactgcagggttgaccatgcctggtgccacagccatggtttccatttctagatgaaaggatggcctaggacataggtctcaaagactcttggatcagaatcaggagattagggtaccatctgaggtcttctggattctttgtggggttaattttgatttgatgtcatctgtttgcccttcatcttgcttgcaagtgtgcatggttcaatccctcacatccaggaaatgaattttgcaattgggccagatgctaatttgcacgttgattcaccttctttgcctttaagccttttttttcttttttttttttttggcaaatgaatgtaccatttcaactttgattttaatagtgctagttgatattggtaataatgctaaccaagagatcaatgccagatttttctcttggggtaagttagctgaagtcatttaaagatggaaaggtgggaaaattctttgatatttgatgtcattgtatccacatttgttgtaagacatattgcataccaattataattatatcaattaaagttgataaaagcttc

SEQ ID NO: 388334 - DNA, 4958 bp, Homo sapiens
acgtcaccgctacatatgtagcttgctctcatcatctccaaactttttacatttgcttagctgacacagcttctcatccactctatctgcaataccagctcatcccattaccaataaatcttttctacatcctcaacctcatctcccaatattcttcccacctccttaccaagactctcttcgctctttgcatcttaactgcgatggagggtacagagtctgcctacatcagctcctttgtctgtttctcttccgacaaacattgtaccaccgaccaccatctggactagctctccacaaaacactgatgcagacactgcctccccatccaacggcactcacaacaactcggtgctcccagttacagcatcagccccaacatctctgcttcctaagaacatttccatagagtccagagaagaggagatcaccagcccaggttcgaattgggaaggcacaaacacagacccctcaccttctgggttctcgtcaacaagcggtggagtccacttaacaaccacgttggaggaacacagctcgggcactcctgaagcaggcgtggcagctacactgtcgcagtccgctgctgagcctcccacactcatctcccctcaagctccagcctcatcaccctcatccctatcaacctcaccacctgaggtcttttctgcctccgttactaccaaccatagctccactgtgaccagcacccaacccactggagctccaactgcaccagagtccccgacagaggagtccagctctgaccacacacccacttcacatgccacagctgagccagtaccccaggagaaaacacccccaacaactgtgtcaggcaaagtgatgtgtgagctcatagacatggagaccaccaccacctttcccagggtgatcatgcaggaagtagaacatgcattaagttcaggcagcatcgccgccattaccgtgacagtcattgccgtggtgctgctggtgtttggagttgcagcctacctaaaaatcaggcattcctcctatggaagacttttggacgaccatgactacgggtcctggggaaactacaacaaccctctgtacgatgactcctaacaatggaatatggcctgggatgaggattaactgttctttatttataagtgcttatccagtagaattaataagtacctgatgcgcattgaacgacaatcttaagccctgttttgttggtatggttgtttttgttttcctccctctcctctggctgctacaacttcccctttctggtacaagaagaaccattctttaaaggtgagtggaggctgatttgcagctgaagtgggccagccttgcaccagccaggccagaccaccatggtgaaggcttctttccccactgcaggacccactttgagaaggaccgaggaggaggatttgggttgttttgttaggggttactttcaggggaacatttcatttgtgttatttcttaaacttctatttaggaaattacattaagtattaatgaggggaaaggaaatgagctctacgaggatttcaccctgcatgggagagagcagggttttctcagattcctttttaatctctatttatctggttgtttctgacaggatgctgcctgcttggctctacaagctggaaagcagcttcttagctgcctaattaatgaaagatgaaaataggaagtgccctggagggggccagcaggtcacggggcagaatctctcaggttgctgtgggatctcagtgtgcccctacctgttctcccctccaggccacctgtctctgtaaaggatgtctgctctgttcaaaaggcagctgggatcccagcccacaagtgatcagcagagttgcatttccaaagaaaaaggctatgagatgagctgagttatagagagaaagggagaggcatgtacggtgtggggaagtggaagagaagctggcgggggagaaggaggctaacctgcactgagtacttcattaggacaagtgagaatcagctattgataatggccagagatatccacagcttggaggagcccagagaccgtttgctttatacccacacagcaactggtccactgctttactgtctgttggataatggctgtaaaatgtttaaaaacaaaacaaaacaaaaaagaggcactagtctatctgcaattactcaacgaggcattttcataggaaacagactatgattaatccatttattcttcccacacacttaccttactaagtctttgctttaataaatgagcaaccctgggtatagtcttaaaattctgcacaataaattttgagaaagaattgttcctctttgtaggtatctgtgtattgcaatcattctcaaccaggaggtgattttgccccctgactccaccccagggacattcaaaaatgtctggtgacagttttcattgtcatgacttgggggtgctactagaggccaggaatgctgccaaacattctaccatgcacagcacaacctacaacagcaaagaatcatccaccccaaaatatcagtagtgccgagattgagaaaccctgatttatcacaatgcccactgtgacagaacaagacactcacagattagtgatacgttttatttttaacaaaatgaaatgatgtgttaagtttttatttccaaagtgtttagtttattggctgatgggttgttcttggtatgcatggtgacctttttatttctgtgtgcttcctagagagctttatttcatggcgacaactctgtcttcttgtaacagctggtattagcaagcagcatcttatgtcctgatttcatatagtagaaaacaaacattgggtccgacttcaaaatgtgttgtattgtcctacagtgtcataaagaacctgaaaatgaacttttgtttctaaagttggaccttgctgccatgactgtttagtttacagaaacttgaccccggctcatcctgtctctggctgtggcccggcaaagcactgaaaacccctctggtctcagagacagtaggggcagtgccactttctacaacctgccaacccacacactggagtaattctgaaaaaaattattcctaaactctctaagtgtggacggagaatgagcaagccccagaagtattttacaaccagagtgggtaatgaggagggggcttactggaatcgtcatatctctgaatattgaaaacaacaactaaaaaagtggaccttctcagaaaaaaagggcagcaaatgaccaagggcgccccttctggccgtgcttggcttgagtaactgtctctctttccccacccccatcacagggctttcagtttggcaaaggaaaagcagataaaaacagaacattccatatgtttctttctccatcggccaaaaacattttgacacaatgtttgtgaaacacctttggagaggtgcacttctgaatgctgcctctgccgtaaatcctggggcaagggatcagcctcttcccaggaaccatcgccttctataaaccgtgaactcaagcaggcattttttttttcttaccgaaaggctgctattgtgcaagggcacataatgggtctgttgctcttattggcttccaaatgtgcatggcaaagagagagatgtgggcctagagcagatatattcagcaaggtgacagcttcccataacaattctaacacttcttatcttatgtgagaataaaatatttaagggttgaaccttattttgccaaatgtatcttttctgcttttgaattgggcagaagattttagcaactatattctacaaatgttacttataacacacacacacacatctgaaatatatgccgaaaattgacgtctttgacctcagggagagcacctgtccaggtctgcctaaaggaaatggctccagtgggtctaaacaaccacatcctatccatggataggtctagtcataacactttagagagaatgtcagagcaggagggaggcaagccgcctcttctcggccatcgactgcagatgatgaaagagcgggattcaactttgttttcttttcctgtggccccagtgaaacctcctgccctccctgcacgtctgtgtcttcatttctaaaatgggggtgatgctttcatattgacctaaccccatactacctcacagatgtgttgtgaggattaataaaattatgtctatggtattttcagtttctggagaaaaatacttatagacagtttaactattacatagatatataagtgatctcagtttcttgtttgctgtgatactaatgtgttgttttaacttattccataaaatgacagttgtgtcctagccacatcagacagctatctaagctctggactacccctttgtgcagctgaatcactgcagggttgaccatgcctggtgccacagccatggtttccatttctagatgaaaggatggcctaggacataggtctcaaagactcttggatcagaatcaggagattagggaaaacaggatggatacctgagcactaacagcagtagacgtagacctctgtcctttaccatctgaggtcttctggattctttgtggggttaattttgatttgatgtcatctgtttgcccttcatcttgcttgcaagtgtgcatggttcaatccctcacatccaggaaatgaattttgcaattgggccagatgctaatttgcacgttgattcaccttctttgcctttaagccttttttttcttttttttttttttggcaaatgaatgtaccatttcaactttgattttaatagtgctagttgatattggtaataatgctaaccaagagatcaatgccagatttttctcttggggtaagttagctgaagtcatttaaagatggaaaggtgggaaaattctttgatatttgatgtcattgtatccacatttgttgtaagacatattgcataccaattataattatatcaattaaagttgataaaagcttc

SEQ ID NO: 388335 - DNA, 1363 bp, Homo sapiens
ccccgggctcgggcggctgggatggagcagaagagcgcggagcaccggagggcacgcagctgacggagctgcgctgcgttcgcctcgtttgcctcgcgccctccactggagctgttcgcgcctcccggctcccaccgcagcccacccggcagaggagtcgctaccagcgcccagtgcgctctgtcagtccgcaaactccttgccgcccgccccgggctgggcaccaaataccaggctaccatggtctacaagactctcttcgctctttgcatcttaactgcaggatggagggtacagagtctgcctacatcagctcctttgtctgtttctcttccgacaaacattgtaccaccgaccaccatctggactagctctccacaaaacactgatgcagacactgcctccccatccaacggcactcacaacaactcggtgctcccagttacagcatcagccccaacatctctgcttcctaagaacatttccatagagtccagagaagaggagatcaccagcccaggttcgaattgggaaggcacaaacacagacccctcaccttctgggttctcgtcaacaagcggtggagtccacttaacaaccacgttggaggaacacagctcgggcactcctgaagcaggcgtggcagctacactgtcgcagtccgctgctgagcctcccacactcatctcccctcaagctccagcctcatcaccctcatccctatcaacctcaccacctgaggtcttttctgcctccgttactaccaaccatagctccactgtgaccagcacccaacccactggagctccaactgcaccagagtccccgacagaggagtccagctctgaccacacacccacttcacatgccacagctgagccagtaccccaggagaaaacacccccaacaactgtgtcaggcaaagtgatgtgtgagctcatagacatggagaccaccaccacctttcccagggtgatcatgcaggaagtagaacatgcattaagttcaggcagcatcgccgccattaccgtgacagtcattgccgtggtgctgctggtgtttggagttgcagcctacctaaaaatcaggcattcctcctatggaagacttttggacgaccatgactacgggtcctggggaaactacaacaaccctctgtacgatgactcctaacaatggaatatggcctgggatgaggattaactgttctttatttataagtgcttatccagtagaattaataagtacctgatgcgcattgaacgacaatcttaagccctgttttgttggtatggttgtttttgttttcctccctctcctctggctgctacaacatcagaggagagggaggaaaaaaaaaaaa

SEQ ID NO: 388336 - DNA, 423 bp, Homo sapiens
ctctgttgtagtacatcttcaaataattttttcaaggatacatgaatccttgcatatctgagaatgtctctttttaatacatgaatgttgaattgcctgggtgtaaaattctagaggtaacatttttttcttttaaaacactgtacagtggaatcattctgattcagttgcaaggttaaaaaattagcatagaaggcaaaaatcatgcatagaagttaaaatcactctgaatttaattccttaaaatgtccatcataccagggctgggcccttggaaactcaaaagcctaggatgatcttctatttttgcctttgactgaagttcccctttctctgaagcagagaaggccaaacatctgctagcaaagcaaaagtttgaaattggattcttgttaggcaaaacataaattattctatgtagtt

SEQ ID NO: 388337 - DNA, 398 bp, Homo sapiens
tccgttgccgaggctggagtgcagtagcttgatctcggctcactgcaacctccacctcccaggcacaagtgatcctcccacctcagcttctcgagtagctaagccacagacacgcaccaccacgcctggctaattttgtattttttgtagaaacggggttttatcatactgcccaggttggtcttgaactcctgagctcaagcgatcctcccaccttggcctccaaaagtgctgggattataggcatggtatacatgttcttaactgacatatatacatacatacatacttttgtcagcatattctgtttttgtgcatgcatgtggaaacatgtagccttaagttcaagaacaaatacaaaagagagaatgagttatctttaaatgagaaaaaaaaaa

SEQ ID NO: 388338 - DNA, 1048 bp, Homo sapiens
catataaactccatatccgattccccatatctaggttagaacgtctcttttctccctgtcaatcatgaggactaatgcagcacacaatgtatacagtactaataaaggctttggacttaccacttccttctttgaaatcccaactggtcgcatcttaggttggtttggggcagtcccttgtgggaactctcctgctattctgtctggttttgggccttactgcagttgtggttttgggtggttggaacaagcatatatttcaataaatacgttttttaaatgtccaaaaaacaacatgacacaactgcgggtcgagagccagttttagtttgtcccataagctttctgtctttgttcagtttagttacaatggagaaaacctctttaatgttgacaggatttctttagaaaaaaaccattgctatatctgaaagtccagtttcaactggcaaaattggacaaaagcagcaatttgaaaaaccaagctacttataacttgataaagtcctctataaactaagtcattatatttctccttttaaataaaccattgtaaatttaatgttcatatcagttgagtattagtttccagctggattcatgctgaataaagtccagaaactttctttgtgattcaaatagatgcacaggaagctgggaaggaaaagaaaagcatatggtgagtaaatttcttaatgccaggtattacattaacatgaaagcagccaacattcagcattcctattcatttggaactcaatgagaacgttgagttacttatcactgactacttaaggggacatttgcctatttatttacaatgctttgcagaagtatccagtaacatttatgaatttatttgtatatatcaaatattatcttatgttctaatgaattttatccatttcaggtagagaatggattattctgaaaactagattttcatataattttgtttttagtttcattttcatttttaaaatataagatttttgttattgctataaaatacatgatcattacaaaaaatctgaaaaacagtagggaa

SEQ ID NO: 388339 - DNA, 310 bp, Homo sapiens
gtcgaactctaccacttgcaagagtatcgttttcagtgtctcccacggagatagaaccatggaaagaaaaattagatgtaaagtaatagaaaacagtttaaataaacactgcatgaagaagccagatgtaagactctcctttaattctaactggcatctaagttggttaaaaatctcagccaaggccaggcgcggtggctcatgcctgtcatcccagcactttgggaggctgaggcaggtggatcgcttgaacctgggaggtggaggtcgcagtgccgcagagcacacgccctcgcacactacccaggga

SEQ ID NO: 388340 - DNA, 414 bp, Homo sapiens
taaacagcattattgcgatgcgctgcccctccccccaccaatctcatgtcaaattgtattccccaatgttggtagggcctggtgggaggtgattgcatcatggaggcagtttctcgtgaatggtttagcatcatccccctagtgcggttctcgtgatagacttctcacaagatcaggttgtttaaaagtgtgtagcacctctctcctctctctcttcctcctgccatgtaagacacctactcctgctttgccttccaatcaaacctctttcttttataaaaacctcaggctcgatatttcttttcttttctttttttttttttaaattctttttcaggtatttatagcagtacagtaatggacttataccatacacccgtttgaagtgtacaattcaatgacttttagtatatt

SEQ ID NO: 388341 - DNA, 438 bp, Homo sapiens
ttccagaccttctctatggagaattgaaaattcctaaagaaccccccacccccattcagtacacttccagattccaggaagaccagagaggagaaggctggtgtccacaccttagcacgtccacttggctttagactctcccacctggcagagacagagccatcttcctaggccctctgcccacaggaccttagagaaacaacatcaggacatcacagtgattcctgccttcagccctttatccccagagaagagctgcaaagtctcgcatgccccatctcattgttgcaactaggttttgttgttttttgtttgtttgtttctacagctggggccttgttgaccttagaggcactctcttcccagaattcctggagatggtaaaggactcctcacttaccagcaggcctttcatatgcaaaccagccactctgagcc

SEQ ID NO: 388342 - DNA, 390 bp, Homo sapiens
ctgcctgatgggagtgtctttgtttgccttggggctttggccactggacaatctaacgagatctatgaagggggttttgagccacattgtatcaggtctacctccagaagggctggtgactgaaggtcaaccatgcaggtggtatgtgatcaagcctcagtaaaaactctggacacaaggcttgcatgagtgtccctggctggcaatactctgaacttactgtcacatgccgatgctgagaaagaaacactgtcctgacttgatggaaggaggacacccggaagctctgcgtttgctgctttctgggaccccaccctatgcatttcttcccttggttgaagaagggacctgcatcccttccctgtaataaaccataaccttaagtacaaa

SEQ ID NO: 388343 - DNA, 309 bp, Homo sapiens
gctctttgccactgttgtctttaaaaggtataattgccctggtgacactgtgcaggcgtgcttgcacccaaagaaagagagagagcaccagatctgtctgtcttgcagcggggagccaggacacagctcagcttgcttgcgctcagagggaaagagttaagctgttgaccccaaagggagagagagccagcagagatctgtgcttgggagtggctggaacaagcagccgagacacacagtgtaagagagctgctgaataaaattgtatttcacctacccgtagccccctgagtgttctttcagctgtct

SEQ ID NO: 388344 - DNA, 6454 bp, Homo sapiens
  misc_feature (952)..(952): n is a, c, g, or t
  misc_feature (1987)..(1987): n is a, c, g, or t
cggacgagggccagagccatggcttggcagcgtccagggccagaggagccttctggagcatcacccaggaaaaaaacagatgggctacatgggagaaatggaggtgcaaggtcccaccagggagagtggacagtccctcccgcctcagaagaaagcctacctttcccacctcagtacaggcagtggacacatcgagggagactgggccggaagaaacaggaaacttctgaagccccggtccatccagaagtcgtggtttgtgcagtttccgtggctgatcatgaatgaggagcagacggctctgttctgctctgcttgccgagaatacccctccatcagggacaaacggtcaagactaatagaaggttatacaggaccattcaaggtggagactctcaaataccacgcgaagagcaaggcccacatgttctgtgtcaatgccttggcagcgagggaccccatctgggcagcccggttccggagcatcagagacccacctggagatgttctggccagcccggagccgctcttcactgcagattgccccatattctaccccccagggcctctgggaggatttgatagcatggctgagctcctgccaagttcaagagctgaactagaggaccctgggggggatggagcaattcctgcaatgtatctagactgcatttcagatttgaggcaaaaagaaatcactgatggcatccacagctcctcagacattaatattttatataatgatgcagtagaatcctgcattcaggacccttctgcagaggggctgtcggaggaggttcctgtggtgtttgaggagctgccggtggtgttcgaggatgtggcagtgtatttcacccgggaggagtggggcatgctagacaagcggcagaaggagctgtacagagacgtgatgcggatgaactacgagctgttggcatccttgggacctgcngctgccaagccagacttgatctccaaactggagcggagggctgcaccctggatcaaggacccaaatgggccaaagtgggggaaaggtcgtcctccagggaacaagaagatggtggcagtgagagaggcagacacacaggcctcggctgcagactccgcgttgcttccaggctctcccgtggaggcccgtgcctcctgctgcagttccagcatttgtgaggaaggagatggacctaggagaatcaagaggacatacaggccccgttccattcagaggtcatggtttgggcagttcccatggttagtaattgaccccaaagagaccaaactcttctgctcagcctgcatagaaagacctaatctccatgataaatcatctcggttagtcagaggttacacggggccttttaaagtggagactttaaaataccatgaagtcagcaaagcgcacaggctctgtgtcaacacggttgaaatcaaggaagacacccctcacactgccctcgttccagagatctccagcgacctcatggccaacatggagcactttttcaatgccgcctactccattgcataccactcaaggcccctgaatgactttgagaagatcctgcagctcctccaaagcacggggaccgtgatattaggcaagtaccgcaatcgcacggcgtgcactcagttcatcaagtacatctcagagaccctgaagagggagatcctggaggacgtgcggaactcgccctgtgtgagcgtgctgctggacagctccaccgacgcctccgagcaggcctgcgtggggatttacatccgctacttcaagcagatggaggtgaaagagtcctacatcactctggcccctctctacagtgagacagcagatgggtacttcgagaccatcgtttctgccctggatgagctggacatccccttccggaagcctggctgggtggtggggctggggacggatggctcagccatgttgagctgcagaggaggccttgtggaaaagttccaggaggtcatcccgcagctgctncctgtccactgcgtggcccaccggctgcacctggctgtggtggacgcctgcgggagcatcgatctggtgaagaagtgtgaccggcacatccgcaccgtcttcaagttttatcagtcctcaaacaagaggctgaacgagctgcaggaaggtgcggcgcctctggagcaggagatcatccgcctgaaggatctgaatgcggtccgctgggtggccagcaggaggcgcacgctgcacgcgctgctcgtgagctggcccgccctggccaggcacctccagagggtggcagaggctgggggccagattgggcaccgggccaaagggatgctgaagctcatgcgcggcttccactttgtcaagttctgccacttcctgttggacttcctgagcatctacaggcctctgtccgaggtgtgccagaaggagatcgtgctgattacagaggtgaacgccacgctgggccgcgcctacgtggcactggagagcctccgtcaccaggcagggcccaaagaggaagaattcaacgccagcttcaaggatgggcggctccacggcatctgcttggacaaactggaggtagcggaacagcggttccaggcggatagggagaggacagtcctgacggggattgagtacctccagcagaggtttgacgcagaccgacccccacagctgaagaacatggaggtgtttgacaccatggcctggccaagtgggattgaacttgccagttttgggaatgatgacattctcaacctggccaggtatttcgagtgctccctcccaacaggatacagtgaggaagctctgctggaggagtggctgggcctgaaaaccattgcccagcacctcccgttctccatgctctgcaaaaacgccctggcccagcactgccgcttccccctgctaagcaagctcatggccgtggtggtctgtgtgcccatctccacctcttgctgtgagcgggggttcaaggccatgaaccgaatcaggaccgatgagaggaccaagctctccaacgaggtgctcaacatgctcatgatgacagctgtgaacggcgtggccgtcacggagtacgacccccagcccgccatccagcactggtacctgacctcctcaggccggcgtttcagccatgtctacacctgtgcccaggtgccagcccgctcccctgcaagcgccaggctcaggaaggaggagatgggagccctctatgtggaggagcccaggacccagaagccacccatcctgccctccagggaagcagcggaggttctgaaggactgcatcatggagcctcccgagagactcctgtatccccacaccagccaggaggcccccgggatgtcctgagggacagggagtccttgggactgccttggagacgcctctgtgatcactgggacaggctctgcagattctaggctgccctaggatcttctgctggtggcgatggtctctaagcaccaggaagtgggcagtggcatcccagagcagcaggggtatcaggaggtgcatgacctgtttcctgaggccccactcagcacagccatgcctcacagcacacaaatgtgccagaaggttctatatctcaagttcatttttaaggtgctgcagaaaataaccccatcatgaaaggtttcagcccctgagttttggtggcaagaggagtgtcctggtaggggagactgttggacatccctggggaatgttccagggaggctgcccacagtctaagtgggaatgggaaagaccaccttgttagagggggaggttgcccctgctctagggacagctggcctggctgcaagagcccccagaggcattgttctgggacttcctaccctggctcccacagcagaagcagtgaggccgtggtctcgtgcggaactctacctcttcccagggcttcctttagggcgaaacaatcacaagccctttgcacagagcacccaagaaagttctcttcctgcagctccagatggtggagctgggctcttctggcagggggtctggtgcttcccggagagccgagccgcgtttaacccgtggcatgcccggcccggtttacccaggagaggatgggacgaagttggagttgggaggcttgggatgcagccccagctctgctgcaggcagtggtctgattaatcccttcctctttgtgcctcagtttccctctccatgaagtggcagcagagatccaagtgcctgctgactccccatctgccctaggattagtgaatgagagcctcgagctccctgaaagacctctggctgcagtgtggacttagctgccatctgccccatcctcgtccttagtgggacaggtaggaatttgtctccaaagtccttgttgtaggagttgctctctgaatgcaccatctgcacgacaggctagtccactcttctctgagctgccctggggactctgcaccaggatctccagggcccactgagacatccccgaatgggcgctcagtgacaagggctttgaacaacctcctccagggactttgggcctgctctagcttcagaaccacagaaccaccgccctagaggcacagaggggcttctggcactgctaggttcacaccctcctcgcccatcttccttccacctaaagtgaagcacttttccttccaagggcagctccgtcttggcaggctcaggaggccgcttatcaggaggaggatgattttgtctaggttctgccttccttaaccatgggcaggaaatgaggcaagtcagcaggcagggtttctctgccctgcctgatacttgttttaaacaggcaggaagtgggcgccatccatcccagcttgcttgctgcctggctcaggcaggtcctgtgctgtgctgcaggcccctgtgggtgggccctttctccatagtctgccgcttcccattcccagggtagatgctggcatctgagcacctgagtacccttcctattcccagggtagaagctgctgtctgagtacccttcccattcccagggtagatgctggcgtccgagcccctccccggtaccgcaggtaccctggtaccccacctgccctttcatccccaccccagtacttagccttagcactgttgctttcgtgtcattttcagttctagtcaggaattcctttcttgctttctgcctttgacctgtggaaatgtctcccagccctgtgggtctggcggtcagagggaccccacaggcctgtggtgcgggagctctgggaggtgttactatctgcgtggctaaggcacacacaggcctccttctccccatcaccgtctccatgggcgttcaggaacttgcccaggtcaggcactgtggatgtgaactcgtggaaagggagggagaaaggcttttttaggtggggctatagcctctgccctacccacagggattccacatcaaggtgctgttccagcacacatgcttcctgcggcctcttcatccttgaagaatccctcagagcaggaggccatcctgtgagcagccgtgagtgggtctctgtgggagtagttctggagctgaggtggaagctaggggaagcaactcgccctctccacgtcagcatcagcgtgctccgaggacaccggccagtgccttccttaggtggtgggaaaggggtgtccctgtgcagcggggccactgagaatgctgtttgtcataaaatttgcactacccgatttctcaaggggcacaggcctgctccgttcccctttgtcagccaatggccaagaaggaagaagatgactgccatcttattcctgaacttcctcattcaggacccccgtggaaacacagtgagcatccttatcagaggccctggcccaggctggcccctttgctttgtttggagaggctggctgagtttcagcccctagtgctggagacccccttgttggagaggcttcctgtttatgcctcacaagaagaaaaaccacagggctctgggaggggaagaagcatgcactcccgctttggctggagtcccagcgcttgtcgccaccctcctccttgcctgtagtcttgacagcatccgtatgtacgtgtcctggcatttcccctccctctccctgatgactgatacccaccgggtctgacattccaagtaaccagtatgtaactggtagtttgatcccaatagccatagcgactccaggtgggagtgagggagcccagccccctgtcctggaagataccttagagtatgtgaccgcgctccagacccttgcttctctctcctgcagaggatgagtttctagggtgctaagtacctatcagaacagtgtggaggggcgggtccctcatacaggtgtgtgcttagccaaatacagtaactgtgactggcccagggatgttctctcctctattttcaaagatgaaaggaggttttaaaaaccatgtttgattcctaaccttttgctacctgaataaagcagagtctatttcaacacaaaaaaaac

SEQ ID NO: 388345 - DNA, 1113 bp, Homo sapiens
cggacgagggccagagccatggcttggcagcgtccagggccagaggagccttctggagcatcacccaggaaaaaaacagatgggctacatgggagaaatggaggtgcaaggtcccaccagggagagtggacagtccctcccgcctcagaagaaagcctacctttcccacctcagtacaggcagtggacacatcgagggagactgggccggaagaaacaggaaacttctgaagccccggtccatccagaagtcgtggtttgtgcagtttccgtggctgatcatgaatgaggagcagacggctctgttctgctctgcttgccgagaatacccctccatcagggacaaacggtcaagactaatagaaggttatacaggaccattcaaggtggagactctcaaataccacgcgaagagcaaggcccacatgttctgtgtcaatgccttggcagcgagggaccccatctgggcagcccggttccggagcatcagagacccacctggagatgttctggccagcccggagccgctcttcactgcagattgccccatattctaccccccagggcctctgggaggatttgatagcatggctgagctcctgccaagttcaagagctgaactagaggaccctgggggggatggagcaattcctgcaatgtatctagactgcatttcagatttgaggcaaaaagaaatcactgatggcatccacagctcctcagacattaatattttatataatgatgcagtagaatcctgcattcaggtaatacgtttataatgattgctgtatcttacagagaaggattctatactgagaacgatgtatatccatgctgatgatggaaaaaagaatactagtgataacccactgctaacatcataatgttggcatataccaacatgcttatcatggactaggcattgttttagacgcgttccatgtattatctcatttaatttggacaacaaccctattatcatctcctttttgcaaataacgtaattagtgagatagaacatttctacttctggtataaaggaaacaatcatctttattcagaatccaaaataaacacagatctcaagaaatagcctacaaccacaaaatca

SEQ ID NO: 388346 - DNA, 1133 bp, Homo sapiens
cggacgagggccagagccatggcttggcagcgtccagggccagaggagccttctggagcatcacccaggaaaaaaacagatgggctacatgggagaaatggaggtgcaaggtcccaccagggagagtggacagtccctcccgcctcagaagaaagcctacctttcccacctcagtacaggcagtggacacatcgagggagactgggccggaagaaacaggaaacttctgaagccccggtccatccagaagtcgtggtttgtgcagtttccgtggctgatcatgaatgaggagcagacggctctgttctgctctgcttgccgagaatacccctccatcagggacaaacggtcaagactaatagaaggttatacaggaccattcaaggtggagactctcaaataccacgcgaagagcaaggcccacatgttctgtgtcaatgccttggcagcgagggaccccatctgggcagcccggttccggagcatcagagacccacctggagatgttctggccagcccggagccgctcttcactgcagattgccccatattctaccccccagggcctctgggaggatttgatagcatggctgagctcctgccaagttcaagagctgaactagaggaccctgggggggatggagcaattcctgcaatgtatctagactgcatttcagatttgaggcaaaaagaaatcactgatggcatccacagctcctcagacattaatattttatataatgatgcagtagaatcctgcattcaggacccttctgcagaggggctgtcggaggaggttcctgtggtgtttgaggagctgccggtggtgttcgaggatgtggcagtgtatttcacccgggaggagtggggcatgctagacaagcggcagaaggagctgtacagagacgtgatgcggatgaactacgagctgttggcatccttggagatggagtctcactttgctgcccaggctggtctcaaactgctggactcaagtgatcctgctgacttagcccccaaagtgttggattacggcgtgagccactgcacctggcttgccatatctgatgaagtctgttgcttcttcccaaaaagcagccagaaatctcaattacatcccactgttaagaaac

SEQ ID NO: 388347 - DNA, 911 bp, Homo sapiens
ggcagaaggagctgtacagagacgtgatgcggatgaactacgagctgttggcatccttgggtaaagacgcaccgagcctcttattcaccaccctcctttgacttgggaagcccacaaggggagctgtggcttgtggttatcttcccattcctgccccctccctgtgtgtaggcagagaccgatcctgtcttttgcacctcataactcccctgcttggggtaactgtgctttatcaccttctcatccacccacctgttcatccattcgtcccccaccaaacattttggagtacctactatgtgccagatgaacacagctgatccatggtctctgctttcaagggcctagcacgtttgtgggagagacagacattttaataagaaactataaaataatacagtctcccataaaagagcttccagaagagtacccggggctactgaagaagagggatttgatttcctgggcattggtgggaggaatcaggaagcctttatagagtaggaaatgttttaattgagttcaaaaccaggtggatcagaaggaggaagggcattgagccatgatggaggggacggcctggcagagccacccctatctgtgcagcccagggctaaggctcctgcatcctggccaggcgccggcaagggttggcagccttcagcacgggagtcatggggtttggaccttggcagattaggaagagggcagtgcttcttgctcctcaggatggtgctctcctctcctgcatctgctgttttatcttctctttgcctctttctggcagattagcaaggttcttatgaagcatcaagatggaaagacaactttttttgttggagacagtctcactctgtcgcccaagctggagtgcagtggcgtgatcttggttcactgcaacctctgcctcc

SEQ ID NO: 388348 - DNA, 6538 bp, Homo sapiens
  misc_feature (952)..(952): n is a, c, g, or t
  misc_feature (1987)..(1987): n is a, c, g, or t
cggacgagggccagagccatggcttggcagcgtccagggccagaggagccttctggagcatcacccaggaaaaaaacagatgggctacatgggagaaatggaggtgcaaggtcccaccagggagagtggacagtccctcccgcctcagaagaaagcctacctttcccacctcagtacaggcagtggacacatcgagggagactgggccggaagaaacaggaaacttctgaagccccggtccatccagaagtcgtggtttgtgcagtttccgtggctgatcatgaatgaggagcagacggctctgttctgctctgcttgccgagaatacccctccatcagggacaaacggtcaagactaatagaaggttatacaggaccattcaaggtggagactctcaaataccacgcgaagagcaaggcccacatgttctgtgtcaatgccttggcagcgagggaccccatctgggcagcccggttccggagcatcagagacccacctggagatgttctggccagcccggagccgctcttcactgcagattgccccatattctaccccccagggcctctgggaggatttgatagcatggctgagctcctgccaagttcaagagctgaactagaggaccctgggggggatggagcaattcctgcaatgtatctagactgcatttcagatttgaggcaaaaagaaatcactgatggcatccacagctcctcagacattaatattttatataatgatgcagtagaatcctgcattcaggacccttctgcagaggggctgtcggaggaggttcctgtggtgtttgaggagctgccggtggtgttcgaggatgtggcagtgtatttcacccgggaggagtggggcatgctagacaagcggcagaaggagctgtacagagacgtgatgcggatgaactacgagctgttggcatccttgggacctgcngctgccaagccagacttgatctccaaactggagcggagggctgcaccctggatcaaggacccaaatgggccaaagtgggggaaaggtcgtcctccagggaacaagaagatggtggcagtgagagaggcagacacacaggcctcggctgcagactccgcgttgcttccaggctctcccgtggaggcccgtgcctcctgctgcagttccagcatttgtgaggaaggagatggacctaggagaatcaagaggacatacaggccccgttccattcagaggtcatggtttgggcagttcccatggttagtaattgaccccaaagagaccaaactcttctgctcagcctgcatagaaagacctaatctccatgataaatcatctcggttagtcagaggttacacggggccttttaaagtggagactttaaaataccatgaagtcagcaaagcgcacaggctctgtgtcaacacggttgaaatcaaggaagacacccctcacactgccctcgttccagagatctccagcgacctcatggccaacatggagcactttttcaatgccgcctactccattgcataccactcaaggcccctgaatgactttgagaagatcctgcagctcctccaaagcacggggaccgtgatattaggcaagtaccgcaatcgcacggcgtgcactcagttcatcaagtacatctcagagaccctgaagagggagatcctggaggacgtgcggaactcgccctgtgtgagcgtgctgctggacagctccaccgacgcctccgagcaggcctgcgtggggatttacatccgctacttcaagcagatggaggtgaaagagtcctacatcactctggcccctctctacagtgagacagcagatgggtacttcgagaccatcgtttctgccctggatgagctggacatccccttccggaagcctggctgggtggtggggctggggacggatggctcagccatgttgagctgcagaggaggccttgtggaaaagttccaggaggtcatcccgcagctgctncctgtccactgcgtggcccaccggctgcacctggctgtggtggacgcctgcgggagcatcgatctggtgaagaagtgtgaccggcacatccgcaccgtcttcaagttttatcagtcctcaaacaagaggctgaacgagctgcaggaaggtgcggcgcctctggagcaggagatcatccgcctgaaggatctgaatgcggtccgctgggtggccagcaggaggcgcacgctgcacgcgctgctcgtgagctggcccgccctggccaggcacctccagagggtggcagaggctgggggccagattgggcaccgggccaaagggatgctgaagctcatgcgcggcttccactttgtcaagttctgccacttcctgttggacttcctgagcatctacaggcctctgtccgaggtgtgccagaaggagatcgtgctgattacagaggtgaacgccacgctgggccgcgcctacgtggcactggagagcctccgtcaccaggcagggcccaaagaggaagaattcaacgccagcttcaaggatgggcggctccacggcatctgcttggacaaactggaggtagcggaacagcggttccaggcggatagggagaggacagtcctgacggggattgagtacctccagcagaggtttgacgcagaccgacccccacagctgaagaacatggaggtgtttgacaccatggcctggccaagtgggattgaacttgccagttttgggaatgatgacattctcaacctggccaggtatttcgagtgctccctcccaacaggatacagtgaggaagctctgctggaggagtggctgggcctgaaaaccattgcccagcacctcccgttctccatgctctgcaaaaacgccctggcccagcactgccgcttccccctgctaagcaagctcatggccgtggtggtctgtgtgcccatctccacctcttgctgtgagcgggggttcaaggccatgaaccgaatcaggaccgatgagaggaccaagctctccaacgaggtgctcaacatgctcatgatgacagctgtgaacggcgtggccgtcacggagtacgacccccagcccgccatccagcactggtacctgacctcctcaggccggcgtttcagccatgtctacacctgtgcccaggtgccagcccgctcccctgcaagcgccaggctcaggaaggaggagatgggagccctctatgtggaggagcccaggacccagaagccacccatcctgccctccagggaagcagcggaggttctgaaggactgcatcatggagcctcccgagagactcctgtatccccacaccagccaggaggcccccgggatgtcctgagggacagggagtccttgggactgccttggagacgcctctgtgatcactgggacaggctctgcagattctaggctgccctaggatcttctgctggtggcgatggtctctaagcaccaggaagtgggcagtggcatcccagagcagcaggggtatcaggaggtgcatgacctgtttcctgaggccccactcagcacagccatgcctcacagcacacaaatgtgccagaaggttctatatctcaagttcatttttaaggtgctgcagaaaataaccccatcatgaaaggtttcagcccctgagttttggtggcaagaggagtgtcctggtaggggagactgttggacatccctggggaatgttccagggaggctgcccacagtctaagtgggaatgggaaagaccaccttgttagagggggaggttgcccctgctctagggacagctggcctggctgcaagagcccccagaggcattgttctgggacttcctaccctggctcccacagcagaagcagtgaggccgtggtctcgtgcggaactctacctcttcccagggcttcctttagggcgaaacaatcacaagccctttgcacagagcacccaagaaagttctcttcctgcagctccagatggtggagctgggctcttctggcagggggtctggtgcttcccggagagccgagccgcgtttaacccgtggcatgcccggcccggtttacccaggagaggatgggacgaagttggagttgggaggcttgggatgcagccccagctctgctgcaggcagtggtctgattaatcccttcctctttgtgcctcagtttccctctccatgaagtggcagcagagatccaagtgcctgctgactccccatctgccctaggattagtgaatgagagcctcgagctccctgaaagacctctggctgcagtgtggacttagctgccatctgccccatcctcgtccttagtgggacaggtaggaatttgtctccaaagtccttgttgtaggagttgctctctgaatgcaccatctgcacgacaggctagtccactcttctctgagctgccctggggactctgcaccaggatctccagggcccactgagacatccccgaatgggcgctcagtgacaagggctttgaacaacctcctccagggactttgggcctgctctagcttcagaaccacagaaccaccgccctagaggcacagaggggcttctggcactgctaggttcacaccctcctcgcccatcttccttccacctaaagtgaagcacttttccttccaagggcagctccgtcttggcaggctcaggaggccgcttatcaggaggaggatgattttgtctaggttctgccttccttaaccatgggcaggaaatgaggcaagtcagcaggcagggtttctctgccctgcctgatacttgttttaaacaggcaggaagtgggcgccatccatcccagcttgcttgctgcctggctcaggcaggtcctgtgctgtgctgcaggcccctgtgggtgggccctttctccatagtctgccgcttcccattcccagggtagatgctggcatctgagcacctgagtacccttcctattcccagggtagaagctgctgtctgagtacccttcccattcccagggtagatgctggcatctgagcacctgagtacccttcctattcccagggtagaagctgctgtctgagtacccttcccattcccagggtagatgctggcgtccgagcccctccccggtaccgcaggtaccctggtaccccacctgccctttcatccccaccccagtacttagccttagcactgttgctttcgtgtcattttcagttctagtcaggaattcctttcttgctttctgcctttgacctgtggaaatgtctcccagccctgtgggtctggcggtcagagggaccccacaggcctgtggtgcgggagctctgggaggtgttactatctgcgtggctaaggcacacacaggcctccttctccccatcaccgtctccatgggcgttcaggaacttgcccaggtcaggcactgtggatgtgaactcgtggaaagggagggagaaaggcttttttaggtggggctatagcctctgccctacccacagggattccacatcaaggtgctgttccagcacacatgcttcctgcggcctcttcatccttgaagaatccctcagagcaggaggccatcctgtgagcagccgtgagtgggtctctgtgggagtagttctggagctgaggtggaagctaggggaagcaactcgccctctccacgtcagcatcagcgtgctccgaggacaccggccagtgccttccttaggtggtgggaaaggggtgtccctgtgcagcggggccactgagaatgctgtttgtcataaaatttgcactacccgatttctcaaggggcacaggcctgctccgttcccctttgtcagccaatggccaagaaggaagaagatgactgccatcttattcctgaacttcctcattcaggacccccgtggaaacacagtgagcatccttatcagaggccctggcccaggctggcccctttgctttgtttggagaggctggctgagtttcagcccctagtgctggagacccccttgttggagaggcttcctgtttatgcctcacaagaagaaaaaccacagggctctgggaggggaagaagcatgcactcccgctttggctggagtcccagcgcttgtcgccaccctcctccttgcctgtagtcttgacagcatccgtatgtacgtgtcctggcatttcccctccctctccctgatgactgatacccaccgggtctgacattccaagtaaccagtatgtaactggtagtttgatcccaatagccatagcgactccaggtgggagtgagggagcccagccccctgtcctggaagataccttagagtatgtgaccgcgctccagacccttgcttctctctcctgcagaggatgagtttctagggtgctaagtacctatcagaacagtgtggaggggcgggtccctcatacaggtgtgtgcttagccaaatacagtaactgtgactggcccagggatgttctctcctctattttcaaagatgaaaggaggttttaaaaaccatgtttgattcctaaccttttgctacctgaataaagcagagtctatttcaacacaaaaaaaac

SEQ ID NO: 388349 - DNA, 297 bp, Homo sapiens
ggggtgtcttagctgatagaagatggcagagttctgggtagcagaaccaagcatgattcaattttctccaaagggaacaagaagatggtggcagtgagagaggcagacacacaggcctcggctgcagactccgcgttgcttccaggctctcccgtggaggcccgtgcctcctgctgcagttccagcatttgtgaggaaggagatggacctaggagaatcaagaggacatacaggccccgttccattcagaggtcatggtttgggcagttcccatggttagtaattgaccccaaagag

SEQ ID NO: 388350 - DNA, 1384 bp, Homo sapiens
agttttaaaaaatcttctctggcttcagagaagattttataaggacttttgtttgggataagctttccagattatccatgtctatttgcatcaaaggggaaagaaatggggcttttggatggctcttccagtgcattcggaacattgcctcttgcctttattcctgcattttatggcaaagccaaaagaaactcaagttgcaagaacaaaacccagtgactcgttttgatggttcaaaatggtttcctttatggaagtcacttcataaaatgttaagtaaaaagtgggaagtgcttctgtcttctcttttgcatgagttgcttttaggagcaggaagaaggtaggcaaagtaagataaagatgcaacacatttaactacaaaaatcaggttcattttttagtttattagaatttttttgaaatcttaagagggccagcatttctggctacaattttgcacccagaacattgccaaaatgaacattcagtaaatagaacctgattgaaatttactcctggaagctttcctttgcattttcgggaagtggccacctgccaagcgcaagagttggggggcaggaggggaggactcaaattcagggtgtctggattaaatttcggtgaacatggtgatatctcagtttgaaaactagagggcctatcctgagtatacatcaatgtctctttgatggcctactttcctcagtgaggatctttgggaatacttgagatggaacaacagaaatgtgtgaaaggaagcagaaacttcttgtaaataacgtgacctcccacgacgaactgcctgaggcttcagggttttttcttgcttttaacactcttaaatctcctctgttggttcctaatagatcccagaaaagggaaaaataaagctgcagttaactttcttatgtgcatccttccaatagagtactgtatttttcaggtgttttgcatttaacataaaagtcctcgggaaacaggtgtcaaaaacagagagagaaatcctgggccatcacttcacaaatatcccaaacaagatattcttttcaaacagggctccctctcagtggtcatgagggaaggttgataatgttctttgttggggactgtttatacaattttttttcaactgtgagctttggaatcgtaacttgctgtgagtccagcttctgtctactgccataagatggaccccacgtcagcataatgagggtggtatatatgctcgcacctagacatgcgcatatgtacctgtcgtaccttcacggaaggaaaacaggctactgacgtttcggaggagtagccaccagtgcctaatatcttttgggggggatggatgcttataattgccagtatatcgaaaccacactgggagttccacata

SEQ ID NO: 388351 - DNA, 1163 bp, Homo sapiens
ggatcccctcacgcttatacttcacatttatggaagtcacttcataaaatgttaagtaaaaagtgggaagtgcttctgtcttctcttttgcatgagttgcttttaggagcaggaagaaggtaggcaaagtaagataaagatgcaacacatttaactacaaaaatcaggttcattttttagtttattagaatttttttgaaatcttaagagggccagcatttctggctacaattttgcacccagaacattgccaaaatgaacattcagtaaatagaacctgattgaaatttactcctggaagctttcctttgcattttcgggaagtggccacctgccaagcgcaagagttggggggcaggaggggaggactcaaattcagggtgtctggattaaatttcggtgaacatggtgatatctcagtttgaaaactagagggcctatcctgagtatacatcaatgtctctttgatggcctactttcctcagtgaggatctttgggaatacttgagatggaacaacagaaatgtgtgaaaggaagcagaaacttcttgtaaataacgtgacctcccacgacgaactgcctgaggcttcagggttttttcttgcttttaacactcttaaatctcctctgttggttcctaatagatcccagaaaagggaaaaataaagctgcagttaactttcttatgtgcatccttccaatagagtactgtatttttcaggtgttttgcatttaacataaaagtcctcgggaaacaggtgtcaaaaacagagagagaaatcctgggccatcacttcacaaatatcccaaacaagatattcttttcaaacagggctccctctcagtggtcatgagggaaggttgataatgttctttgttggggactgtttatacaattttttttcaactgtgagctttggaatcgtaacttgctgtgagtccagcttctgtctactgccataagatggaccccacgtcagcataatgagggtggtatatatgctcgcacctagacatgcgcatatgtacctgtcgtaccttcacggaaggaaaacaggctactgacgtttcggaggagtagccaccagtgcctaatatcttttgggggggatggatgcttataattgccagtatatcgaaaccacactgggagttccacata

SEQ ID NO: 388352 - DNA, 531 bp, Homo sapiens
gatgtgcaaagagctggggcagtatgttccaggcagagtgaacggcataggcaaagaccctggaggtgggaaggggcaagacatgcttttagtaactcaaagaaggccacgtggctggggcttgtgatgagagagaatcaggcaaagtgagttcagagaagcataagggccagatcacaccaggctttgaagccgctgggaacttggattttattccaggtagtgagagatgcctctaaagaattttaggtgatagattaacgtacttttccctttttcacggatctgtcatgcattggagaatggactggcagggtgagattgagagcagggaggaagtgaggtggctactgtgtcatccaggtgggtagggacaggtcttgcctgcaggggcagcagtggtgttggagaggtgtgggtgggtgggttaggaagtggaaccagtaggctgataacctgagctatgccattaggaagagggcgagtggatggtggcaccatttactgcagtgggtcggggaagggagcagg

SEQ ID NO: 388353 - DNA, 405 bp, Homo sapiens
attgaagaattatacacatacacaaaaatacacaaatataaagtggatagcttaattaattctcacaaattaagcattcccatagaaacatcagcccctttaaccacccccaaggggtattctcctcacttctatcatcataaattagattgcctgtttttgaactttatgtaaatgaagtcatgagtgcatgcttttttcttcttcttttttattatactttaatttctagggtacatgtgcacaacgtgcaggtttgttacataggtatacgtgtgccatgctggtttgctgcacccattaactcatcatttacattaggtatttctcctaatgctatccctccccctacaacccaccccatgacaggctcctgtgtgtgatgttccccaccctgtgtccaag

SEQ ID NO: 388354 - DNA, 829 bp, Homo sapiens
ttcccttccttggatccctgtgcacctactggagccaggttactctgggtcctggacctgactgcctcattctggaggcttccagacagccacggttagtgcccaaacctgagaggatggcttcagatggagcatctgcattgccgggaccggatatgagcatgaaacctagtgccgccctgtctccatcccctgcacttccctttctcccaccaacttctgacccaccagaccacccacccagggagccacctccacagcccatcatgccttcagtattctctccagacaaccctctgatgctctctgctttccccagctcactgttggtgacaggggacgggggcccttgcctcagtggggctggggctggcaaggtcattgtcaaagtcaagacagaaggggggtcagctgagccctctcaaactcagaactttatccttactcagactgccctcaattcgactgccccgggcactccctgtggaggccttgagggtcctgcacctccatttgtgacagcatctaatgtgaagaccattctgccctctaaggctgttggtgtcagccaggagggtcctccaggccttccgcctcagcctccaccaccagttgctcaactggtccccattgtgcccctggaaaaagcttggccagggccacatgggacaaccggggaaggaggtcctgtggccactctatccaagccttccctaggtgaccgctccaaaatttccaaggacgtttatgagaacttccgtcagtggcagcgttacaaagccttggcccggaggcacctatcccagagtcctgacacagaagctctttc

SEQ ID NO: 388355 - DNA, 479 bp, Homo sapiens
gtgtaaattttctggttatgtaatcagagcttaattggccatttatagttagttggttaagcttaaattttgttttccccaatgcaatttacaaaaatttacaaaaaaaaaaatatacgtttgaggatacacacttcacaagagactgatttttttttttcccctgaattttttaaatgtgtcccaagtgcggtctcaagtctagccctcatcccccattcctccagcctaactcaggcttgaagtaaaatactaaatttccagttccttctgacaatcccaaatgccagcctcgtttccctagttcacattgtcatctatttgtcctttagtgtatattttcaatactgtatttttttttacaaaccactggatggcacattttaaaagattcattttctgtttgtaaatatttcccatgagaagaaagcaaagaataacccctgacactgtgttgtgtaaaatctctgtgcctcttt

SEQ ID NO: 388356 - DNA, 263 bp, Homo sapiens
aagaataaacttttttgtgtgttaaagatttttgggcctataatcccagcactttgggatgccgctgtggaaggatcagttgagtccaggggtttgagatgagcctggccatcataggcagactctgtctctacaaattttaaaaaactagtcaattacagtggaggacacctgtggtcccagctacttgggaggagatcacttgggcctgagaggtcaaggctgcagtgagccttgattgtaccactgcactccagcctggg

SEQ ID NO: 388357 - DNA, 373 bp, Homo sapiens
ctcaaaggcactggcttctccttagaaaatcacctcagagaagggtgcccatgataaaagcacagcctgagagtcacttaaggagctgtgtccgtgccatgacgacagcatgagctccctgcctgtagatatatatatgtctgaatgaggcactgtcccgatgatggcatccttcttttgagtagctggggtccccacagtgccaacagcactttgtggctgtgcactgctccaccaccttaggggcaggggttggcaaagcaggctgctttaggtattaaagggctgtaagtagactcccaattcataactgcctgcccctctaggaagcatccccatgttggtgacacggcagtcattttcctgaagttgg

SEQ ID NO: 388358 - DNA, 727 bp, Homo sapiens
agggatttttaagccaagttgtagaatggggtgggtgtaatttcagcagtgaaggggaccatgggtgtttgaagtcaagagtgagacgctggaaaaaagacaaaagaatgggaaaaagtggattgagtatataagcacaaatgcagtgctaagccattgattttaagtgaatgtagagagagtcaatttgggctgtagtatcctggactaggaaggacatctccctggactaggtagggtagctgctgtttagctccagcagaattttcacatgcggggataaaccagaaatctgcattttttaatgaggaatcttccaattttaaaatgtttgcaaataacacaaaatgcttttaaaacattatacagacaacatgtgagtgggcctcactgagccattgggcttccactttgtggcctttggagtagaccaatggttttccaagtatgggtcctgaccagcagcatcagcatcacttgagaacttgttagaaatgtaaatccatttccaagtgaattagaaaccctgggggtgtcagcaatctcttttaataaaccctttagcgattctgatgcatgctaaagtttgagaaccagtgaaacagagtattttggaacctcgcttggtgcctaaatcatactagtctcaaaatttttgtcgaagagtagttgaaagtgaactgagggatataaatttggatgatggttgataccagattatgaatta

SEQ ID NO: 388359 - DNA, 524 bp, Homo sapiens
tctctactcagccggggccatgttgcctgcttcttttactgtacatttagcgactggtactcggcaggcttttcctattggcacagctgccaacattcaccctgcgcaagcttccagcttgcttatctgtgtctgcagctcgattttacaggctgctctttgttagaaaagaaattatttggggttgctttttgttaaaaggcaagccttgccaaggactcctttaccctcactatctgcctaaataacttctttttagctcctgtagcaaaatgaccttttctgggtggttatgaagtagatccctggagaggggcatgtggtggctgttgaatgagccaatgtctgttctgggaagtcagggaccctgaacggaggtaccggctgaagctgtggcagaagaacataaattgtgaagatttcatggacatttatcacttctccaatcaatactcttataatttcctatgattgtctttactttaatctcttaatcccaccatctttgtaagctgaggatgttt

SEQ ID NO: 388360 - DNA, 220 bp, Homo sapiens
agaggctatagggaatgtggaaaaaatggaaacagctgatttgctagaagtggtgcaatgaaaggtgattgtatttctgttttcttttattattgtttccatgttgtttgcacaataataatgtgaaaaaaagagaaagggagcgagagaaaatgaagtagagaatatgagcactcgctctggagtccaggagtctaaggccatcatcccttgctctact

SEQ ID NO: 388361 - DNA, 565 bp, Homo sapiens
ggcatacatgacacctgtaggaacaactgctctgatttgcacctttggcgactgagacaaatgctcattttacttagtaacattgcgacagcctgtagcaaaactcttaacattataaaggaagagataggcatttcaaactgtgtaagagaaaagacacaaactctaggggttttgactggcccagttagggcagagtttttaaaactcagagcctcttacctgcaggaaagagagagaggaggcagggttttggaagagaggcagacccacagttttgcatcgctcgcactcgccttccaggatcccgggggaggacccatttgaaatgggaaaggttctcttgcccccctcgcagggcatgcggtaggagtgtggctcgcttcttcagagccccgctgcttcaaagtattggctgacccacttgttaggtactaatgcagctggtcactttaagttgaagccgatgctcatttaccattctgaaaatcctgggtcccttaagaattgtgccaaatctcctctgtttgtgctctgtaaatggaacagtaaagcttggatgagg

SEQ ID NO: 388362 - DNA, 836 bp, Homo sapiens
tgagacaaggtctcactttctcacccaggctggagtccagtggcgcaatcatggctcactgcatgcagactcaacctccccaggtcaagagatcctcccacctcagcctcctgatagctagtaccagaggtacacaccaccatgccctggctaattttcaaattttttgtagagagggggctctcactatgttgccgagtttggtctcgaactgctgggctcaagtgatccactggcttcgaccaccccaaagtggtgggattacaggcatgagccactgtgcctagcctattctttctacaaggttgactgaccccatagccattgtcttcatccagagctaaccaatgtctctttgcataagagataatacttttcatctaacggagatctaatcttacctttgctgagtgactgagtaaaacaactccaaacatcaagtaacaatttatactactccataacatgtgttgatagttacattcgattataactgaatctaaaattctcagaactaccaagccttaaagcaaaaagaaaaaaaaaataagtaactgcaggagaaaaaagaaacaatattatattcagaagaaagtagaagtatgactactgtccccactgtgatttcctaaaactttacagcatctcttctcagttaaaaagtactctctactaaaaatatgaaaaaattagctgggcatggtggctggcccctgtaatcccagctactcaggaggctgaggcataagtatcatttgaaactggaaggtggaggttgcagtgagctgagatcgcaccactacactccagcctggaacagagcgagactccgtctt

SEQ ID NO: 388363 - DNA, 964 bp, Homo sapiens
atactctttatgtgttagccatttgtcttagtgactcataaatcagaaataacattactaatgttgtttggaaaacttttaaaaaattaaaatttgtaataattgaacaaaatagtagtgaagtggataaattatagtccgattcttgagtgtttgattaagggagaaaggaacttactttctgacacatataaatattttcagcatacaataacattatgtttgaatgttttcctttagtcttatttgaaaatctttgattctttactgatattggagttacgtatgtttcagctaaatgttacatttaataacagaagaaagtttagtgcctgaaaagatacaaattatcgttgtgtaagatttcacatttaaacagcaatattaaaaaaactgaattaggactataggaaagtatcacgccattctaaaaaatgtgtagaatatacttggaaaaatttcttatgcaaagttccacataacagaacgaaaagatcactcgctcgtgtaagttttcagttaaagaagaaagttatgttaatttggtaaaataaaaaacaggccttttcaattaagagatactattaaacccctagttatgatagtgatgatgctgttcataagaagtattgatggagaacttactggtcagagtctatgcaggcaaatgaaacacttcttttacttgggatctttcgttgtgaaagatcttacagcctaaaaacatgacggttcaacatgcagttgaataaatgtttagcgaatcgagtaaatgtagggaaaataaaactagctacattaggatgttaggattgctttcccgtatttaatttgagctgttaacactttcctgtttatactgttaattttgcaaacagtaatgcttgtgatcccatacactttgtctagtaaaatgaaatcttccaaatggagaaaataaacctctatagtacggatttttgcc

SEQ ID NO: 388364 - DNA, 261 bp, Homo sapiens
cagcccactagcctcatatcctcatctctatcatgagtgatttgatgaagacaattcccaagtgcacttccagtcttgacattctgcaagtctcaaattcctgtagtatgtcccacagggatcctctcttctgcgagctcatagcctgaaacgatcacttgacaattaaccacatatcaccccatggcatctgtcttgttgtcatgtgttatttaactttacagaagagcagtctcacatccaaagcatgtcggcaggacc

SEQ ID NO: 388365 - DNA, 680 bp, Homo sapiens
agcgggacaggaggaggggaagaacagacactggggcctattggagggtggagagggaaggagagagaagatcagaaaaataactattgggtattaggcttaatatttgagtgacaaaataatctgtacaacaaatccccatgacacaagtttacctatagaatagacctgcacatatacccctgaacctaaaagtttttttaaaaaaaatgggcaaaagacctcaagctggaaaccatcattctcagcaaactaacacagaaacagaaaaccaaataccccatgttctcactcataagtgggagttgaacagtgagaacacatgggcacagagaggggaacatcacatactggggcatgtcagtgggtgggggccaaggagagggagagcattaggacaaatatctaatgcatgcagggcttaaaacctaggttgataggtgcagcaaaccaccatggcacatgtatacctgtgtaacatttacatagacatttctcaagggaagacataaaggacacattttaaaagccctaataaaattattagttcagcttccagttattccttattattggtcttgctttaaccttgtacccaggtttctacaactaggccacctccttgctttctagtttcaacaaataagcccgtcttatcctgctctgttaacatgatagag

SEQ ID NO: 388366 - DNA, 482 bp, Homo sapiens
  misc_feature (218)..(218): n is a, c, g, or t
agagagctagcaccatgagcttcaataccctgctattccccatctgcaatatcatcctctttaactgtgtgttcattttctgccttacacattaggctatacgctacacaagggcataagctgactgcctttcttgtccattgtcaccagtgagcaagcctcgcatggtgcctggcacatattataaacacattaagtactagataaataaataaagnaaatcttgactagcagagtaggctcaaaatatctgtagacagtgaaacaagaaacagaaaccaagccttgaaatcactgaagagtaaagagctgaacacctgtcagatttttctgggaatcaaggaaggcaacaagaataaatgagaaaatgtgtacatatagagaactaagatgctctaatatgccaagttcaaactggaatggccctagaatctgagtcatgccctagcaggttaattaatacacccagtgaattgtgtcac

SEQ ID NO: 388367 - DNA, 1186 bp, Homo sapiens
  misc_feature (922)..(922): n is a, c, g, or t
atcccagctacatgacaggctgaggcaggagaattgcttgaaccctggaggcagaggttgcagctctgtcttaaaaaaaaaagcaaaaaaactttatcttttaattattttgttatataaccggaactacagaaacttattaaaaactatgtgaatatcacaaacctgtacaccattgttcccattttacagaggtccctttcagccctaacgtcgtggggaccagcagctgaacaaagcagtctccccatgtgtaatgtagggcagaatgtggcctacttcaggccagctgtttaccaaatattattccagatattgctcataagacaatctgaagcctgacgaaggcccctccttcacccatatgagaatgttcaggatgctaacttctaactgatacaggagattcaaatgcaaggagcaccaaacagtgcagatgtaggaggcaaggcttcctgagagacagctggctcaaggcaaactgaatgaagacagtcaattaccataatcaatggaacacacccctcctatctttattcaaagtagtattaaccaagatgatgaatcatcagctcagtgggttttaactcctagcagactgttcactgctccacatatatctatgcctcatctagagcatctgaattgaaatcataaagcttcactgtgcataccaccgtatctgttttatcagctctaacttagctgtcatgtcacacactcccataggcccctgctattccccatctgcaatatcatcctctttaactgtgtgttcattttctgccttacacattaggctatacgctacacaagggcataagctgactgcctttcttgtccattgtcaccagtgagcaagcctcgcatggtgcctggcacatattataaacacattaagtactagataaataaataaagnaaatcttgactagcagagtaggctcaaaatatctgtagacagtgaaacaagaaacagaaaccaagccttgaaatcactgaagagtaaagagctgaacacctgtcagatttttctgggaatcaaggaaggcaacaagaataaatgagaaaatgtgtacatatagagaactaagatgctctaatatgccaagttcaaactggaatggccctagaatctgagtcatgccctagcaggttaattaatacacccagtgaattgtgtcac

SEQ ID NO: 388368 - DNA, 758 bp, Homo sapiens
tgataaagcaataaaatgctattcacagctgcatgaggctacacccttcttttgaatgcagatgctattacttctcctttgttttctttgaattgctttgtccaccctagaactttttgagtgacattactaaaccttttcttatgccccgtggtgtctccggtaagggttagactaaattggtgaagttatatcattaaaagtttagtatagtacttattctgataaagatatctatccatatatatctatattagtatatatgttgtattatattttctggggtagatagtctttatttggtcctcttttcagaagatatgtcgtctcaacatgtgtttcagaaaataaagtacctgtagtcagtgccgataagtgaaattgatgacagtttttggaggccacaactatgtgcacattcagaaactatgagcagtctaacctgttggagatttttagacaaatttctttaggaggaatatattttaagacaatatcctctttaggagaaataaagggaagaattatctgttaacctccaaagtagtatgttttcctataattctgtttttggttacacatagagttgaagtcttccattatttatcagccaaatattcagtgagaaactacaagctggggtagaaaatgagacttagtttctgccttgactgtattctagttggggtgggaagtggaaagacaatcactagataatatttctaacactgtggcaagtgttaaaatagaggtatata

SEQ ID NO: 388369 - DNA, 352 bp, Homo sapiens
gatgacttgggtccttcttggcagtagcattgccagctgatggccttggacagttacctgccctctctaggcctccctttccttgtctatgaaatacattatagaataggatgtagtgtgtgaggattttttggaggttaaacgagtgaatatatttaaggcgctttcaccagtgcctgggatgtgctctgtagtttctgtgtgttaactataaggttgactttatgctcattccctcctctcccacaaatgtcgccttggaaagacggaggcagcctggtggaggtgtatctcctagacaccagcatacagagtgaccaccgggaaatcgagggcagggtcatggtcaccg

SEQ ID NO: 388370 - DNA, 175 bp, Homo sapiens
aaaaacaaacatgacttggtgaatgttgagcatgcccaggcctgatccccagaggcaattacgcactcaagttacttaattctactcacaatgcctcacaaacaacttctctgacacctaacacagctctgggcaccttctagcttcagctcctcaaagcagttattcacgctac

SEQ ID NO: 388371 - DNA, 473 bp, Homo sapiens
ctggggagaaagcaggaggccctttttgttcctggggagatgcttcaggccaaagccctgcccccaagtcatcctggatgaaccacctcagactcctgacctggctgacagaatcaatggcccacaacatcccccggcccaggcccccttctgcgcccccaggctgctctggctcaggccctctttgccacaagggacttcagcaagtgttagggacggggttctgcacattcagccagatgcggtgccttcctccacacccaaccagaaggcccgaagcatccagaaggaaaagcgctgcctgaagccctgagctctggggacaaatcccaggggccaatgtggagggcacgcggggcactgcttaactggaagtgatggggaggggctccctgaggccagagggtggatctcgagcctgaccacagggccgtggaccgtggcccctcggtcccggagccaccagcggccgc

SEQ ID NO: 388372 - DNA, 681 bp, Homo sapiens
gacagattttcactaagaaaagttagttctctaccttatataatgcataaaagaaatattccagatggaatacaaatccacatgtaaaactaaaaccattcaaatatcaaaagataatgatttgacaggtaaagagcttggaagttatcactgctgtccccacaacaagaaaaaagctcagcaaatggaaaatcaacaactcttctcagatccatcagagaaatgaggtcatggggcaaactgctatcctgaaaactggagagacaggtgaatgcagagaatcagaacttacctgagaagccaggaacagaagctgctgctggagccagtactgtcaggacactcacaggccaactgacaaatgtaattagcacagaaatgagaagccaggcatggtgtgcacctgtagtcccagctacttgcggggcaggggcagaaggatctcttgagcccaggagtctgaggctgcagttactattttcaattactaaagcagttttttaaaagtataatccccacttctggaaaatgatggtgtaattggtatacattgttttagggcagcattaaactggtttacattagtacatgatgacactgaaatacatattgatacatatccattgtcataaaaatgttcacacctattaactaaagaatctcagtttagagtattttgtc

SEQ ID NO: 388373 - DNA, 341 bp, Homo sapiens
aggcatgcaccaccacgcctggctaattttttattttttatagagatggggtctccctatgtagtcgaggctggtctcaaactcctgggctcaagcaatcctcctgcctcagcctcccaaagcgctgggattataggcatgagccaccgcacccagctgatttttcatttctaaccccaatgcagctggtccacagaccacactttgagtaggaaggccttagatgtccagatttttctctgtattatgtaatcctccatccaaatgtctagaaaccaaaagcagaacaaaaagcaaccactgtcaatttaataaggccaataaaggttactttcgggtga

SEQ ID NO: 388374 - DNA, 628 bp, Homo sapiens
aaatacattcaaattgagtcatcatcatttttcatctatgtagtattttgtttttccaaagttcttacaatttctgactccaagatggcaaaattgtaccattattcctatgttaaagttaatgccatgtctactatagcttggacagccattttgactcaactgtctaatctaaatgtcatttcaatcagaaaaccagccatcaactgtcaaaatggtaaaaacagttatgtgtgttttcaaagccagaagtgcaatcatgtggtgagacttcagggttttactgttgtccacagttctgagtcccaggactggtttccttactcggtattctcccatggaaaacttcatcggggaattatagggtaatattttcaagacttggaatatgtctacagttacctttctaaaaaacaaacaaaaaaatccatttaaaagcatttttttaaaaataatcatgccagggtagccaaatagaagcaactttggggtttttgcagagtcaagtcttataaattgtggaatattccccttggtccaggagatcatttgactcccacacaccaccacttcctatatccacaaattccagtatgtttggaccctcctgatggctgagagaatccca

SEQ ID NO: 388375 - DNA, 122 bp, Homo sapiens
ggttgctggagaaaacttaaagtactcagtaaacatttgctcttttttttcttttagacaggatctgtctgtactctgtacagcctgtactctgccaggctggagtacaatggcatgaagac

SEQ ID NO: 388376 - DNA, 417 bp, Homo sapiens
gccaattttttgtatttttagtagagacggggtgttcaccgttttagctaggatggtctccatctcctgtcctcatgatccgcccgcctcggcctcccaaagtgctgggattacaggcatgagcctccgcacccgaataaagaaaactaaagaaatgtagcagataaatgcaatatgtgaccctgattttgatcctagttaaaaaacattagtggaaccatgaacaaaatatgtaaataaggtctgtaggtaagtaactaattctgtatcaatttcctaatgtgagtaactgtactcttagatatggtgttagcagtcaagaagctgggtgaagaatatataggaattcttgatttttttaaatatatttttgtaagctttaaagtagttcaaaatgaaaattttaaaataaaatga

SEQ ID NO: 388377 - DNA, 881 bp, Homo sapiens
ccgcgcggcctggaagcgagtggcggagcggcgggacctcggcggactcgccatggaggaggagggtgtgaaggaagccggtgagaagcctcggggagcacagatggtggacaaggctggctggatcaagaagagcagtgggggcctcctgggtttctggaaagaccgatatctgctcctctgccaggcccagctgctggtctatgagaatgaggatgatcagaagtgtgtggagactgtggagctgggcagctatgagaagtgccaggaccttcgtgccctcctcaagcgaaaacaccgctttatcctgctgcgatccccagggaacaaggtcagcgacatcaaattccaggcacccaccggggaggagaaggaatcctggatcaaagccctcaatgaagggattaaccgaggcaaaaacaaggctttcgatgaggtaaaggtggacaagagctgcgccctggagcatgtgacacgggacctgggtgcgacgggggccagcgacagccgtgcacaacgagagtccacctgaaggaggtggccagtgcagcttctgacggtcttctgcgcctggatcttgatgttccggacagtgggccaacagtgtttgcaccccaggaagtcatgtcagttgaagccacaagctcgggagacaacccgggccctcatgactcctaccaagcctttctagcaactgagacaccagcctggtgaaagggtggagaaccctgaggggggagagaagaccaagccctgtatcaagcgagccagagagtctccctgaggagcaaagagaacagaaaccacgagaagagaacagggacagaagagacaccaagaggaccgactgagaaatgagggaaatggagaacccagaccca

SEQ ID NO: 388378 - DNA, 256 bp, Homo sapiens
cgtgatgagtgactttgggcaaatcccttagtctctctagacttcagtttcctctctacaagagaagataagacaacagggtatctttttgctcagaattctatgcttctgggatctctacaaagaaaaagaaaaagaaaaattagccaggcatggtggtgtacatctgcggtctcggcactgtacaaaaataaatcgacttttaggaatttcttctgctctcgctctctctctcgctctctctctcgctcgcttt

SEQ ID NO: 388379 - DNA, 173 bp, Homo sapiens
gcaggggccctgggagctgagatgagccgcagcacaggaccttgaagctgaaaagagccaccaaggggtctccatcccttcccagcactggccttcctcctgtgggatactcagtgtggagattcctccctccccacctgacacagagatgggagtgaaatgaaacacagccc

SEQ ID NO: 388380 - DNA, 1622 bp, Homo sapiens
gaaaggttcacccgggagagatggcctagccacttccttagtgactgtttggtatatgtaggtccccctgccattactctttcagccttctgcaatctagttctacttagtcacacacttctctaagaccactcatacgtaaacactacgtagaggcccctttttgcctcattttacattgtttagttatcattttgaaacttttcttcacatatgtaacagtgccggagtttttctgcttctctgtgtttgttcagtaactcttctttaggatacacctaaagatgagaagcttcatacccagtactcctcttcattcactcatatgtttttgggatcagtcccttctgctggctgtgcattggtctaatggaacagaatagagtccagaaataacccaacatgtatgtggacaactggtttttgacagaggtgcaaaggtcttgaaaaaatgatgctggaataattgggcatcagatgcaaaattaaaaacaaattggtccatatcttaacactggccaaagattaaagtccaaatggattatagttccccaaaactgtataatttctagaagacaacaaggaaaacgtgttcagccttgggttaggaaaagatttcttaaatccaacaccaaaagcacaatccatgaaggaaaaatcgataaattgtactttatcaaaattgagaacttctctttgaaaggtaccataaggagaacaaaaagacaagctgtagagtggcagaaaaatatttgcaaaacatttctgataaatgagttgcatctagattacataaagaagtctcaaaactgaacaagtaaacccattgtttacttaatcgctgtttctcctgagcttgctgcctctgcccctgctctctctccttttccatttgttttcaacattgaatccagaatgttcttcttgagatccaagtcagatcacaccaaccctcagaactctccaatagacgaccatggcactcaaaagtccacaatagccttcaatgctgggcaaaacatgaagcaccccttttctcccttctctgaccccatcacctctgtgttcaccctgctcctgccgtcctccctgcctccaaaacaggtcaggccttcgtgcctttgcacttactatttgcaatacccaaatgttcttcaggctctttagcctcttcatttctttcctgaagtgtcattctcactgaggcttatctaaagctgcagctactggggcattcctgtctcatctccctgctgtattttgtactcccggctctcttttgtacttttaaacatactatatggtttacctttgttgtttatatttgcatgttgtttcccacttgaatgtaagctccaaagattttatttttttaaactgaattattactgtattcccagaacaattccctggcaaatatttggtactcaatagtaatgctaagttagtaaataaatgatgaatttagaatcaaaataacgtgtctatggccaaaataaaacctgaaatccctgtcctatttcccagaggtaactgctgttaatagtttagttgtgtgcttccagacataccttcacagaatcatttatcacaataaaggtgtcatactatgcaaaaaaaaa

SEQ ID NO: 388381 - DNA, 419 bp, Homo sapiens
ggaacctgacaaatgtaaaaaatgtggcagtctttaaaaactgcttcattatacatggcttcactaatttcatactgaataaaagtggtatgagcataatgactgtttaaggatgtttcacaaaatgtaagcttcagagtgcacaacactatactgaatgaaatttataaatataaaagattacaatatctttatttcaaagatcttcctgtaaacagaatctgtactagaggaaaaacccttaaacaattattcagactttattcaactttagaggattttacgggggcaaaaaacctcctacaaatgtggaaaaacattttttcaagatatatgccttagaaaacaccagagtttatagtatagtagaatatattttacagatacagtgaatacaaacaaatgtccaaaattaagtc

SEQ ID NO: 388382 - DNA, 390 bp, Homo sapiens
gtttccttgactgcatcatcccaggctggctactccttttcttcaacacatacataaaattccacactaggtagtctttaaaaaacaattttccagtaatgggattgctgggtcaagtggtacttctggttctagatccttgaggaattgacacactattttccacaatggctaaactaatgtacactcccaccaacggggtaaaagcattcctgtttctccacatcctctccagcatttgttgtttcctgactttttaatgattaccattgtaactggcatgagatggtatctcattgtggttttgatttgcatttctctaatgaccagtgatgatgagctttttttcatatgcttgttggccacataaatgtcttcttttgagaaatg

SEQ ID NO: 388383 - DNA, 315 bp, Homo sapiens
tcaactaattttttgtatttttagtagaaacggggtttcaccatattagccaggctggtctcgaactcctgccctcaggtgatccgccctcctcggcctcccagagtgctgggattttaggtgtgagccaccgcgccagccgtcactgtacttttaaaaccttttttctgcctagcttcattttcttattctattgaaatagaatataaatggaataaatattctattgattattacaatgataagctgtcagttctttaggatcaatgacattgttatgtattggactttctttgtcacagtaggagttagtat

SEQ ID NO: 388384 - DNA, 393 bp, Homo sapiens
gactcaattctcattgtcttctttctctttctaaaatataaacaaatttccccttcaacctaaaattgggagatagtgaagaagctcagcttttatagtaggaatataataagatttcattctgaaacactatgtaatcagccattactaccatacaaatgttattttagaaaaaatgttgaatgtctagtgacttcagcaatttagtttttggtcttggaccagtcataagtaccatatcagagcctggtatgatctgggttgacattcacatcctgagctgaactcctgagcaattcttgcactttgatgcaagtcagttatttacccaatcttttccatataccatttgactttcatttcagaattgcaaaaagtattccatggttttgg

SEQ ID NO: 388385 - DNA, 869 bp, Homo sapiens
ggctgcgcgcgccgcggaggcggtgggaaaggcacgcggctcgtccggcgtctcctgggggctttgcctgcgggcgggcagggaggaagacagctggggccgtttgctctactacctgccctggcattaagggaacaaagtgaccaaacccagtgccagcgtttactaagcacctactacgtgcaaggcactgggcaatccgagaggaagaggcctcagtctccaggaagggtggaccttaagatggattggctggaaggcgacagcccgagcacaagacagacgcgttagaggccaatactaaggtcattcattctgccagagtatggaggaaggctttcaggagtggtcgccaaggtggcctttcagctggatcccggaggagcggatataaccaggagggcacttcacagccttctgtgcttaggaactctatacagcacttcagcaatagatttgggggccactttaaacagcaaaatcaccaacggaaagcaaaacatgtgatggctcggcacagtggcatgtgcctatagtcccagctactcaggaggctgagacaggagggtcacttgagcccaggagtttgagtccagcctggtcaacatagagagatcctgtttctaaaaacaaaaaaatcatggcaccaaatagaccatggaaaggacactcgtttacagtacgagagttgaaacaagaaggcagaatcttgtcttgtttggcctcagctggcaacgttcccgtagggtgactcaagtatctcgttactgtgcatgttcaaaagtgactacaaaggtgctatgactacttcgaggttacaaataagtttcagcaataggcaaatttgcaaacagaatctgtgaataatg

SEQ ID NO: 388386 - DNA, 386 bp, Homo sapiens
tacttgagtttgaattctggctttgaatcttagtaactgtgtgaccttaggcaagttaccttacctctctgttttagtttcctgatccacacaatagagatactaacagtacctgccttctggggttgttaagaaatgtaaatgagttaatgcatgtacagtgcttatgacagtggccctgtttagctacataagtgtagcctaaatatcctacatgtatatacacacagccctacacagaccaagtggtcctgtttagctatatacatataagctaaatgcccacaacacagtgtgagtcttataggacactctttaaattaatagtgggcaacctctggcttaaacccattctttctgtaggtgaatcctaagtagtccgatca

SEQ ID NO: 388387 - DNA, 427 bp, Homo sapiens
ttaggtctctgaatgtgataagaaacaaatcctattgatgagaagaattatagtagctttaaggttgcaatggtttagatcaaaaaaagtaaaacagattcttgagatattaaggtgacaaatctattgcattggtggctaagagatgtcaataatgattcctaaatttctggcttacacaactacatacatattgacaccattcactgagattaaaaaaaaaaataggagaggagtttggaagaaaatatcacaaattcaattttggacaagctgagtcagaacttttaaaatctaagaggaaatgtaatctggaatgtcagatatatgaatctggagctacctgaactagaaacacttgaaagtattaaggtatcgataactaaagcttaggataaaaacagagacaagtaaaagcccaaatttt

SEQ ID NO: 388388 - DNA, 415 bp, Homo sapiens
atgggcatctctacctgtgcatcaggatgtcatttttttgagttgcgtagagaaggttctactcccacagcttgcatattgtccatgtctgtattaatcttgttatgaggcatcaactcagcatgggtaataggtagttacattaatgccagggctcaaggagtcccacccatttctttcaccaaatagcccacgaaagtgatgagagataggatgaccacatatataccgtaaacaccagaatgaaggcctttgtcactgctttccccctcagtgaaaaagtaggaaatgtttttaagtccctgctgttgtttgaatatttgattctccaaacctcatgttgaaatttggttcctaatgttggaggaggggccaaatggaggtgtttgggtcatggtcagtagctccctacagt

SEQ ID NO: 388389 - DNA, 540 bp, Homo sapiens
ctcagactcctgagtagctgggaccacaggcatgtgccgccgtgcccagctaatttattttactttttgtagaaacagggtcttcctgtgttgtgtaggcctcagccttctggggttggcttacctcagtctcctaaagtgttgggattataggcatgagccactgtgctcagcccccttttgttttcattacaagtttgcttttataacttagataaaggtgggaagacagttttcacaattaaggcagaacaagagataaagaaacataaagggagagttgtctttgtgggaagaaagtgctttctgtgaaagcacttttagcaggactgctgttttcaggccagagtagaagggccagaagcagtttttattcagatttcctcatcgtttccatcaaggtctcagtgactgtaaaggatgggttgaaatcagtctggactaagtgtggtttgctgctgctgcttatgaggattaagtgtctcgtttgtccggaggcccctctggtcacatgtagctgagcaggtggagtgatatgaa

SEQ ID NO: 388390 - DNA, 2512 bp, Homo sapiens
  misc_feature (909)..(909): n is a, c, g, or t
  misc_feature (960)..(960): n is a, c, g, or t
  misc_feature (1398)..(1398): n is a, c, g, or t
  misc_feature (1503)..(1503): n is a, c, g, or t
  misc_feature (1634)..(1634): n is a, c, g, or t
  misc_feature (2198)..(2198): n is a, c, g, or t
agtttagtttagtttagtttagtttagtttagtttagtttagtttagttttttaagacagggtctcgctctgtcacccaggctggagtgcaatggcatgatcatggctcactgcaaccttggcgtcccaggctcaagcgattctctcatttttgtctcccaagtggctggagctgcaggcatgcaccaccatgcctggctaatttaaacattttttgtagagaaggggtttaccagtgtggcccacgctggtcttgaactcctgggctcaggcgatcctcctgctttggcctcccaaattgttgggattataggcgtgagccactgcacctggtcccccagaagctaaaggatggtgcaggttctgtttttaaatgtacctgttaagtatgtattagctcaaacagagtttacctgagatgtgcatctggggtccaccctctttggcactgtccctcattttcctcctccaacattctcccaatctctctctgttaaccccaacaacctgccacccctccctaacaaaggattcccagctcaaggccaattccaattggatcgagtttttcttctgcagaaattgtggggaggtggcttcagaggctcacaagcagaaccccacccagacacataaacctttctttggctggtaccaactcctctattgcagggtatggtccaagtaggttatacaagtctctacctcttctagctgaagccaacctcccaggaaaaggatgagaggagaaagccatcctgcctggtgtgtggataataccaccaccagagtctcctgtaattttgattcgatggcatgcagctgcgtgacctaaggcacgtatctccattcacagggtgtggtcagtactctgtgaatatcaggtgttctgtctgccctgtctcctgncttcctggagcctgcccttacccagtgagtccctggagggaacattctggnatctggctgtgagctgtcacagacatgggtttctttcggttcccagaatgatgggatgccagccgctggctgcccccaagaaacttgggagcaggacaggcttggctgtcccagaggaagagcctggcattgggccaggaggctcaggagggaagatgagctcattctgcccagctcggttctcccgtatgcagaccaggtcatcacagggacctgcctccacatttgcatcccccacggcatattttcccagcacatgcagcattgggaacttgaacgtccctctgcttttccttggtgagacccaccagccccgccttaggaaggaggctgaacatttgacggagctttcctgtcacctgtgagcgacgtgcacgctgcttccgaagaaagagacatccccctactgttttctcacagtgggatgattcaactttntctttctcacaatcccagataatcatatcttcccaggttttgtcatctttgaggactactcactatctagttatgagtcaaacaaaacccaatttaactgataantaaccagccatcacgtatccctgaagataaacctggtttatcctttttataccctctggcagagcaaaggaacaaggagtttgggagagaaaaaaaaacacaacactagaaacagcactgacacaggtcgntaaatacagatgtgaccagccttgattacaagtgttgtcatcctcttttaacagggacctaccccgaactttcatgaacccctggtagctgaatagcagcttgtctaagcgaggtgcagggattttgtcaaagtcggcctcggtgttaaaggcagggccacctaccatgaacttctctctgtgactttattctttagcagtgctcaagtgtaaataaacttgtttaccaggatcagaatggccatgttaatgaagtcttatttgtgtcaccacaatgacaagtaatttgtgcacagctggactcggagaggggacaaaaccagagaaattgtatttctgttctgaagtttccatacagatgccttaggccaaagttagtacagccaatatttgcctgtttctttggattgtgtgtccatgctggagaaaagccttgttactgtgcccagtgtggtaaacgaaattatatgtacgcagtgagaagaaaaatgaaataagaagcactgatgaatgtacccacgggtgtgaccttgggggccagtgtgtggtttttatgaaatgaangcatgaatacgaggaccctaattattgctttcaacggacaaagtatggtgaatatatagagaacgttgctgtacaacactggctgtgtctcaaagcggctttagaagtaaatatagaaattctttggtacatggtattgcatagaaaagtcattaagaaaaaagcaagacaatttgttaagaccttgttaagtggagctgggggatgattaattttgtttgtttgtttttgttgttccctggtagagctcaacaaactacagaccatgggccaaatctgacccaccgctgcttttgtaaataaaactttattgg

SEQ ID NO: 388391 - DNA, 250 bp, Homo sapiens
aggaagaagaaacaaagccaacttgtaaataataatgaggagagaccctcgactgagtcaggtttgaacatatcagctgtaaaagacatttcgaagatgactgaggaacaacaggcacaaagcagattgttaaattgcagtattaagggtgacaatgctaataacattaagtagaaaaatgttactgtaggtacacaagtacactattttgagtgaaatatgaacctttctttcaagtaagagtctgctc

SEQ ID NO: 388392 - DNA, 579 bp, Homo sapiens
  misc_feature (96)..(96): n is a, c, g, or t
ataagtccaaatattgctcacctcagggccagcctgtgacagggtacccacaggatggttcatattgaaaactggggggaccatgctcgggggagntggtgtagctctgaggtctgggaaaccattccagctcctgccagttttaacttgtgtttaattcctggcacagttgtcctggaaatgcctttttctcttgcctgggaaccactagaaggggatgttgtctgtgttggccagggccatgcaaattcaacatcttgtttctgcccttcccccgtgtagctgaggctaggtgttggcattacccagtgcttgttcttcagagagcaaaagcactgctcgtcatgtctgaaatttagtgagtgagctcacccactaggctggtgtttcctgcccgtggctgcacattggaagcaccggggcactttgagaactacagatgcctgggtcccagagcatctaaggtgctctagggtgtgtccaggacacagccctggttgaggaccactgctatattgtatggcctcttttaaaaaagttaattttacttgactactcctaagctcggggagtcacctc

SEQ ID NO: 388393 - DNA, 1038 bp, Homo sapiens
ggcaagaatgtttgtgacctttcactaccaccacctcccccgagcatggtccccccagttttcaatatgaaccatcctgtgggtaccctgtcacaggctggccctgaggtgagcaatatttggactgtgatgttggttgttctccactctttctacaggacagaacagggcctctagagtgggaaatggctttgggaaatatgccaagcagtagccttgttcttcaacttgcccaagaggataattctccacacccttcctgtactcagtcctcagtttgcctggtgagagagcagcctcctcccgtgtgctctgccagctggacccagactggccatattaccagtgagaccaaaaagatggaggtggggaggtagctctgaggtctgggaaaccattccagctcctgccagttttaacttgtgtttaattcctggcacagttgtcctggaaatgcctttttctcttgcctgggaaccactagaaggggatgttgtctgtgttggccagggccatgcaaattcaacatcttgtttctgcccttcccccgtgtagctgaggctaggtgttggcattacccagtgcttgttcttcagagagcaaaagcactgctcgtcatgtctgaaatttagtgagtgagctcacccactaggctggtgtttcctgcccgtggctgcacattggaagcaccggggcactttgagaactacagatgcctgggtcccagagcatctaaggtgctctagggtgtgtccaggacacagccctggttgaggaccactgctatattgtatggcctcttttaaaaaagttaattttacttggaaatgatttcaaagctacagaaaagttgcaagaataaaaactgtacaaatgaggctcaaatatcctttgcccagatacacctattaacatttcgtcccattctatctgtcatgtgtgttctcaaatgtgtgtgcgttctctctcccttgcgccaaccccctgtctctccctctccctccctcctgctgcctccacacctgtcatggcctttta

SEQ ID NO: 388394 - DNA, 427 bp, Homo sapiens
cagcatgggagctttggggttttaaaacaaattttttaagccagtcatatttagcagtggggggttgtataccaactttagtgacactaatgttattaaattctaataacccactaccatcagaccagcccagcttgggagttttgacctgctccatttccgacctgggctgtttcacccctccatagacaacctggatagtcccctgtcctgggaggtcaccatgttgaagctgaacttagtgtggacacccaaactgcataatgcattacagtctagaactcctgggctcaagggatcctcccacctcagcctcctgagtagctaggaccacagggtgcaccaccgcgcccagctgtcttcctttttttttctgagaccgagcctcactcagctgtccaagctagagtgcagtggtgtgatctcc

SEQ ID NO: 388395 - DNA, 798 bp, Homo sapiens
tgaaaataaaaataaggatctttttgaaattttggtagcagttgccacctgttctctcagaaaagtaactgcttttacagaaaactctaaataattttcaaaacccagtaaaacatggtctttattgcttatgtattcccttaatttgaagaatatttttaaacgctcaaaaatggaaaattcaatgttggtcatcttaaagattctagatgtatttcagcccaagcttgacaaacaagtgctttaggtatcctcttccctccttagctccttaaggaccacactgtggaaggaagactggaaaggcctcagcaggggagaaaccatgtgatggaggctcagagtggacttctgatctagtagtggcttcaggaagggacgccagacttgccattccagcaggggtcgaggcctccctgtctcgtgaagaggaaggtgtgaaatcctcttatagacacatgattctctttcagtgtattttctttattccatcttgacctcaggatggataactcatcatcccttttggcacggatcaaaatccctggataaatgccaaccttaagtttgcctgcatgtgtgtaaccatggccaaggtaaactggtctcttgggtttcttttgagttgaaatgagctgagctgtttgtttcctctgagccatatacagatgctttttgaactatctttgtgtttgagggaattttttttcatggtatcagcacaccacttcctccaagtcattactttgaaacagttttgtagagggagatattcctgctggccaccagcctagccaa

SEQ ID NO: 388396 - DNA, 592 bp, Homo sapiens
gagggacccattagcagaggcagcgtctggcctcagacatccactcatcaggtccagaccagaccgtgggccttggctgtatcttctgatccactccgttgctaagttcccctctgtacctaaactctgtctccctttacttcacttggctttttagagatttctcagccttggtgtgtgttgtccccagccctgtgatgtacaagtaattgcctgtatacgtgggattagccagcttgctcaggaagtcagtgttgtggttagtgggaaattcagaccggttgagtccaaggaaaccacttttccttagttctgttttctgaaccaaagtccatttgagatgaggggttgtgactagatcttctctggacagttgaatatagagcagggcccccatctgtgtcaccggggctcatgaatcctccttgccaatgactagagtccttgaaggaataagggctgggtcagtgtttcccaacccagaatataactcggagacctcttaagttgtcaggaagccatcccagtgttttgcccgtatcttctaattaataactaccctgccccctcactccgtctcaaaatattcaca

SEQ ID NO: 388397 - DNA, 467 bp, Homo sapiens
aggataaaataaggcgaggccagtcaggctgattgcgacggacctgtcagctcagaaacattgagttagtgtgacgaggaaggatcacttactttaagacagtggaggaagagagaggatagaagagcctattatgcaatggattctttaaaatcaagtcatctttataactattaataagactattcagataaatcatagatctcagtctctagccactttagggaaataggtaaggcatcttgttttttacaagtttgaaatgatgctttcctcctgttgagaaagacactattcataggaaaaagttccatgtccctaagatgaggatctgccgattccatgactgggaatatttaggcgtttcttgctctagtttatgaagctctagaaatacgccacctgtgttaggctggtaagaaagagactcataagttcgcttttctctggatgtgcagaattggttg

SEQ ID NO: 388398 - DNA, 730 bp, Homo sapiens
tgctaggctccagcggctcccggccagcggggacgtggaggtgacatttctctgacccacaggactgtgggcgccctgccgagcgtcgcgcggtcttggggcgacctgcagtggggcccctgcggcgcagcgcgcggtgggactggccgggttcccgcgccgcccagggcctgtgtctgcgccggttcctggcaagggcaccttggccgggcggcccgcgtcccctgcgcttcccacacccacgtgggcggacccggcccgcaagctgggccagcctgcggtttccgggcactggggagtgcgcagagccccgggccagcgaccgcagccggggcccctggcttctcccgagcactttcccccggaccggtccctccagggtggcgggcggcacccagggccggcgctcctcaccaacgcgctgcagctacgggctcaggagggagccgcagcgtcggaggaggaaagcatttaagaatagcacaaagccttaggctcgaggaagcgtgactgcttacgtgttgaaaataaaggttctgtaagtcccaccgcgggtgcatattgaaaagaaagggatcattagcacgcgaccctcgcctaggagtatataaaccgcagcacgactttcggatcacaaaggcagagaaaagaacacattgaaggcttttgctcacttttccaagttgtttcgtttcgttttgtttctaatgtggacgatcatttaaaatgc

SEQ ID NO: 388399 - DNA, 293 bp, Homo sapiens
ttttttacttttgaaggataattttacatgttgcagaattccagtttgtttgcttctctcaacactttaaatatttcactctactctttttttgcttgcatggtttccgaggaaaaaccaggtgtaattcttatccttgctcctctatagataaggtgggttttatttcactgacttctttcagaattttcttttatctttgatttttttgtagtttgaatacattatgcttaggtgtgggtgttttttacatttattctgcttggtgttctctcagctttctggacttgtgg

SEQ ID NO: 388400 - DNA, 1567 bp, Homo sapiens
  misc_feature (339)..(339): n is a, c, g, or t
  misc_feature (1480)..(1480): n is a, c, g, or t
gtgcaaaccaccataaaaaattagattatcagagctttcattctttctagctgaaaatgatgaaggttgacagggttatcccaatgcaaattgctaaactcttcactaagattgcaccacctagaaaatatgacccacaatagtccagagaattagcctcttttttttttttttatggtggagaagtgaaggtgaaaaggcccagagtagaaatttgagcttcttttaggcagcattgagcttacatgttgtcctcaggaagcagtgatacctcaatggtaccatcatggaatattttctccagtgtgattttctgtataatacattagaaagtacttntgagtctatttgaatgagagggcccatattaatgttgagataaagcagtattgccttaatattttcatctctaatgttgactagaattagacacagatagaaaagggttaagagaaacagttatttgttttagtttccaatttcgatagtcttgttttaaaaaaagttttaattgaaattcatgacttaggactcaaaagcaatttgtaaagaagatcaaaacaaccagtgtgattttactatagggatttgaaattttgcacatatccacttattagtaagcggaaggagaaagaacactcatgagattaagctcatcatttcatactttagtttgtaatcttgtcatattgaattctaacgtgtgcagggtaccctgttgggtattgactgagagggtgggaaagtgcaagatgaacattaaagtgccctcaacaagcttacattctggtaaaggagactacttactaaacaaggcagcagaaaataatgctgggcataggcccaggccatggccagtagaagcacaggtagaaaggttcattctggaaaggactccagagaaggtttaatggagaagaaaaactagtcgtacaggaccttggagtgggagaatgtttcccaaattggaaaatccaggaagaagattccaagctgagcaaggaaattgagctgtgaatctaagcacagacagtgggtggcttgcatggattaggaccgtgaattggatatggctcgttgcacatgggtctaagaacattaaaatatgtggctggacaagttacttggggttcaacactagaagtgcacacttattccctaaacattgaagagccattgacttaaagacttcaactttgggggagcaagtgggacagatccatgttttaggtaggtcaacctgggggtaggtgaagatgagttcacaggtaagaaagtgcaagcagagccaggcgcggtggctcacacctgtaatcccagcactttgggaggccgaggcgggtggatcacgaggtcaggagatggagaccatcctgaataacacggtgaaaccctgtctctactaaaaatacaaaaaaatagctgggcgaggtggcgggcgccggtagtcccagctactcgggaggctgaggcaggagantggcgtgaacccgggaggcggagcttgcagtgagccgagatctcgccactgcactccagcctgggcgacagagtgagactccatctc

SEQ ID NO: 388401 - DNA, 2678 bp, Homo sapiens
ggaaggcactgcgtaggcagcctccccggagcccacgaggctccccagcaccgttcactggtgggaggctgagccggtggaaaagacaccgggaagagactcagaggcgaccataatgtcgttacgtgtacacactctgcccaccctgcttggagccgtcgtcagaccgggctgcagggagctgctgtgtttgctgatgatcacagtgactgtgggccctggtgcctctggggtgtgccccaccgcttgcatctgtgccactgacatcgtcagctgcaccaacaaaaacctgtccaaggtgcctgggaaccttttcagactgattaagagactggacctgagttataacagaattgggcttctggattctgagtggattccagtatcgtttgcaaagctgaacaccctaattcttcgtcataacaacatcaccagcatttccacgggcagtttttccacaactccaaatttgaagtgtcttgacttatcgtccaataagctgaagacggtgaaaaatgctgtattccaagagttgaaggttctggaagtgcttctgctttacaacaatcacatatcctatctcgatccttcagcgtttggagggctctcccagttgcagaaactctacttaagtggaaattttctcacacagtttccgatggatttgtatgttggaaggttcaagctggcagaactgatgtttttagatgtttcttataaccgaattccttccatgccaatgcaccacataaatttagtgccaggaaaacagctgagaggcatctaccttcatggaaacccatttgtctgtgactgttccctgtactccttgctggtcttttggtatcgtaggcactttagctcagtgatggattttaagaacgattacacctgtcgcctgtggtctgactccaggcactcgcgtcaggtacttctgctccaggatagctttatgaattgctctgacagcatcatcaatggttcctttcgtgcgcttggctttattcatgaggctcaggtcggggaaagactgatggtccactgtgacagcaagacaggtaatgcaaatacggatttcatctgggtgggtccagataacagactgctagagccggataaagagatggaaaacttttacgtgtttcacaatggaagtctggttatagaaagccctcgttttgaggatgctggagtgtattcttgtatcgcaatgaataagcaacgcctgttaaatgaaactgtggacgtcacaataaatgtgagcaatttcactgtaagcagatcccatgctcatgaggcatttaacacagcttttaccactcttgctgcttgcgtggccagtatcgttttggtacttttgtacctctatctgactccatgcccctgcaagtgtaaaaccaagagacagaaaaatatgctacaccaaagcaatgcccattcatcgattctcagtcctggccccgctagtgatgcctccgctgatgaacggaaggcaggtgcaggtaaaagagtggtgtttttggaacccctgaaggatactgcagcagggcagaacgggaaagtcaggctctttcccagcgaggcagtgatagctgagggcatcctaaagtccacgagggggaaatctgactcagattcagtcaattcagtgttttctgacacaccttttgtggcgtccacttaatttgtgcctatatttgtatgatgtcataatttaatctgttcatatttaactttgtgtgtggtctgcaaaataaacagcaggacagaaattgtgttgtttgttctttgaaatacaaccaaattctcttaaaatgattggtaggaaatgaggtaaagtacttcagttcctcaatgtgccagagaaagatggggttgttttccaaagtttaagttctagatcacaatatcttagcttttagcactattggtaatttcagagtaggcccaaaggtgatatgactcccattgtccctttatttaggatattgaaagaaaaaataaactttatgtattagtgtcctttaaaaatagactttgctaacttactagtaccagagttattttaaagaaaaacactagtgtccaatttcatttttaaaagatgtagaaagaagaatcaagcatcaattaattataaagcctaaagcaaagttagatttgggggttattcagccaaaattaccgttttagaccagaatgaatagactacactgataaaatgtactggataatgccacatcctatatggtgttatagaaatagtgcaaggaaagtacatttgtttgcctgtcttttcattttgtacattcttcccattctgtattcttgtacaaaagatctcattgaaaatttaaagtcatcataatttgttgccataaatatgtaagtgtcaataccaaaatgtctgagtaacttcttaaatccctgttctagcaaactaatattggttcatgtgcttgtgtatatgtaaatcttaaattatgtgaactattaaatagaccctactgtactgtgctttggacatttgaattaatgtaaatatatgtaatctgtgacttgatattttgttttatttggctatttaaaaacataaatctaaaatgtcttatgttatcagattatgctattttgtataaagcaccactgatagcaaatctctctccaaaattcttaaa

SEQ ID NO: 388402 - DNA, 2759 bp, Homo sapiens
ggaaggcactgcgtaggcagcctccccggagcccacgaggctccccagcaccgttcactggtgggaggctgagccggtggaaaagacaccgggaagagactcagaggcgaccataatgtcgttacgtgtacacactctgcccaccctgcttggagccgtcgtcagaccgggctgcagggagctgctgtgtttgctgatgatcacagtgactgtgggccctggtgcctctggggtgtgccccaccgcttgcatctgtgccactgacatcgtcagctgcaccaacaaaaacctgtccaaggtgcctgggaaccttttcagactgattaagagactggacctgagttataacagaattgggcttctggattctgagtggattccagtatcgtttgcaaagctgaacaccctaattcttcgtcataacaacatcaccagcatttccacgggcagtttttccacaactccaaatttgaagtgtcttgacttatcgtccaataagctgaagacggtgaaaaatgctgtattccaagagttgaaggttctggaagtgcttctgctttacaacaatcacatatcctatctcgatccttcagcgtttggagggctctcccagttgcagaaactctacttaagtggaaattttctcacacagtttccgatggatttgtatgttggaaggttcaagctggcagaactgatgtttttagatgtttcttataaccgaattccttccatgccaatgcaccacataaatttagtgccaggaaaacagctgagaggcatctaccttcatggaaacccatttgtctgtgactgttccctgtactccttgctggtcttttggtatcgtaggcactttagctcagtgatggattttaagaacgattacacctgtcgcctgtggtctgactccaggcactcgcgtcaggtacttctgctccaggatagctttatgaattgctctgacagcatcatcaatggttcctttcgtgcgcttggctttattcatgaggctcaggtcggggaaagactgatggtccactgtgacagcaagacaggtaatgcaaatacggatttcatctgggtgggtccagataacagactgctagagccggataaagagatggaaaacttttacgtgtttcacaatggaagtctggttatagaaagccctcgttttgaggatgctggagtgtattcttgtatcgcaatgaataagcaacgcctgttaaatgaaactgtggacgtcacaataaatgtgagcaatttcactgtaagcagatcccatgctcatgaggcatttaacacagcttttaccactcttgctgcttgcgtggccagtatcgttttggtacttttgtacctctatctgactccatgcccctgcaagtgtaaaaccaagagacagaaaaatatgctacaccaaagcaatgcccattcatcgattctcagtcctggccccgctagtgatgcctccgctgatgaacggaaggcaggtgcaggtaaaagagtggtgtttttggaacccctgaaggatactgcagcagggcagaacgggaaagtcaggctctttcccagcgaggcagtgatagctgagggcatcctaaagtccacgagggggaaatctgactcagattcagtcaattcagtgttttctgacacaccttttgtggcgtccacttaatttgtgcctatatttgtatgatgtcataatttaatctgttcatatttaactttgtgtgtggtctgcaaaataaacagcaggacagaaattgtgttgtttgttctttgaaatacaaccaaattctcttaaaatgattggtaggaaatgaggtaaagtacttcagttcctcaatgtgccagagaaagatggggttgttttccaaagtttaagttctagatcacaatatcttagcttttagcactattggtaatttcagagtaggcccaaaggtgatatgactcccattgtccctttatttaggatattgaaagaaaaaataaactttatgtattagtgtcctttaaaaatagactttgctaacttactagtaccagagttattttaaagaaaaacactagtgtccaatttcatttttaaaagatgtagaaagaagaatcaagcatcaattaattataaagcctaaagcaaagttagatttgggggttattcagccaaaattaccgttttagaccagaatgaatagactacactgataaaatgtactggataatgccacatcctatatggtgttatagaaatagtgcaaggaaagtacatttgtttgcctgtcttttcattttgtacattcttcccattctgtattcttgtacaaaagatctcattgaaaatttaaagtcatcataatttgttgccataaatatgtaagtgtcaataccaaaatgtctgagtaacttcttaaatccctgttctagcaaactaatattggttcatgtgcttgtgtatatgtaaatcttaaattatgtgaactattaaatagaccctactgtactgtgcttggctttgattacgtaatttgtatccgggaatgtattggtcaattggcattaaacataattaaatggttatgttcagattggatttgttagcacccgatggagattttcataaaaagaataaagatattagagaaaaaatgtgggctgtggaataacatggggggcagaagagtaggtaaaagaagtggaaaaggggcaaagaaggtgtagcaaaacgggtagtggatacatgtgagata

SEQ ID NO: 388403 - DNA, 969 bp, Homo sapiens
ccagttcctgcttctatgaaactaaagccagtaaggtctgcaaaataaacagcaggacagaaattgtgttgtttgttctttgaaatacaaccaaattctcttaaaatgattggtaggaaatgaggtaaagtacttcagttcctcaatgtgccagagaaagatggggttgttttccaaagtttaagttctagatcacaatatcttagcttttagcactattggtaatttcagagtaggcccaaaggtgatatgactcccattgtccctttatttaggatattgaaagaaaaaataaactttatgtattagtgtcctttaaaaatagactttgctaacttactagtaccagagttattttaaagaaaaacactagtgtccaatttcatttttaaaagatgtagaaagaagaatcaagcatcaattaattataaagcctaaagcaaagttagatttgggggttattcagccaaaattaccgttttagaccagaatgaatagactacactgataaaatgtactggataatgccacatcctatatggtgttatagaaatagtgcaaggaaagtacatttgtttgcctgtcttttcattttgtacattcttcccattctgtattcttgtacaaaagatctcattgaaaatttaaagtcatcataatttgttgccataaatatgtaagtgtcaataccaaaatgtctgagtaacttcttaaatccctgttctagcaaactaatattggttcatgtgcttgtgtatatgtaaatcttaaattatgtgaactattaaatagaccctactgtactgtgctttggacatttgaattaatgtaaatatatgtaatctgtgacttgatattttgttttatttggctatttaaaaacataaatctaaaatgtcttatgttatcagattatgctattttgtataaagcaccactgatagcaaatctctctccaaaattcttaaa

SEQ ID NO: 388404 - DNA, 1769 bp, Homo sapiens
ggaaggcactgcgtaggcagcctccccggagcccacgaggctccccagcaccgttcactggtgggaggctgagccggtggaaaagacaccgggaagagactcagaggcgaccataatgtcgttacgtgtacacactctgcccaccctgcttggagccgtcgtcagaccgggctgcagggagctgctgtgtttgctgatgatcacagtgactgtgggccctggtgcctctggggtgtgccccaccgcttgcatctgtgccactgacatcgtcagctgcaccaacaaaaacctgtccaaggtgcctgggaaccttttcagactgattaagagactggacctgagttataacagaattgggcttctggattctgagtggattccagtatcgtttgcaaagctgaacaccctaattcttcgtcataacaacatcaccagcatttccacgggcagtttttccacaactccaaatttgaagtgtcttgacttatcgtccaataagctgaagacggtgaaaaatgctgtattccaagagttgaaggttctggaagtgcttctgctttacaacaatcacatatcctatctcgatccttcagcgtttggagggctctcccagttgcagaaactctacttaagtggaaattttctcacacagtttccgatggatttgtatgttggaaggttcaagctggcagaactgatgtttttagatgtttcttataaccgaattccttccatgccaatgcaccacataaatttagtgccaggaaaacagctgagaggcatctaccttcatggaaacccatttgtctgtgactgttccctgtactccttgctggtcttttggtatcgtaggcactttagctcagtgatggattttaagaacgattacacctgtcgcctgtggtctgactccaggcactcgcgtcaggtacttctgctccaggatagctttatgaattgctctgacagcatcatcaatggttcctttcgtgcgcttggctttattcatgaggctcaggtcggggaaagactgatggtccactgtgacagcaagacaggtaatgcaaatacggatttcatctgggtgggtccagataacagactgctagagccggataaagagatggaaaacttttacgtgtttcacaatggaagtctggttatagaaagccctcgttttgaggatgctggagtgtattcttgtatcgcaatgaataagcaacgcctgttaaatgaaactgtggacgtcacaataaatgtgagcaatttcactgtaagcagatcccatgctcatgaggcatttaacacagcttttaccactcttgctgcttgcgtggccagtatcgttttggtacttttgtacctctatctgactccatgcccctgcaagtgtaaaaccaagagacagaaaaatatgctacaccaaagcaatgcccattcatcgattctcagtcctggccccgctagtgatgcctccgctgatgaacggaaggcaggtgcaggtaaaagagtggtgtttttggaacccctgaaggatactgcagcagggcagaacgggaaagtcaggctctttcccagcgaggcagtgatagctgagggcatcctaaagtccacgagggggaaatctgactcagattcagtcaattcagtgttttctgacacaccttttgtggcgtccacttaatttgtgcctatatttgtatgatgtcataatttaatctgttcatatttaactttgtgtgtggtctgcaaaataaacagcaggacag

SEQ ID NO: 388405 - DNA, 478 bp, Homo sapiens
gctcgacgttgatatgctacacaaagctggataatgccacatcctatatggtgttatagaaatagtgcaaggaaagtacatttgtttgcctgtcttttcattttgtacattcttcccattctgtattcttgtacaaaagatctcattgaaaatttaaagtcatcataatttgttgccataaatatgtaagtgtcaataccaaaatgtctgagtaacttcttaaatccctgttctagcaaactaatattggttcatgtgcttgtgtatatgtaaatcttaaattatgtgaactattaaatagaccctactgtactgtgctttggacatttgaattaatgtaaatatatgtaatctgtgacttgatattttgttttatttggctatttaaaaacataaatctaaaatgtcttatgttatcagattatgctattttgtataaagcaccactgatagcaaatctctctccaaaattcttaaa

SEQ ID NO: 388406 - DNA, 2635 bp, Homo sapiens
ggaaggcactgcgtaggcagcctccccggagcccacgaggctccccagcaccgttcactggtgggaggctgagccggtggaaaagacaccgggaagagactcagaggcgaccataatgtcgttacgtgtacacactctgcccaccctgcttggagccgtcgtcagaccgggctgcagggagctgctgtgtttgctgatgatcacagtgactgtgggccctggtgcctctggggtgtgccccaccgcttgcatctgtgccactgacatcgtcagctgcaccaacaaaaacctgtccaaggtgcctgggaaccttttcagactgattaagagactggacctgagttataacagaattgggcttctggattctgagtggattccagtatcgtttgcaaagctgaacaccctaattcttcgtcataacaacatcaccagcatttccacgggcagtttttccacaactccaaatttgaagtgtcttgacttatcgtccaataagctgaagacggtgaaaaatgctgtattccaagagttgaaggttctggaagtgcttctgctttacaacaatcacatatcctatctcgatccttcagcgtttggagggctctcccagttgcagaaactctacttaagtggaaattttctcacacagtttccgatggatttgtatgttggaaggttcaagctggcagaactgatgtttttagatgtttcttataaccgaattccttccatgccaatgcaccacataaatttagtgccaggaaaacagctgagaggcatctaccttcatggaaacccatttgtctgtgactgttccctgtactccttgctggtcttttggtatcgtaggcactttagctcagtgatggattttaagaacgattacacctgtcgcctgtggtctgactccaggcactcgcgtcaggtacttctgctccaggatagctttatgaattgctctgacagcatcatcaatggttcctttcgtgcgcttggctttattcatgaggctcaggtcggggaaagactgatggtccactgtgacagcaagacaggtaatgcaaatacggatttcatctgggtgggtccagataacagactgctagagccggataaagagatggaaaacttttacgtgtttcacaatggaagtctggttatagaaagccctcgttttgaggatgctggagtgtattcttgtatcgcaatgaataagcaacgcctgttaaatgaaactgtggacgtcacaataaatgtgagcaatttcactgtaagcagatcccatgctcatgaggcatttaacacagcttttaccactcttgctgcttgcgtggccagtatcgttttggtacttttgtacctctatctgactccatgcccctgcaagtgtaaaaccaagagacagaaaaatatgctacaccaaagcaatgcccattcatcgattctcagtcctggccccgctagtgatgcctccgctgatgaacggaaggcaggtgcaggtaaaagagtggtgtttttggaacccctgaaggatactgcagcagggcagaacgggaaagtcaggctctttcccagcgaggcagtgatagctgagggcatcctaaagtccacgagggggaaatctgactcagattcagtcaattcagtgttttctgacacaccttttgtggcgtccacttaatttgtgcctatatttgtatgatgtcataatttaatctgttcatatttaactttgtgtgtggtctgcaaaataaacagcaggacagaaattgtgttgtttgttctttgaaatacaaccaaattctcttaaaatgattggtaggaaatgaggtaaagtacttcagttcctcaatgtgccagagaaagatggggttgttttccaaagtttaagttctagatcacaatatcttagcttttagcactattggtaatttcagagtaggcccaaaggtgatatgactcccattgtccctttatttaggatattgaaagaaaaaataaactttatgtattagtgtcctttaaaaatagactttgctaacttactagtaccagagttattttaaagaaaaacactagtgtccaatttcatttttaaaagatgtagaaagaagaatcaagcatcaattaattataaagcctaaagcaaagttagatttgggggttattcagccaaaattaccgttttagaccagaatgaatagactacactgataaaatgtactggataatgccacatcctatatggtgttatagaaatagtgcaaggaaagtacatttgtttgcctgtcttttcattttgtacattcttcccattctgtattcttgtacaaaagatctcattgaaaatttaaagtcatcataatttgttgccataaatatgtaagtgtcaataccaaaatgtctgagtaacttcttaaatccctgttctagcaaactaatattggttcatgtgcttgtgtatatgtaaatcttaaattatgtgaactattaaatagaccctactgtactgtgctttggacatttgaattaatgtaaatatatgtaatctgtgacttgatattttgttttatttggctatttaaaaacataacttctaaaagtagatgctattgaaacttctaaaactagg

SEQ ID NO: 388407 - DNA, 2232 bp, Homo sapiens
ggaaggcactgcgtaggcagcctccccggagcccacgaggctccccagcaccgttcactggtgggaggctgagccggtggaaaagacaccgggaagagactcagaggcgaccataatgtcgttacgtgtacacactctgcccaccctgcttggagccgtcgtcagaccgggctgcagggagctgctgtgtttgctgatgatcacagtgactgtgggccctggtgcctctggggtgtgccccaccgcttgcatctgtgccactgacatcgtcagctgcaccaacaaaaacctgtccaaggtgcctgggaaccttttcagactgattaagagactggacctgagttataacagaattgggcttctggattctgagtggattccagtatcgtttgcaaagctgaacaccctaattcttcgtcataacaacatcaccagcatttccacgggcagtttttccacaactccaaatttgaagtgtcttgacttatcgtccaataagctgaagacggtgaaaaatgctgtattccaagagttgaaggttctggaagtgcttctgctttacaacaatcacatatcctatctcgatccttcagcgtttggagggctctcccagttgcagaaactctacttaagtggaaattttctcacacagtttccgatggatttgtatgttggaaggttcaagctggcagaactgatgtttttagatgtttcttataaccgaattccttccatgccaatgcaccacataaatttagtgccaggaaaacagctgagaggcatctaccttcatggaaacccatttgtctgtgactgttccctgtactccttgctggtcttttggtatcgtaggcactttagctcagtgatggattttaagaacgattacacctgtcgcctgtggtctgactccaggcactcgcgtcaggtacttctgctccaggatagctttatgaattgctctgacagcatcatcaatggttcctttcgtgcgcttggctttattcatgaggctcaggtcggggaaagactgatggtccactgtgacagcaagacaggtaatgcaaatacggatttcatctgggtgggtccagataacagactgctagagccggataaagagatggaaaacttttacgtgtttcacaatggaagtctggttatagaaagccctcgttttgaggatgctggagtgtattcttgtatcgcaatgaataagcaacgcctgttaaatgaaactgtggacgtcacaataaatgtgagcaatttcactgtaagcagatcccatgctcatgaggcatttaacacagcttttaccactcttgctgcttgcgtggccagtatcgttttggtacttttgtacctctatctgactccatgcccctgcaagtgtaaaaccaagagacagaaaaatatgctacaccaaagcaatgcccattcatcgattctcagtcctggccccgctagtgatgcctccgctgatgaacggaaggcaggtgcaggtaaaagagtggtgtttttggaacccctgaaggatactgcagcagggcagaacgggaaagtcaggctctttcccagcgaggcagtgatagctgagggcatcctaaagtccacgagggggaaatctgactcagattcagtcaattcagtgttttctgacacaccttttgtggcgtccacttaatttgtgcctatatttgtatgatgtcataatttaatctgttcatatttaactttgtgtgtggtctgcaaaataaacagcaggacagaaattgtgttgtttgttctttgaaatacaaccaaattctcttaaaatgattggtaggaaatgaggtaaagtacttcagttcctcaatgtgccagagaaagatggggttgttttccaaagtttaagttctagatcacaatatcttagcttttagcactattggtaatttcagagtaggcccaaaggtgatatgactcccattgtccctttatttaggatattgaaagaaaaaataaactttatgtattagtgtcctttaaaaatagactttgctaacttactagtaccagagttattttaaagaaaaacactagtgtccaatttcatttttaaaagatgtagaaagaagaaacgcaactacctgagaagaaacgcaactacctgagaagaaacgcaactacctgagaagaaacgcaactacctgagaagaaacgcaactacctgagaagaaacgcatctacctg

SEQ ID NO: 388408 - DNA, 317 bp, Homo sapiens
gatttagatctgcttatagaagccttgaaacaaaagacccaatttaacaggtagcaaaacattgtaaggctggatgcggtggctcacacctgtaatcccagcactttgggaggccgaggcgggcagatcacttgaggtcagaagttcgagaccagcctggccaacaaggtaaaacccatttctaccaaaaaacacaaaaactagccaggcatagtagtgcttggtcccagctacttgggaggctgaggttggaggatcacttgaaccctggaggcaaaggttacagtgagctgagatcttgccacgttggtccagcc

SEQ ID NO: 388409 - DNA, 639 bp, Homo sapiens
tttaaagccacgtggatagaagctgcttggatgaccacattaagtgaatggccgcatctgtgcactggctctgcagccctgggcagcgacacagagacagcaagcagagcatccatcaccaggattctcagagtctcgccctgtcaccaggctggagtgcagtggcatgaactcagctcactgcaacctccacctcccgggttccagcgattctcctgcctcagcctcccgagtagctgggattacagatgtgcaccaccacgtccagctaatctttgtatttttagtagagatgggatttcaccatgttggccaggctggtctcaaaatcctgacctcaagcaatccacctgcctcggcctcccaaagtgctgggattacaggcgtgagccactgtgcccagcctgtcctctcactcttgaattccttcctgcatgacactaagaacccatgtgacctcccgggatgagccccgatttgggggttcacctgtgataaagtaagctggtgaacagcagggaagcactctgtgtctgtagcttcctgtgagtatgcaatcatttcaaaattaaaagtttgttaaagctataaaaattataaaataaattaataaaaatcattgtctcaatcttcacaaca

SEQ ID NO: 388410 - DNA, 636 bp, Homo sapiens
tcacatagaaaaactgtagagctttttagtctctaagagctttttcgtgcaaggtcacgcagctaattataagtagagcctgaaccggaacctatgtttgttgaccagacaactgtacctctacaaaatgacactaatatgtcaaaagtgaagttgacttgggatgaatatgctgcttgaattaagcttaggaagcctaaagcttaaaatacagtctttgaagcattttcaaagcatagttacttatttagtaagtttgtttccggctgggctggatggctcaaacctacaaccccagaactttgggtggccaaggcaggaggatctcctgagaccaagagttcaagaccagcctgggcaacataatgagacccacatccctataaaaattaaaattaaaattaaaaattagctgggctgtatggcaagcacctgtggttccagctacttgagaggctgaggtgagaggattgcttgcaccctggagggcgaggccatggtgaaccgtgatcacaccactgcacaccagcctgagcgacagagcaagaccctatctctttaatttaattttaaaatgacattaaattaggccgagcatggtggctcacgccttgtttgagaattttgtgcttgttc

SEQ ID NO: 388411 - DNA, 489 bp, Homo sapiens
ggggccgccatctcacactgactcagtgtccatcttgcagaaaggagagttgggacagatttgtcatctgcatgcttcagtatttgggtcctgtaagctgagcgcctggatcaagtggtatggtctgaggtgggaaagcaaagagaagagagtgctgtcctttttcatttggggctagtgtaacattaagaaattttactttattcttggccgggcgtagtgacttaggccggtaatcccagcactttgggaggcggaggcaggcagatcacttgaggtcaggagttcaagaccagcctggccaatgtggtgaaaccccatctctactaaaaatgcaaacattaactgggtgtggtggtgtgcacctgtaatcccagctattcaggaggctgaggtaggagaattgcttgaacccagaaggcggaggctgcagtgagctgagatcacgccactgcactccagcctgggcaacagagtgagacttgctct

SEQ ID NO: 388412 - DNA, 4460 bp, Homo sapiens
agcgcccggctccgcgcgagagccctgccagaggagcggctccggccgccgcgcctgacccttgtccggggtcttccgcacaggatagaccatgaagctgaaggaacttgagcggccagctgtccaggcatggagcccagccagccaataccctttgtatctggccacaggaacatctgcccaacagctagattcctccttcagcacaaatggcacattggaaatatttgaggttgatttcagggacccttctctggacttgaaacacagaggagtcctttctgccttgagcaggtttcacaagctggtctgggggagctttggcagtgggcttctggaaagctccggggttattgttggcggcggggacaatggcatgcttattctatacaatgtgacccacatcctgtcttcggggaaggagcctgtgattgctcagaaacagaagcacacgggggctgtcagagccctcgacttgaatcctttccagggcaacctcctggcttcaggggccagcgattctgaaatcttcatttgggatctgaataacttgaatgtgccaatgaccctgggatccaagtcacagcagcctccagaggacatcaaggcactgtcttggaaccggcaagcccaacacattctgtcttctgctcaccccagtggcaaggcagttgtgtgggatctcaggaagaatgaacctatcatcaaagtcagtgatcacagcaacaggggggatcttgtcagtgtcatggagccaggctgatgctgagctgctgctcactagtgctaaggacagccagatcttgtgccggaacctggggagcagtgaggtggtatataagctaccaacacagagcagctggtgctttgatgtgcagtggtgccctcgggacccttcagtgttctctgctgcctccttcaacggctggatcagtttgtactctgtgatgggtaggagctgggaagtccagcatatgagacaggctgacaagatctcctcttccttcagcaaaggccagcctctcccaccactgcaggtgccagagcaagtggcacaagcaccactgatacctcccctgaaaaaaccccccaaatggattagaagaccaacaggtgtttcatttgcttttggagggaagctggttacttttggcctccccagcacccctgcccatctggtgccacagccttgcccccgcctagtcttcatcagtcaagtcaccacagaatctgaattcctgatgcgatcagctgagctgcaggaggccttgggatcaggaaatctactgaattactgtcagaacaagagccagcaagctttactgcaaagtgaaaagatgctgtggcagttcctgaaggtgaccttagagcaagactccagaatgaaattcctaaagcttttaggatacagtaaagatgagcttcagaagaaggtggccacatggttgaagagtgacgtggggctaggtgagagtcctcagcccaagggaaatgacctcaacagtgacagacaacaggccttctgcagccaggcctccaaacacaccacaaaggaagcctctgcttcctcagccttctttgatgagctggtccctcagaacatgactccttgggagatccccatcacaaaagatattgatggactcctaagccaggctctcctgcttggggaactgggtccggccgtggagctgtgtctgaaggaggagcgctttgctgatgccattatcctggcccaggctgggggtacagatctgctgaagcaaacacaggagcgctacttggccaagaagaaaaccaaaatctcctcgcttctagcctgtgttgtgcaaaagaattggaaggatgtggtgtgtacctgtagcctgaagaactggagagaggcactggctttgctactgacatactcaggcacagagaaatttcccgagctctgtgacatgctgggaactcgcatggaacaggagggcagcagggcactaacctccgaagccagactctgttatgtgtgctcagggagtgtggagcggctggtggagtgctgggcaaaatgccaccaggctttgtcccccatggctctgcaggacctgatggagaaggtgatggttcttaacaggagcttggagcaactgcggggtcctcatggggtgagcccaggccctgccacaacctacagggtcactcagtatgccaacctcctggcagcccagggcagcctggccactgccatgagctttctacccagggactgtgctcagccaccagttcagcagctaagagatcggctttttcatgctcaaggttctgctgtcttgggccaacagtctccccctttccccttcccccggattgttgtgggagctaccctccactctaaagagacatcatcttacagattgggatcccagccttctcaccaggtcccaactccatctccaaggccaagggttttcacccctcagtcatcaccagcgatgcccttggcaccttcccatcctagcccttatcagggtcccaggacacagaatataagtgactacagggcacctgggccccaggccatccagcctttgcctttgagccctggggtaaggcctgcttcatctcagccacagctattaggagggcaaagggtgcaagttcctaacccggtgggattccctgggacatggcctcttcctggttcccctctacccatggcatgcccaggcatcatgcgacctggctctacctccctgcctgagactcctagactgttccctctgcttcctctgagaccactaggtcccggccgcatggtctcccacaccccagcccctcctgcaagcttccctgtgccataccttccaggggacccaggtgccccatgctctagtgtcctcccaaccactggcatcttgactcctcacccaggacctcaagattcctggaaagaagccccagcccccaggggaaacctccagaggaacaagctgccagagacatttatgcccccagcaccaattactgctccagttatgagcctcacccctgagctacaagggattcttccctcacagccccctgtctccagtgtgagtcatgctcccccaggagttccaggagaactcagcctgcagcagcttcagcacctgccacctgagaagatggaaaggaaggagctgcccccagagcatcagtccttgaagagcagctttgaggcgcttctccaacgctgctccctgtctgcaactgacttaaagacaaaaaggaagctggaagaggcagcccagcgtctggagtatctatatgagaagctctgtgaggggacactctcacctcatgtcgtggctgggctccatgaggttgcccgatgtgtggatgcaggaagctttgagcagggccttgcagtgcatgcccaggtggcgggctgtagcagcttcagcgaggtgtccagcttcatgcctatcctgaaggctgtcctcatcatcgctcataagctgctggtctaaaccaggcagcctctcttgctaggaggccacttctgctgttacataactcctccctgcagaagaggggacttctgcaacagattctgtttctttttcccgactcttttccttgctgccaggtatgtgatgctgtaggcttggctccaaaccagctgagtgcctgctttttactcctttatgtctggccttctaggatctgtccaagacactctcaggcctggaggcagggcatagaatcagttcttcactctccctaatactacactctgtaaggacctggggcaggatatcttctcccccagggatcttctatttaagtggcttctgagagggtgaacaggattgttacttttaagcctacctctgctgtgacccatcatgtgggtcttttgtttctcccttctgtggtttatgagcctgcccttaccttttccctgcctctgacttggtatttccaggtccgtatttctctgtagcccagggtctggggtagagctgactgctgttcaccctttgaacaactcatggacgtgagggatgggtgctgagcagaaccaagagaggaaactttggcgctgttaaaatggaatttctcatctgccggcattattaagggtgggctaggttggatggaaggtgaaagggatgaactgccttttgctggaagctgtcttaggctgtgagacaggagcaggggaaccacagcctatggggaactgcccttgactccacctatgttggagccttagcccaaggccattccttctgtgatgataaagcccagttctggaattggagccatattaaggaatgattctcttccagcgctgctcctcaagggttgggggtccttctccctcgcagccaccacatgtctcagggctaccttctccgattggatttgcatttgtggcactgtctttgatgcagtgatgtacttaatggtgcaataaagctgcttcgatttgg

SEQ ID NO: 388413 - DNA, 4444 bp, Homo sapiens
agcgcccggctccgcgcgagagccctgccagaggagcggctccggccgccgcgcctgacccttgtccggggtcttccgcacagtgggctgagggccatgtcagttttctgccacctacaggatagaccatgaagctgaaggaacttgagcggccagctgtccaggcatggagcccagccagccaataccctttgtatctggccacaggaacatctgcccaacagctagattcctccttcagcacaaatggcacattggaaatatttgaggttgatttcagggacccttctctggacttgaaacacagaggagtcctttctgccttgagcagggcaacctcctggcttcaggggccagcgattctgaaatcttcatttgggatctgaataacttgaatgtgccaatgaccctgggatccaagtcacagcagcctccagaggacatcaaggcactgtcttggaaccggcaagcccaacacattctgtcttctgctcaccccagtggcaaggcagttgtgtgggatctcaggaagaatgaacctatcatcaaagtcagtgatcacagcaacaggatgcactgctcaggcctggcctggcatcctgacatagccacccagttagtgctgtgctcagaggatgatcgacttcccgtgattcagctgtgggacttgcgctttgcctcctcgcccttgaaggtgctggagagccacagcagggggatcttgtcagtgtcatggagccaggctgatgctgagctgctgctcactagtgctaaggacagccagatcttgtgccggaacctggggagcagtgaggtggtatataagctaccaacacagagcagctggtgctttgatgtgcagtggtgccctcgggacccttcagtgttctctgctgcctccttcaacggctggatcagtttgtactctgtgatgggtaggagctgggaagtccagcatatgagacaggctgacaagatctcctcttccttcagcaaaggccagcctctcccaccactgcaggtgccagagcaagtggcacaagcaccactgatacctcccctgaaaaaaccccccaaatggattagaagaccaacaggtgtttcatttgcttttggagggaagctggttacttttggcctccccagcacccctgcccatctggtgccacagccttgcccccgcctagtcttcatcagtcaagtcaccacagaatctgaattcctgatgcgatcagctgagctgcaggaggccttgggatcaggaaatctactgaattactgtcagaacaagagccagcaagctttactgcaaagtgaaaagatgctgtggcagttcctgaaggtgaccttagagcaagactccagaatgaaattcctaaagcttttaggatacagtaaagatgagcttcagaagaaggtggccacatggttgaagagtgacgtggggctaggtgagagtcctcagcccaagggaaatgacctcaacagtgacagacaacaggccttctgcagccaggcctccaaacacaccacaaaggaagcctctgcttcctcagccttctttgatgagctggtccctcagaacatgactccttgggagatccccatcacaaaagatattgatggactcctaagccaggctctcctgcttggggaactgggtccggccgtggagctgtgtctgaaggaggagcgctttgctgatgccattatcctggcccaggctgggggtacagatctgctgaagcaaacacaggagcgctacttggccaagaagaaaaccaaaatctcctcgcttctagcctgtgttgtgcaaaagaattggaaggatgtggtgtgtacctgtagcctgaagaactggagagaggcactggctttgctactgacatactcaggcacagagaaatttcccgagctctgtgacatgctgggaactcgcatggaacaggagggcagcagggcactaacctccgaagccagactctgttatgtgtgctcagggagtgtggagcggctggtggagtgctgggcaaaatgccaccaggctttgtcccccatggctctgcaggacctgatggagaaggtgatggttcttaacaggagcttggagcaactgcggggtcctcatggggtgagcccaggccctgccacaacctacagggtcactcagtatgccaacctcctggcagcccagggcagcctggccactgccatgagctttctacccagggactgtgctcagccaccagttcagcagctaagagatcggctttttcatgctcaaggttctgctgtcttgggccaacagtctccccctttccccttcccccggattgttgtgggagctaccctccactctaaagagacatcatcttacagattgggatcccagccttctcaccaggtcccaactccatctccaaggccaagggttttcacccctcagtcatcaccagcgatgcccttggcaccttcccatcctagcccttatcagggtcccaggacacagaatataagtgactacagggcacctgggccccaggccatccagcctttgcctttgagccctggggtaaggcctgcttcatctcagccacagctattaggagggcaaagggtgcaagttcctaacccggtgggattccctgggacatggcctcttcctggttcccctctacccatggcatgcccaggcatcatgcgacctggctctacctccctgcctgagactcctagactgttccctctgcttcctctgagaccactaggtcccggccgcatggtctcccacaccccagcccctcctgcaagcttccctgtgccataccttccaggggacccaggtgccccatgctctagtgtcctcccaaccactggcatcttgactcctcacccaggacctcaagattcctggaaagaagccccagcccccaggggaaacctccagaggaacaagctgccagagacatttatgcccccagcaccaattactgctccagttatgagcctcacccctgagctacaagggattcttccctcacagccccctgtctccagtgtgagtcatgctcccccaggagttccaggagaactcagcctgcagcagcttcagcacctgccacctgagaagatggaaaggaaggagctgcccccagagcatcagtccttgaagagcagctttgaggcgcttctccaacgctgctccctgtctgcaactgacttaaagacaaaaaggaagctggaagaggcagcccagcgtctggagtatctatatgagaagctctgtgaggggacactctcacctcatgtcgtggctgggctccatgaggttgcccgatgtgtggatgcaggaagctttgagcagggccttgcagtgcatgcccaggtggcgggctgtagcagcttcagcgaggtgtccagcttcatgcctatcctgaaggctgtcctcatcatcgctcataagctgctggtctaaaccaggcagcctctcttgctaggaggccacttctgctgttacataactcctccctgcagaagaggggacttctgcaacagattctgtttctttttcccgactcttttccttgctgccaggtatgtgatgctgtaggcttggctccaaaccagctgagtgcctgctttttactcctttatgtctggccttctaggatctgtccaagacactctcaggcctggaggcagggcatagaatcagttcttcactctccctaatactacactctgtaaggacctggggcaggatatcttctcccccagggatcttctatttaagtggcttctgagagggtgaacaggattgttacttttaagcctacctctgctgtgacccatcatgtgggtcttttgtttctcccttctgtggtttatgagcctgcccttaccttttccctgcctctgacttggtatttccaggtccgtatttctctgtagcccagggtctggggtagagctgactgctgttcaccctttgaacaactcatggacgtgagggatgggtgctgagcagaaccaagagaggaaactttggcgctgttaaaatggaatttctcatctgccggcattattaagggtgggctaggttggatggaaggtgaaagggatgaactgccttttgctggaagctgtcttaggctgtgagacaggagcaggggaaccacagcctatggggaactgcccttgactccacctatgttggagccttagcccaaggccattccttctgtgatgataaagcccagttctggaattggagccatattaaggaatgattctcttccagcgctgctcctcaagggttgggggtccttctccctcgcagccaccacatgtctcagggctaccttctccgattggatttgcatttgtggcactgtctttgatgcagtgatgtacttaatggtgcaataaagctgcttcgatttgg

SEQ ID NO: 388414 - DNA, 4695 bp, Homo sapiens
agcgcccggctccgcgcgagagccctgccagaggagcggctccggccgccgcgcctgacccttgtccggggtcttccgcacaggatagaccatgaagctgaaggaacttgagcggccagctgtccaggcatggagcccagccagccaataccctttgtatctggccacaggaacatctgcccaacagctagattcctccttcagcacaaatggcacattggaaatatttgaggttgatttcagggacccttctctggacttgaaacacagaggagtcctttctgccttgagcaggtttcacaagctggtctgggggagctttggcagtgggcttctggaaagctccggggttattgttggcggcggggacaatggcatgcttattctatacaatgtgacccacatcctgtcttcggggaaggagcctgtgattgctcagaaacagaagcacacgggggctgtcagagccctcgacttgaatcctttccagggcaacctcctggcttcaggggccagcgattctgaaatcttcatttgggatctgaataacttgaatgtgccaatgaccctgggatccaagtcacagcagcctccagaggacatcaaggcactgtcttggaaccggcaagcccaacacattctgtcttctgctcaccccagtggcaaggcagttgtgtgggatctcaggaagaatgaacctatcatcaaagtcagtgatcacagcaacaggggggatcttgtcagtgtcatggagccaggctgatgctgagctgctgctcactagtgctaaggacagccagatcttgtgccggaacctggggagcagtgaggtggtatataagctaccaacacagagcagctggtgctttgatgtgcagtggtgccctcgggacccttcagtgttctctgctgcctccttcaacggctggatcagtttgtactctgtgatgggtaggagctgggaagtccagcatatgagacaggctgacaagatctcctcttccttcagcaaaggccagcctctcccaccactgcaggtgccagagcaagtggcacaagcaccactgatacctcccctgaaaaaaccccccaaatggattagaagaccaacaggtgtttcatttgcttttggagggaagctggttacttttggcctccccagcacccctgcccatctggtgccacagccttgcccccgcctagtcttcatcagtcaagtcaccacagaatctgaattcctgatgcgatcagctgagctgcaggaggccttgggatcaggaaatctactgaattactgtcagaacaagagccagcaagctttactgcaaagtgaaaagatgctgtggcagttcctgaaggtgaccttagagcaagactccagaatgaaattcctaaagcttttaggatacagtaaagatgagcttcagaagaaggtaagctgcttttcacatcagaaacatgtacttgttgaagagaagaagagaatgttgccagagtaaaccacctcagaatacctcttcctggccttattattgcatatgtggccacatggttgaagagtgacgtggggctaggtgagagtcctcagcccaagggaaatgacctcaacagtgacagacaacaggccttctgcagccaggcctccaaacacaccacaaaggaagcctctgcttcctcagccttctttgatgagctggtccctcagaacatgactccttgggagatccccatcacaaaagatattgatggactcctaagccaggctctcctgcttggggaactgggtccggccgtggagctgtgtctgaaggaggagcgctttgctgatgccattatcctggcccaggctgggggtacagatctgctgaagcaaacacaggagcgctacttggccaagaagaaaaccaaaatctcctcgcttctagcctgtgttgtgcaaaagaattggaaggatgtggtgtgtacctgtagcctgaagaactggagagaggcactggctttgctactgacatactcaggcacagagaaatttcccgagctctgtggacctgatggagaaggtgatggttcttaacaggagcttggagcaactgcggggtcctcatggggtgagcccaggccctgccacaacctacagggtcactcagtatgccaacctcctggcagcccagggcagcctggccactgccatgagctttctacccagggactgtgctcagccaccagttcagcagctaagagatcggctttttcatgctcaaggttctgctgtcttgggccaacagtctccccctttccccttcccccggattgttgtgggagctaccctccactctaaagagacatcatcttacagattgggatcccagccttctcaccaggtcccaactccatctccaaggccaagggttttcacccctcagtcatcaccagcgatgcccttggcaccttcccatcctagcccttatcagggtcccaggacacagaatataagtgactacagggcacctgggccccaggccatccagcctttgcctttgagccctggggtaaggcctgcttcatctcagccacagctattaggagggcaaagggtgcaagttcctaacccggtgggattccctgggacatggcctcttcctggttcccctctacccatggcatgcccaggcatcatgcgacctggctctacctccctgcctgagactcctagactgttccctctgcttcctctgagaccactaggtcccggccgcatggtctcccacaccccagcccctcctgcaagcttccctgtgccataccttccaggggacccaggtgccccatgctctagtgtcctcccaaccactggcatcttgactcctcacccaggacctcaagattcctggaaagaagccccagcccccaggggaaacctccagaggaacaagctgccagagacatttatgcccccagcaccaattactgctccagttatgagcctcacccctgagctacaagggattcttccctcacagccccctgtctccagtgtgagtcatgctcccccaggagttccaggagaactcagcctgcaggtgacaaggacaatgtattcccctcccttgggaaaccttccagccctccttgggtgcaggtcatggtagatgggcctcattcctcaaggcatgtgctgagggagactgggggcaggtaccaggtgtccttactgcagagaaagggaggctgctcatctccccaactctgctgtaatgggaacagtgtgactgtgagtcactggggactagtccttagggaagccatgagaaggacagcttgcccctctggcctttctccctgcttctttatcagcagcttcagcacctgccacctgagaagatggaaaggaaggagctgcccccagagcatcagtccttgaagagcagctttgaggcgcttctccaacgctgctccctgtctgcaactgacttaaagacaaaaaggaagctggaagaggcagcccagcgtctggagtatctatatgagaagctctgtgaggggacactctcacctcatgtcgtggctgggctccatgaggttgcccgatgtgtggatgcaggaagctttgagcagggccttgcagtgcatgcccaggtggcgggctgtagcagcttcagcgaggtgtccagcttcatgcctatcctgaaggctgtcctcatcatcgctcataagctgctggtctaaaccaggcagcctctcttgctaggaggccacttctgctgttacataactcctccctgcagaagaggggacttctgcaacagattctgtttctttttcccgactcttttccttgctgccaggtatgtgatgctgtaggcttggctccaaaccagctgagtgcctgctttttactcctttatgtctggccttctaggatctgtccaagacactctcaggcctggaggcagggcatagaatcagttcttcactctccctaatactacactctgtaaggacctggggcaggatatcttctcccccagggatcttctatttaagtggcttctgagagggtgaacaggattgttacttttaagcctacctctgctgtgacccatcatgtgggtcttttgtttctcccttctgtggtttatgagcctgcccttaccttttccctgcctctgacttggtatttccaggtccgtatttctctgtagcccagggtctggggtagagctgactgctgttcaccctttgaacaactcatggacgtgagggatgggtgctgagcagaaccaagagaggaaactttggcgctgttaaaatggaatttctcatctgccggcattattaagggtgggctaggttggatggaaggtgaaagggatgaactgccttttgctggaagctgtcttaggctgtgagacaggagcaggggaaccacagcctatggggaactgcccttgactccacctatgttggagccttagcccaaggccattccttctgtgatgataaagcccagttctggaattggagccatattaaggaatgattctcttccagcgctgctcctcaagggttgggggtccttctccctcgcagccaccacatgtctcagggctaccttctccgattggatttgcatttgtggcactgtctttgatgcagtgatgtacttaatggtgcaataaagctgcttcgatttgg

SEQ ID NO: 388415 - DNA, 1784 bp, Homo sapiens
gtctttccttctgtctctttagctgccagagacatttatgcccccagcaccaattactgctccagttatgagcctcacccctgagctacaagggattcttccctcacagccccctgtctccagtgtgagtcatgctcccccaggagttccaggagaactcagcctgcaggtgacaaggacaatgtattcccctcccttgggaaaccttccagccctccttgggtgcaggtcatggtagatgggcctcattcctcaaggcatgtgctgagggagactgggggcaggtaccaggtgtccttactgcagagaaagggaggctgctcatctccccaactctgctgtaatgggaacagtgtgactgtgagtcactggggactagtccttagggaagccatgagaaggacagcttgcccctctggcctttctccctgcttctttatcagcagcttcagcacctgccacctgagaagatggaaaggaaggagctgcccccagagcatcagtccttgaagagcagctttgaggcgcttctccaacgctgctccctgtctgcaactgacttaaagacaaaaaggaagctggaagaggcagcccagcgtctggagtatctatatgagaagctctgtgaggggacactctcacctcatgtcgtggctgggctccatgaggttgcccgatgtgtggatgcaggaagctttgagcagggccttgcagtgcatgcccaggtggcgggctgtagcagcttcagcgaggtgtccagcttcatgcctatcctgaaggctgtcctcatcatcgctcataagctgctggtctaaaccaggcagcctctcttgctaggaggccacttctgctgttacataactcctccctgcagaagaggggacttctgcaacagattctgtttctttttcccgactcttttccttgctgccaggtatgtgatgctgtaggcttggctccaaaccagctgagtgcctgctttttactcctttatgtctggccttctaggatctgtccaagacactctcaggcctggaggcagggcatagaatcagttcttcactctccctaatactacactctgtaaggacctggggcaggatatcttctcccccagggatcttctatttaagtggcttctgagagggtgaacaggattgttacttttaagcctacctctgctgtgacccatcatgtgggtcttttgtttctcccttctgtggtttatgagcctgcccttaccttttccctgcctctgacttggtatttccaggtccgtatttctctgtagcccagggtctggggtagagctgactgctgttcaccctttgaacaactcatggacgtgagggatgggtgctgagcagaaccaagagaggaaactttggcgctgttaaaatggaatttctcatctgccggcattattaagggtgggctaggttggatggaaggtgaaagggatgaactgccttttgctggaagctgtcttaggctgtgagacaggagcaggggaaccacagcctatggggaactgcccttgactccacctatgttggagccttagcccaaggccattccttctgtgatgataaagcccagttctggaattggagccatattaaggaatgattctcttccagcgctgctcctcaagggttgggggtccttctccctcgcagccaccacatgtctcagggctaccttctccgattggatttgcatttgtggcactgtctttgatgcagtgatgtacttaatggtgcaataaagctgcttcgatttgg

SEQ ID NO: 388416 - DNA, 1817 bp, Homo sapiens
tgaagatggcggtggccagggccggggtcttgggagtccagtggctgcaaagggcatcccggaacgtgatgccgctgggcgcacggacagcctcccacatgaccaaggacatgttcccggggccctatcctaggaccccagaagaacgggccgccgccgccaagaagtataatatgcgtgtggaagactacgaaccataccttccaggggacccaggtgccccatgctctagtgtcctcccaaccactggcatcttgactcctcacccaggacctcaagattcctggaaagaagccccagcccccaggggaaacctccagaggaacaagctgccagagacatttatgcccccagcaccaattactgctccagttatgagcctcacccctgagctacaagggattcttccctcacagccccctgtctccagtgtgagtcatgctcccccaggagttccaggagaactcagcctgcagcagcttcagcacctgccacctgagaagatggaaaggaaggagctgcccccagagcatcagtccttgaagagcagctttgaggcgcttctccaacgctgctccctgtctgcaactgacttaaagacaaaaaggaagctggaagaggcagcccagcgtctggagtatctatatgagaagctctgtgaggggacactctcacctcatgtcgtggctgggctccatgaggttgcccgatgtgtggatgcaggaagctttgagcagggccttgcagtgcatgcccaggtggcgggctgtagcagcttcagcgaggtgtccagcttcatgcctatcctgaaggctgtcctcatcatcgctcataagctgctggtctaaaccaggcagcctctcttgctaggaggccacttctgctgttacataactcctccctgcagaagaggggacttctgcaacagattctgtttctttttcccgactcttttccttgctgccaggtatgtgatgctgtaggcttggctccaaaccagctgagtgcctgctttttactcctttatgtctggccttctaggatctgtccaagacactctcaggcctggaggcagggcatagaatcagttcttcactctccctaatactacactctgtaaggacctggggcaggatatcttctcccccagggatcttctatttaagtggcttctgagagggtgaacaggattgttacttttaagcctacctctgctgtgacccatcatgtgggtcttttgtttctcccttctgtggtttatgagcctgcccttaccttttccctgcctctgacttggtatttccaggtccgtatttctctgtagcccagggtctggggtagagctgactgctgttcaccctttgaacaactcatggacgtgagggatgggtgctgagcagaaccaagagaggaaactttggcgctgttaaaatggaatttctcatctgccggcattattaagggtgggctaggttggatggaaggtgaaagggatgaactgccttttgctggaagctgtcttaggctgtgagacaggagcaggggaaccacagcctatggggaactgcccttgactccacctatgttggagccttagcccaaggccattccttctgtgatgataaagcccagttctggaattggagccatattaaggaatgattctcttccagcgctgctcctcaagggttgggggtccttctccctcgcagccaccacatgtctcagggctaccttctccgattggatttgcatttgtggcactgtctttgatgcagtgatgtacttaatggtgcaataaagctgcttcgatttgg

SEQ ID NO: 388417 - DNA, 2329 bp, Homo sapiens
agcgcccggctccgcgcgagagccctgccagaggagcggctccggccgccgcgcctgacccttgtccggggtcttccgcacaggatagaccatgaagctgaaggaacttgagcggccagctgtccaggcatggagcccagccagccaataccctttgtatctggccacaggaacatctgcccaacagctagattcctccttcagcacaaatggcacattggaaatatttgaggttgatttcagggacccttctctggacttgaaacacagaggagtcctttctgccttgagcaggtttcacaagctggtctgggggagctttggcagtgggcttctggaaagctccggggttattgttggcggcggggacaatggcatgcttattctatacaatgtgacccacatcctgtcttcggggaaggagcctgtgattgctcagaaacagaagcacacgggggctgtcagagccctcgacttgaatcctttccagggcaacctcctggcttcaggggccagcgattctgaaatcttcatttgggatctgaataacttgaatgtgccaatgaccctgggatccaagtcacagcagcctccagaggacatcaaggcactgtcttggaaccggcaagcccaacacattctgtcttctgctcaccccagtggcaaggcagttgtgtgggatctcaggaagaatgaacctatcatcaaagtcagtgatcacagcaacaggggggatcttgtcagtgtcatggagccaggctgatgctgagctgctgctcactagtgctaaggacagccagatcttgtgccggaacctggggagcagtgaggtggtatataagctaccaacacagagcagctggtgctttgatgtgcagtggtgccctcgggacccttcagtgttctctgctgcctccttcaacggctggatcagtttgtactctgtgatgggtaggagctgggaagtccagcatatgagacaggctgacaagatctcctcttccttcagcaaaggccagcctctcccaccactgcaggtgccagagcaagtggcacaagcaccactgatacctcccctgaaaaaaccccccaaatggattagaagaccaacaggtgtttcatttgcttttggagggaagctggttacttttggcctccccagcacccctgcccatctggtgccacagccttgcccccgcctagtcttcatcagtcaagtcaccacagaatctgaattcctgatgcgatcagctgagctgcaggaggccttgggatcaggaaatctactgaattactgtcagaacaagagccagcaagctttactgcaaagtgaaaagatgctgtggcagttcctgaagcccgccagagacagctcaggtgcaaggagatgagactatacatcaggcaggtgaccttagagcaagactccagaatgaaattcctaaagcttttaggatacagtaaagatgagcttcagaagaaggtggccacatggttgaagagtgacgtggggctaggtgagagtcctcagcccaagggaaatgacctcaacagtgacagacaacaggccttctgcagccaggcctccaaacacaccacaaaggaagcctctgcttcctcagccttctttgatgagctggtccctcagaacatgactccttgggagatccccatcacaaaagatattgatggactcctaagccaggctctcctgcttggggaactgggtccggccgtggagctgtgtctgaaggaggagcgctttgctgatgccattatcctggcccaggctgggggtacagatctgctgaagcaaacacaggagcgctacttggccaagaagaaaaccaaaatctcctcgcttctagcctgtgttgtgcaaaagaattggaaggatgtggtgtgtacctgtagcctgaagaactggagagaggcactggctttgctactgacatactcaggcacagagaaatttcccgagctctgtgacatgctgggaactcgcatggaacaggagggcagcagggcactaacctccgaagccagactctgttatgtgtgctcagggagtgtggagcggctggtggagtgctgggcaaaatgccaccaggctttgtcccccatggctctgcaggtaccccttctctgcagggtactggccactccacaccaggcccttaggaggctagtggtggagatgtgcagagctagcagaggcgaatcttctgggacaggctggaaccacggtgttagggaggagcgaaaggtcctgaatgtctgggatcttctcctcttccctcagagaagactaagcagcagctgcttcagt

SEQ ID NO: 388418 - DNA, 104 bp, Homo sapiens
gatatgctctgagttgctcctgaaatgaagtttagtgacaaatgacctatttctgttctgcttcagcttcatctcagccacagctattaggagggcaaagggtg

SEQ ID NO: 388419 - DNA, 823 bp, Homo sapiens
agggattcttccctcacagccccctgtctccagtgtgagtcatgctcccccaggagttccaggagaactcagcctgcaggtgacaaggacaatgtattcccctcccttgggaaaccttccagccctccttgggtgcaggtcatggtagatgggcctcattcctcaaggcatgtgctgagggagactgggggcaggtaccaggtgtccttactgcagagaaagggaggctgctcatctccccaactctgctgtaatgggaacagtgtgactgtgagtcactggggactagtccttagggaagccatgagaaggacagcttgcccctctggcctttctccctgcttctttatcagcagcttcagcacctgccacctgagaagatggaaaggaaggagctgcccccagagcatcagtccttgaagagcagctttgaggcgcttctccaacgctgctccctgtctgcaactgacttagtaagtctgaaccttcttcacagtgccctcctcgcacccctcgctggctccaggacccctcagctgtggaccagttccttgtgtgactctcttctcactgcccctggacatgctgtctctatcttgtacttaattgacgtccatgtggagctggggagagacttttgagtctggtctgaagtccagctccttggtggtaggacccagcagcattgagacctaaaggcagcaggggtactggaaggagggtggagccaggagtgaggaagtctgccattcccctgctggctgtgtcggcttgagcaagtcacttacccttcttgggccttcattccctcctctgtgaaatg

SEQ ID NO: 388420 - DNA, 349 bp, Homo sapiens
gatcagctgagctgcaggaggccttgggatcaggaaatctactgaattactgtcagaacaagagccagcaagctttactgcaaagtgaaaagatgctgtggcagttcctgaaggtgggaagcctgaaggctagctgctcagaagtgtctccccaaagcctggaactccaacctctgtcaactgcaggagaagcacaagcacactgggacccagatcacagaggccttaactcccattagtttttcccccacactatacccaccatctagacacaaaacgttcaccctttaccagaggctcaaaggccatttgggaagaggctaggaaagatggggaatacacgagatgt

SEQ ID NO: 388421 - DNA, 698 bp, Homo sapiens
tcaatacatagataatgagttagtattttcccttttcagagactggccctagagcctggctcaaactgaatagaccagaacttactggtccagatctgacccgctgcgcaatcacagggtaggtgagggaggcccggttaaaagctataatcctgtttggaaacgttctccgtgggtctgtcagtgtctcgggctcggcgcccgcggagcgtgtttccgacggtgccctgccggggtccgcgccgctttggtcctccgcagccgccgtccacagcgcccggctccgcgcgagagccctgccagaggagcggctccggccgccgcgcctgacccttgtccggggtcttccgcacaggttggttcgccccgccggtctggggtccctggtagcagagattgcgctggggacccggagcactgctcctttctcggcagagcgcggaggggagcccgcttgctgcggagcccccggcccgcgcctgccctgcccgcgggtccgggcctcgggggcctccactacgtctacccttgaattggatccggctctactgtccctgccgcacgggaacccccagccggatgagggtctccctgttcactgctgccttgcgccttcccatccgccttggtcctgacctggcccagccgaggccgtccggtgtcgctgcgtttgggctgggcgggaaggtctgtcattg

SEQ ID NO: 388422 - DNA, 4640 bp, Homo sapiens
agcgcccggctccgcgcgagagccctgccagaggagcggctccggccgccgcgcctgacccttgtccggggtcttccgcacagtgggctgagggccatgtcagttttctgccacctacaggatagaccatgaagctgaaggaacttgagcggccagctgtccaggcatggagcccagccagccaataccctttgtatctggccacaggaacatctgcccaacagctagattcctccttcagcacaaatggcacattggaaatatttgaggttgatttcagggacccttctctggacttgaaacacagaggagtcctttctgccttgagcaggtttcacaagctggtctgggggagctttggcagtgggcttctggaaagctccggggttattgttggcggcggggacaatggcatgcttattctatacaatgtgacccacatcctgtcttcggggaaggagcctgtgattgctcagaaacagaagcacacgggggctgtcagagccctcgacttgaatcctttccagggcaacctcctggcttcaggggccagcgattctgaaatcttcatttgggatctgaataacttgaatgtgccaatgaccctgggatccaagtcacagcagcctccagaggacatcaaggcactgtcttggaaccggcaagcccaacacattctgtcttctgctcaccccagtggcaaggcagttgtgtgggatctcaggaagaatgaacctatcatcaaagtcagtgatcacagcaacaggatgcactgctcaggcctggcctggcatcctgacatagccacccagttagtgctgtgctcagaggatgatcgacttcccgtgattcagctgtgggacttgcgctttgcctcctcgcccttgaaggtgctggagagccacagcagggggatcttgtcagtgtcatggagccaggctgatgctgagctgctgctcactagtgctaaggacagccagatcttgtgccggaacctggggagcagtgaggtggtatataagctaccaacacagagcagctggtgctttgatgtgcagtggtgccctcgggacccttcagtgttctctgctgcctccttcaacggctggatcagtttgtactctgtgatgggtaggagctgggaagtccagcatatgagacaggctgacaagatctcctcttccttcagcaaaggccagcctctcccaccactgcaggtgccagagcaagtggcacaagcaccactgatacctcccctgaaaaaaccccccaaatggattagaagaccaacaggtgtttcatttgcttttggagggaagctggttacttttggcctccccagcacccctgcccatctggtgccacagccttgcccccgcctagtcttcatcagtcaagtcaccacagaatctgaattcctgatgcgatcagctgagctgcaggaggccttgggatcaggaaatctactgaattactgtcagaacaagagccagcaagctttactgcaaagtgaaaagatgctgtggcagttcctgaaggtgaccttagagcaagactccagaatgaaattcctaaagcttttaggatacagtaaagatgagcttcagaagaaggtggccacatggttgaagagtgacgtggggctaggtgagagtcctcagcccaagggaaatgacctcaacagtgacagacaacaggccttctgcagccaggcctccaaacacaccacaaaggaagcctctgcttcctcagccttctttgatgagctggtccctcagaacatgactccttgggagatccccatcacaaaagatattgatggactcctaagccaggctctcctgcttggggaactgggtccggccgtggagctgtgtctgaaggaggagcgctttgctgatgccattatcctggcccaggctgggggtacagatctgctgaagcaaacacaggagcgctacttggccaagaagaaaaccaaaatctcctcgcttctagcctgtgttgtgcaaaagaattggaaggatgtggtgtgtacctgtagcctgaagaactggagagaggcactggctttgctactgacatactcaggcacagagaaatttcccgagctctgtgacatgctgggaactcgcatggaacaggagggcagcagggcactaacctccgaagccagactctgttatgtgtgctcagggagtgtggagcggctggtggagtgctgggcaaaatgccaccaggctttgtcccccatggctctgcaggacctgatggagaaggtgatggttcttaacaggagcttggagcaactgcggggtcctcatggggtgagcccaggccctgccacaacctacagggtcactcagtatgccaacctcctggcagcccagggcagcctggccactgccatgagctttctacccagggactgtgctcagccaccagttcagcagctaagagatcggctttttcatgctcaaggttctgctgtcttgggccaacagtctccccctttccccttcccccggattgttgtgggagctaccctccactctaaagagacatcatcttacagattgggatcccagccttctcaccaggtcccaactccatctccaaggccaagggttttcacccctcagtcatcaccagcgatgcccttggcaccttcccatcctagcccttatcagggtcccaggacacagaatataagtgactacagggcacctgggccccaggccatccagcctttgcctttgagccctggggtaaggcctgcttcatctcagccacagctattaggagggcaaagggtgcaagttcctaacccggtgggattccctgggacatggcctcttcctggttcccctctacccatggcatgcccaggcatcatgcgacctggctctacctccctgcctgagactcctagactgttccctctgcttcctctgagaccactaggtcccggccgcatggtctcccacaccccagcccctcctgcaagcttccctgtgccataccttccaggggacccaggtgccccatgctctagtgtcctcccaaccactggcatcttgactcctcacccaggacctcaagattcctggaaagaagccccagcccccaggggaaacctccagaggaacaagctgccagagacatttatgcccccagcaccaattactgctccagttatgagcctcacccctgagctacaagggattcttccctcacagccccctgtctccagtgtgagtcatgctcccccaggagttccaggagaactcagcctgcagcagcttcagcacctgccacctgagaagatggaaaggaaggagctgcccccagagcatcagtccttgaagagcagctttgaggcgcttctccaacgctgctccctgtctgcaactgacttaaagacaaaaaggaagctggaagaggcagcccagcgtctggagtatctatatgagaagctctgtgaggggacactctcacctcatgtcgtggctgggctccatgaggttgcccgatgtgtggatgcaggaagctttgagcagggccttgcagtgcatgcccaggtggcgggctgtagcagcttcagcgaggtgtccagcttcatgcctatcctgaaggctgtcctcatcatcgctcataagctgctggtctaaaccaggcagcctctcttgctaggaggccacttctgctgttacataactcctccctgcagaagaggggacttctgcaacagattctgtttctttttcccgactcttttccttgctgccaggtatgtgatgctgtaggcttggctccaaaccagctgagtgcctgctttttactcctttatgtctggccttctaggatctgtccaagacactctcaggcctggaggcagggcatagaatcagttcttcactctccctaatactacactctgtaaggacctggggcaggatatcttctcccccagggatcttctatttaagtggcttctgagagggtgaacaggattgttacttttaagcctacctctgctgtgacccatcatgtgggtcttttgtttctcccttctgtggtttatgagcctgcccttaccttttccctgcctctgacttggtatttccaggtccgtatttctctgtagcccagggtctggggtagagctgactgctgttcaccctttgaacaactcatggacgtgagggatgggtgctgagcagaaccaagagaggaaactttggcgctgttaaaatggaatttctcatctgccggcattattaagggtgggctaggttggatggaaggtgaaagggatgaactgccttttgctggaagctgtcttaggctgtgagacaggagcaggggaaccacagcctatggggaactgcccttgactccacctatgttggagccttagcccaaggccattccttctgtgatgataaagcccagttctggaattggagccatattaaggaatgattctcttccagcgctgctcctcaagggttgggggtccttctccctcgcagccaccacatgtctcagggctaccttctccgattggatttgcatttgtggcactgtctttgatgcagtgatgtacttaatggtgcaataaagctgcttcgatttgg

SEQ ID NO: 388423 - DNA, 4638 bp, Homo sapiens
agcgcccggctccgcgcgagagccctgccagaggagcggctccggccgccgcgcctgacccttgtccggggtcttccgcacaggatagaccatgaagctgaaggaacttgagcggccagctgtccaggcatggagcccagccagccaataccctttgtatctggccacaggaacatctgcccaacagctagattcctccttcagcacaaatggcacattggaaatatttgaggttgatttcagggacccttctctggacttgaaacacagaggagtcctttctgccttgagcaggtttcacaagctggtctgggggagctttggcagtgggcttctggaaagctccggggttattgttggcggcggggacaatggcatgcttattctatacaatgtgacccacatcctgtcttcggggaaggagcctgtgattgctcagaaacagaagcacacgggggctgtcagagccctcgacttgaatcctttccagggcaacctcctggcttcaggggccagcgattctgaaatcttcatttgggatctgaataacttgaatgtgccaatgaccctgggatccaagtcacagcagcctccagaggacatcaaggcactgtcttggaaccggcaagcccaacacattctgtcttctgctcaccccagtggcaaggcagttgtgtgggatctcaggaagaatgaacctatcatcaaagtcagtgatcacagcaacaggggggatcttgtcagtgtcatggagccaggctgatgctgagctgctgctcactagtgctaaggacagccagatcttgtgccggaacctggggagcagtgaggtggtatataagctaccaacacagagcagctggtgctttgatgtgcagtggtgccctcgggacccttcagtgttctctgctgcctccttcaacggctggatcagtttgtactctgtgatgggtaggagctgggaagtccagcatatgagacaggctgacaagatctcctcttccttcagcaaaggccagcctctcccaccactgcaggtgccagagcaagtggcacaagcaccactgatacctcccctgaaaaaaccccccaaatggattagaagaccaacaggtgtttcatttgcttttggagggaagctggttacttttggcctccccagcacccctgcccatctggtgccacagccttgcccccgcctagtcttcatcagtcaagtcaccacagaatctgaattcctgatgcgatcagctgagctgcaggaggccttgggatcaggaaatctactgaattactgtcagaacaagagccagcaagctttactgcaaagtgaaaagatgctgtggcagttcctgaagcccgccagagacagctcaggtgcaaggagatgagactatacatcaggcaggtgaccttagagcaagactccagaatgaaattcctaaagcttttaggatacagtaaagatgagcttcagaagaaggtggccacatggttgaagagtgacgtggggctaggtgagagtcctcagcccaagggaaatgacctcaacagtgacagacaacaggccttctgcagccaggcctccaaacacaccacaaaggaagcctctgcttcctcagccttctttgatgagctggtccctcagaacatgactccttgggagatccccatcacaaaagatattgatggactcctaagccaggctctcctgcttggggaactgggtccggccgtggagctgtgtctgaaggaggagcgctttgctgatgccattatcctggcccaggctgggggtacagatctgctgaagcaaacacaggagcgctacttggccaagaagaaaaccaaaatctcctcgcttctagcctgtgttgtgcaaaagaattggaaggatgtggtgtgtacctgtagcctgaagaactggagagaggcactggctttgctactgacatactcaggcacagagaaatttcccgagctctgtggacctgatggagaaggtgatggttcttaacaggagcttggagcaactgcggggtcctcatggggtgagcccaggccctgccacaacctacagggtcactcagtatgccaacctcctggcagcccagggcagcctggccactgccatgagctttctacccagggactgtgctcagccaccagttcagcagctaagagatcggctttttcatgctcaaggttctgctgtcttgggccaacagtctccccctttccccttcccccggattgttgtgggagctaccctccactctaaagagacatcatcttacagattgggatcccagccttctcaccaggtcccaactccatctccaaggccaagggttttcacccctcagtcatcaccagcgatgcccttggcaccttcccatcctagcccttatcagggtcccaggacacagaatataagtgactacagggcacctgggccccaggccatccagcctttgcctttgagccctggggtaaggcctgcttcatctcagccacagctattaggagggcaaagggtgcaagttcctaacccggtgggattccctgggacatggcctcttcctggttcccctctacccatggcatgcccaggcatcatgcgacctggctctacctccctgcctgagactcctagactgttccctctgcttcctctgagaccactaggtcccggccgcatggtctcccacaccccagcccctcctgcaagcttccctgtgccataccttccaggggacccaggtgccccatgctctagtgtcctcccaaccactggcatcttgactcctcacccaggacctcaagattcctggaaagaagccccagcccccaggggaaacctccagaggaacaagctgccagagacatttatgcccccagcaccaattactgctccagttatgagcctcacccctgagctacaagggattcttccctcacagccccctgtctccagtgtgagtcatgctcccccaggagttccaggagaactcagcctgcaggtgacaaggacaatgtattcccctcccttgggaaaccttccagccctccttgggtgcaggtcatggtagatgggcctcattcctcaaggcatgtgctgagggagactgggggcaggtaccaggtgtccttactgcagagaaagggaggctgctcatctccccaactctgctgtaatgggaacagtgtgactgtgagtcactggggactagtccttagggaagccatgagaaggacagcttgcccctctggcctttctccctgcttctttatcagcagcttcagcacctgccacctgagaagatggaaaggaaggagctgcccccagagcatcagtccttgaagagcagctttgaggcgcttctccaacgctgctccctgtctgcaactgacttaaagacaaaaaggaagctggaagaggcagcccagcgtctggagtatctatatgagaagctctgtgaggggacactctcacctcatgtcgtggctgggctccatgaggttgcccgatgtgtggatgcaggaagctttgagcagggccttgcagtgcatgcccaggtggcgggctgtagcagcttcagcgaggtgtccagcttcatgcctatcctgaaggctgtcctcatcatcgctcataagctgctggtctaaaccaggcagcctctcttgctaggaggccacttctgctgttacataactcctccctgcagaagaggggacttctgcaacagattctgtttctttttcccgactcttttccttgctgccaggtatgtgatgctgtaggcttggctccaaaccagctgagtgcctgctttttactcctttatgtctggccttctaggatctgtccaagacactctcaggcctggaggcagggcatagaatcagttcttcactctccctaatactacactctgtaaggacctggggcaggatatcttctcccccagggatcttctatttaagtggcttctgagagggtgaacaggattgttacttttaagcctacctctgctgtgacccatcatgtgggtcttttgtttctcccttctgtggtttatgagcctgcccttaccttttccctgcctctgacttggtatttccaggtccgtatttctctgtagcccagggtctggggtagagctgactgctgttcaccctttgaacaactcatggacgtgagggatgggtgctgagcagaaccaagagaggaaactttggcgctgttaaaatggaatttctcatctgccggcattattaagggtgggctaggttggatggaaggtgaaagggatgaactgccttttgctggaagctgtcttaggctgtgagacaggagcaggggaaccacagcctatggggaactgcccttgactccacctatgttggagccttagcccaaggccattccttctgtgatgataaagcccagttctggaattggagccatattaaggaatgattctcttccagcgctgctcctcaagggttgggggtccttctccctcgcagccaccacatgtctcagggctaccttctccgattggatttgcatttgtggcactgtctttgatgcagtgatgtacttaatggtgcaataaagctgcttcgatttgg

SEQ ID NO: 388424 - DNA, 3784 bp, Homo sapiens
tcccctggaatatgggagtctgacctttctaggtcaaattgggtgtctcaaggattcctcccaaaatggagtttgtaggtggagttcctgactaaactgccactttaggatggcgatgcaggtgtcttttccccccagatctcctcttccttcagcaaaggccagcctctcccaccactgcaggtgccagagcaagtggcacaagcaccactgatacctcccctgaaaaaaccccccaaatggattagaagaccaacaggtgtttcatttgcttttggagggaagctggttacttttggcctccccagcacccctgcccatctggtgccacagccttgcccccgcctagtcttcatcagtcaagtcaccacagaatctgaattcctgatgcgatcagctgagctgcaggaggccttgggatcaggaaatctactgaattactgtcagaacaagagccagcaagctttactgcaaagtgaaaagatgctgtggcagttcctgaagcccgccagagacagctcaggtgcaaggagatgagactatacatcaggcaggtgaccttagagcaagactccagaatgaaattcctaaagcttttaggatacagtaaagatgagcttcagaagaaggtggccacatggttgaagagtgacgtggggctaggtgagagtcctcagcccaagggaaatgacctcaacagtgacagacaacaggccttctgcagccaggcctccaaacacaccacaaaggaagcctctgcttcctcagccttctttgatgagctggtccctcagaacatgactccttgggagatccccatcacaaaagatattgatggactcctaagccaggctctcctgcttggggaactgggtccggccgtggagctgtgtctgaaggaggagcgctttgctgatgccattatcctggcccaggctgggggtacagatctgctgaagcaaacacaggagcgctacttggccaagaagaaaaccaaaatctcctcgcttctagcctgtgttgtgcaaaagaattggaaggatgtggtgtgtacctgtagcctgaagaactggagagaggcactggctttgctactgacatactcaggcacagagaaatttcccgagctctgtggacctgatggagaaggtgatggttcttaacaggagcttggagcaactgcggggtcctcatggggtgagcccaggccctgccacaacctacagggtcactcagtatgccaacctcctggcagcccagggcagcctggccactgccatgagctttctacccagggactgtgctcagccaccagttcagcagctaagagatcggctttttcatgctcaaggttctgctgtcttgggccaacagtctccccctttccccttcccccggattgttgtgggagctaccctccactctaaagagacatcatcttacagattgggatcccagccttctcaccaggtcccaactccatctccaaggccaagggttttcacccctcagtcatcaccagcgatgcccttggcaccttcccatcctagcccttatcagggtcccaggacacagaatataagtgactacagggcacctgggccccaggccatccagcctttgcctttgagccctggggtaaggcctgcttcatctcagccacagctattaggagggcaaagggtgcaagttcctaacccggtgggattccctgggacatggcctcttcctggttcccctctacccatggcatgcccaggcatcatgcgacctggctctacctccctgcctgagactcctagactgttccctctgcttcctctgagaccactaggtcccggccgcatggtctcccacaccccagcccctcctgcaagcttccctgtgccataccttccaggggacccaggtgccccatgctctagtgtcctcccaaccactggcatcttgactcctcacccaggacctcaagattcctggaaagaagccccagcccccaggggaaacctccagaggaacaagctgccagagacatttatgcccccagcaccaattactgctccagttatgagcctcacccctgagctacaagggattcttccctcacagccccctgtctccagtgtgagtcatgctcccccaggagttccaggagaactcagcctgcaggtgacaaggacaatgtattcccctcccttgggaaaccttccagccctccttgggtgcaggtcatggtagatgggcctcattcctcaaggcatgtgctgagggagactgggggcaggtaccaggtgtccttactgcagagaaagggaggctgctcatctccccaactctgctgtaatgggaacagtgtgactgtgagtcactggggactagtccttagggaagccatgagaaggacagcttgcccctctggcctttctccctgcttctttatcagcagcttcagcacctgccacctgagaagatggaaaggaaggagctgcccccagagcatcagtccttgaagagcagctttgaggcgcttctccaacgctgctccctgtctgcaactgacttaaagacaaaaaggaagctggaagaggcagcccagcgtctggagtatctatatgagaagctctgtgaggggacactctcacctcatgtcgtggctgggctccatgaggttgcccgatgtgtggatgcaggaagctttgagcagggccttgcagtgcatgcccaggtggcgggctgtagcagcttcagcgaggtgtccagcttcatgcctatcctgaaggctgtcctcatcatcgctcataagctgctggtctaaaccaggcagcctctcttgctaggaggccacttctgctgttacataactcctccctgcagaagaggggacttctgcaacagattctgtttctttttcccgactcttttccttgctgccaggtatgtgatgctgtaggcttggctccaaaccagctgagtgcctgctttttactcctttatgtctggccttctaggatctgtccaagacactctcaggcctggaggcagggcatagaatcagttcttcactctccctaatactacactctgtaaggacctggggcaggatatcttctcccccagggatcttctatttaagtggcttctgagagggtgaacaggattgttacttttaagcctacctctgctgtgacccatcatgtgggtcttttgtttctcccttctgtggtttatgagcctgcccttaccttttccctgcctctgacttggtatttccaggtccgtatttctctgtagcccagggtctggggtagagctgactgctgttcaccctttgaacaactcatggacgtgagggatgggtgctgagcagaaccaagagaggaaactttggcgctgttaaaatggaatttctcatctgccggcattattaagggtgggctaggttggatggaaggtgaaagggatgaactgccttttgctggaagctgtcttaggctgtgagacaggagcaggggaaccacagcctatggggaactgcccttgactccacctatgttggagccttagcccaaggccattccttctgtgatgataaagcccagttctggaattggagccatattaaggaatgattctcttccagcgctgctcctcaagggttgggggtccttctccctcgcagccaccacatgtctcagggctaccttctccgattggatttgcatttgtggcactgtctttgatgcagtgatgtacttaatggtgcaataaagctgcttcgatttgg

SEQ ID NO: 388425 - DNA, 2113 bp, Homo sapiens
ttatatcttcttgctttttatctttatcagtttttagatgtttatcaattttattgatttttttcctcaaagaactagtttttgtttcattaattttccctattatttttctgttttctattatttacctttctctttcctttccaagagctgatgtttttttctcttcataggtcccaactccatctccaaggccaagggttttcacccctcagtcatcaccagcgatgcccttggcaccttcccatctctagtgtcctcccaaccactggcatcttgactcctcacccaggacctcaagattcctggaaagaagccccagcccccaggggaaacctccagaggaacaagctgccagagacatttatgcccccagcaccaattactgctccagttatgagcctcacccctgagctacaagggattcttccctcacagccccctgtctccagtgtgagtcatgctcccccaggagttccaggagaactcagcctgcaggtgacaaggacaatgtattcccctcccttgggaaaccttccagccctccttgggtgcaggtcatggtagatgggcctcattcctcaaggcatgtgctgagggagactgggggcaggtaccaggtgtccttactgcagagaaagggaggctgctcatctccccaactctgctgtaatgggaacagtgtgactgtgagtcactggggactagtccttagggaagccatgagaaggacagcttgcccctctggcctttctccctgcttctttatcagcagcttcagcacctgccacctgagaagatggaaaggaaggagctgcccccagagcatcagtccttgaagagcagctttgaggcgcttctccaacgctgctccctgtctgcaactgacttaaagacaaaaaggaagctggaagaggcagcccagcgtctggagtatctatatgagaagctctgtgaggggacactctcacctcatgtcgtggctgggctccatgaggttgcccgatgtgtggatgcaggaagctttgagcagggccttgcagtgcatgcccaggtggcgggctgtagcagcttcagcgaggtgtccagcttcatgcctatcctgaaggctgtcctcatcatcgctcataagctgctggtctaaaccaggcagcctctcttgctaggaggccacttctgctgttacataactcctccctgcagaagaggggacttctgcaacagattctgtttctttttcccgactcttttccttgctgccaggtatgtgatgctgtaggcttggctccaaaccagctgagtgcctgctttttactcctttatgtctggccttctaggatctgtccaagacactctcaggcctggaggcagggcatagaatcagttcttcactctccctaatactacactctgtaaggacctggggcaggatatcttctcccccagggatcttctatttaagtggcttctgagagggtgaacaggattgttacttttaagcctacctctgctgtgacccatcatgtgggtcttttgtttctcccttctgtggtttatgagcctgcccttaccttttccctgcctctgacttggtatttccaggtccgtatttctctgtagcccagggtctggggtagagctgactgctgttcaccctttgaacaactcatggacgtgagggatgggtgctgagcagaaccaagagaggaaactttggcgctgttaaaatggaatttctcatctgccggcattattaagggtgggctaggttggatggaaggtgaaagggatgaactgccttttgctggaagctgtcttaggctgtgagacaggagcaggggaaccacagcctatggggaactgcccttgactccacctatgttggagccttagcccaaggccattccttctgtgatgataaagcccagttctggaattggagccatattaaggaatgattctcttccagcgctgctcctcaagggttgggggtccttctccctcgcagccaccacatgtctcagggctaccttctccgattggatttgcatttgtggcactgtctttgatgcagtgatgtacttaatggtgcaataaagctgcttcgatttgg

SEQ ID NO: 388426 - DNA, 4101 bp, Homo sapiens
  misc_feature (4080)..(4080): n is a, c, g, or t
agcgcccggctccgcgcgagagccctgccagaggagcggctccggccgccgcgcctgacccttgtccggggtcttccgcacaggatagaccatgaagctgaaggaacttgagcggccagctgtccaggcatggagcccagccagccaataccctttgtatctggccacaggaacatctgcccaacagctagattcctccttcagcacaaatggcacattggaaatatttgaggttgatttcagggacccttctctggacttgaaacacagaggagtcctttctgccttgagcaggtttcacaagctggtctgggggagctttggcagtgggcttctggaaagctccggggttattgttggcggcggggacaatggcatgcttattctatacaatgtgacccacatcctgtcttcggggaaggagcctgtgattgctcagaaacagaagcacacgggggctgtcagagccctcgacttgaatcctttccagggcaacctcctggcttcaggggccagcgattctgaaatcttcatttgggatctgaataacttgaatgtgccaatgaccctgggatccaagtcacagcagcctccagaggacatcaaggcactgtcttggaaccggcaagcccaacacattctgtcttctgctcaccccagtggcaaggcagttgtgtgggatctcaggaagaatgaacctatcatcaaagtcagtgatcacagcaacaggggggatcttgtcagtgtcatggagccaggctgatgctgagctgctgctcactagtgctaaggacagccagatcttgtgccggaacctggggagcagtgaggtggtatataagctaccaacacagagcagctggtgctttgatgtgcagtggtgccctcgggacccttcagtgttctctgctgcctccttcaacggctggatcagtttgtactctgtgatgggtaggagctgggaagtccagcatatgagacaggctgacaagatctcctcttccttcagcaaaggccagcctctcccaccactgcaggtgccagagcaagtggcacaagcaccactgatacctcccctgaaaaaaccccccaaatggattagaagaccaacaggtgtttcatttgcttttggagggaagctggttacttttggcctccccagcacccctgcccatctggtgccacagccttgcccccgcctagtcttcatcagtcaagtcaccacagaatctgaattcctgatgcgatcagctgagctgcaggaggccttgggatcaggaaatctactgaattactgtcagaacaagagccagcaagctttactgcaaagtgaaaagatgctgtggcagttcctgaagcccgccagagacagctcaggtgcaaggagatgagactatacatcaggcaggtgaccttagagcaagactccagaatgaaattcctaaagcttttaggatacagtaaagatgagcttcagaagaaggtggccacatggttgaagagtgacgtggggctaggtgagagtcctcagcccaagggaaatgacctcaacagtgacagacaacaggccttctgcagccaggcctccaaacacaccacaaaggaagcctctgcttcctcagccttctttgatgagctggtccctcagaacatgactccttgggagatccccatcacaaaagatattgatggactcctaagccaggctctcctgcttggggaactgggtccggccgtggagctgtgtctgaaggaggagcgctttgctgatgccattatcctggcccaggctgggggtacagatctgctgaagcaaacacaggagcgctacttggccaagaagaaaaccaaaatctcctcgcttctagcctgtgttgtgcaaaagaattggaaggatgtggtgtgtacctgtagcctgaagaactggagagaggcactggctttgctactgacatactcaggcacagagaaatttcccgagctctgtggacctgatggagaaggtgatggttcttaacaggagcttggagcaactgcggggtcctcatggggtgagcccaggccctgccacaacctacagggtcactcagtatgccaacctcctggcagcccagggcagcctggccactgccatgagctttctacccagggactgtgctcagccaccagttcagcagctaagagatcggctttttcatgctcaaggttctgctgtcttgggccaacagtctccccctttccccttcccccggattgttgtgggagctaccctccactctaaagagacatcatcttacagattgggatcccagccttctcaccaggtcccaactccatctccaaggccaagggttttcacccctcagtcatcaccagcgatgcccttggcaccttcccatcctagcccttatcagggtcccaggacacagaatataagtgactacagggcacctgggccccaggccatccagcctttgcctttgagccctggggtaaggcctgcttcatctcagccacagctattaggagggcaaagggtgcaagttcctaacccggtgggattccctgggacatggcctcttcctggttcccctctacccatggcatgcccaggcatcatgcgacctggctctacctccctgcctgagactcctagactgttccctctgcttcctctgagaccactaggtcccggccgcatggtctcccacaccccagcccctcctgcaagcttccctgtgccataccttccaggggacccaggtgccccatgctctagtgtcctcccaaccactggcatcttgactcctcacccaggacctcaagattcctggaaagaagccccagcccccaggggaaacctccagaggaacaagctgccagagacatttatgcccccagcaccaattactgctccagttatgagcctcacccctgagctacaagggattcttccctcacagccccctgtctccagtgtgagtcatgctcccccaggagttccaggagaactcagcctgcaggtgacaaggacaatgtattcccctcccttgggaaaccttccagccctccttgggtgcaggtcatggtagatgggcctcattcctcaaggcatgtgctgagggagactgggggcaggtaccaggtgtccttactgcagagaaagggaggctgctcatctccccaactctgctgtaatgggaacagtgtgactgtgagtcactggggactagtccttagggaagccatgagaaggacagcttgcccctctggcctttctccctgcttctttatcagcagcttcagcacctgccacctgagaagatggaaaggaaggagctgcccccagagcatcagtccttgaagagcagctttgaggcgcttctccaacgctgctccctgtctgcaactgacttaaagacaaaaaggaagctggaagaggcagcccagcgtctggagtatctatatgagaagctctgtgaggggacactctcacctcatgtcgtggctgggctccatgaggttgcccgatgtgtggatgcaggaagctttgagcagggccttgcagtgcatgcccaggtggcgggctgtagcagcttcagcgaggtgtccagcttcatgcctatcctgaaggctgtcctcatcatcgctcataagctgctggtctaaaccaggcagcctctcttgctaggaggccacttctgctgttacataactcctccctgcagaagaggggacttctgcaacagattctgtttctttttcccgactcttttccttgctgccaggtatgtgatgctgtaggcttggctccaaaccagctgagtgcctgctttttactcctttatgtctggccttctaggatctgtccaagacactctcaggcctggaggcagggcatagaatcagttcttcactctccctaatactacactctgtaaggacctggggcaggatatcttctcccccagggatcttctatttaagtggcttctgagagggtgaacaggattgttacttttaagcctacctctgctgtgacccatcatgtgggtcttttgtttctcccttcttctctcngatcctctagatcaccctcac

SEQ ID NO: 388427 - DNA, 1036 bp, Homo sapiens
agcgcccggctccgcgcgagagccctgccagaggagcggctccggccgccgcgcctgacccttgtccggggtcttccgcacaggatagaccatgaagctgaaggaacttgagcggccagctgtccaggcatggagcccagccagccaataccctttgtatctggccacaggaacatctgcccaacagctagattcctccttcagcacaaatggcacattggaaatatttgaggttgatttcagggacccttctctggacttgaaacacagaggagtcctttctgccttgagcaggtttcacaagctggtctgggggagctttggcagtgggcttctggaaagctccggggttattgttggcggcggggacaatggcatgcttattctatacaatgtgacccacatcctgtcttcggggaaggagcctgtgattgctcagaaacagaagcacacgggggctgtcagagccctcgacttgaatcctttccagggcaacctcctggcttcaggggccagcgattctgaaatcttcatttgggatctgaataacttgaatgtgccaatgaccctgggatccaagtcacagcagcctccagaggacatcaaggcactgtcttggaaccggcaagcccaacacattctgtcttctgctcaccccagtggcaaggcagttgtgtgggatctcaggaagaatgaacctatcatcaaagtcagtgatcacagcaacaggggggatcttgtcagtgtcatggagccaggctgatgctgagctgctgctcactagtgctaaggacagccagatcttgtgccggaacctggggagcagtgaggtggtatataagctaccaacacagagcagctggtgctttgatgtgcagtggtgccctcgggacccttcagtgttctctgctgcctccttcaacggctggatcagtttgtactctgtgatgggtaggagctgggaagtccagcatatgagacaggctgacaaggtttgaagggcttggtagagaatgctggagggaaggggctgtct

SEQ ID NO: 388428 - DNA, 349 bp, Homo sapiens
agcatagccagttgtcataaactgcaaagaaatttaaacttctaaataaaagtggaaggtaaatattcaagaaaaagtatcaactagccagaaatattacaacctaggaagaaggataagtatttgttactagaaagaacctcaggggaaacagcatgttcaagaaagtaccaggttttagttaagacaagataaaggttggtattgcattgtgcatagtgaaaagggttccacttgctattggtgtcaccacactttcagggtgatcatttctactaactgatattatttctaattcaataccatatctctcttcattgatatgaaattggacatcagtgttaattaa

SEQ ID NO: 388429 - DNA, 440 bp, Homo sapiens
attgctttctgtgaggattatgccaatgtatgttaaccaatactaatgagattaatctcatcacatcattgccaaagatgaagagcatcattaagtgctgaaaagtcttgtgttttttattgaacattgttgtctatcagtcacttacatttctgttttgtgaattgtttattcctattccctttttgtctatttgtttatgaagactttaatgtttttcatatcagggatagtaatttttaaaggtaaagtattagcttatgtattaaatttagttttagagagcagcttctaggaatacatctagtctgttagccaaatagttcagcctttatcatctttacaaatattaggatgaaaaaatgcaggttgcaatgatcttgtcattctgcttatcaaagggctttaatggtggtggctatgatcccagcactttggga

SEQ ID NO: 388430 - DNA, 443 bp, Homo sapiens
gtaatatgaatttcatcagtgtttggatatgtggttctatactagacatgttaaacattttttattttgctgaaactctaatatgttatcagttttgagtctaatatacatagcatttctatttgcaaaaacaaataatcatctcagccttgagatacaaaaggcaattcagtcaatttggagaacttgggttttctcctcagggttgtcctctttttaattcttgttgattcagccataaatcttcccctccaaagaccttgcttttattcccacagcactgaagtctgctcttactttaaagagccacagtaactgctcctaacatgcacatctttattaggaaatgtagggaaccttgaccagatagcgcagagcagctggagcctggaaggtgaagaaatttgggtaaagatgaatgggttattcagatattaaaagtg

SEQ ID NO: 388431 - DNA, 417 bp, Homo sapiens
gatggctaaagtacggccagcttgcctctgagcagttacagcagtggctttactggtgtcagtggccaccaagttaaccatgaggaacgacttaactgtatataacccacataatgcggcagaactgctgtcttctaagagaagtccctggccaacagataatcacctcctcaaagatcaggctctgctgttagaggaatctacagtccagttaaaaaaacctgtccttgcctgaacccagacactttcctcccagaggaaactgaagaacctgaatatggctttgaacagtcatgcaaacctatgcagccaaggaggacctcaaagaaactcccctagaaaacccagaagccagacatgctggtaaaaggataaaagtttttttacagtcagacttttggcctctctgtccctgtg

SEQ ID NO: 388432 - DNA, 875 bp, Homo sapiens
agcctcgagggccatcagttcctaccagagccgctgcgggtgccattccacccatggccggacacaggccctcaaaccacttctgcccccttccaggcagtggtgggggcggccccagagggccgatgcccctgcgggttgacactctgacctggttgagcacccaggcggcccctggcagggtgatggtctggccggcagtcaggccagggatctgcccaggccctgacgtgtggaggattcccctgggtcccctgccacacgaattccggggctggatagcaccctgcaggccccgtcttggagctagtgaggcaggggactggttgcgacgcccctccgaaggcgccctcccggggccctacattgccctgcggagcattccgaagttgccgccgccagaggacatctcgggcatactgaaagagttgcagcaattggccaaggagttgaggcagaagaggttgagcctagggtactcgcaggccgatgtggggatcgctgtgggagctctgtttgggaaggtgcttagccagacgaccatctgccgcttcgaggcccagcagctaagcgtcgccaacatgtggaagctgcgaccactgctgaaaaagtggctgaaggaagtggaagcagagaaccttctgggcttatgcaaaatggagatgatcctgcaacagtctgggaagtggagacgggcaagcagagagcgacgaatcggaaacagcctggagaaattcttccagcggtgccctaagcccacaccccagcaaatcagccacattgctgggtgcctccagctgcagaaggatgtggttcgagtttggttctataaccgcagcaagatgggcagtcgaccaaccaatgatgcttcccca

SEQ ID NO: 388433 - DNA, 407 bp, Homo sapiens
tgggaacaatgacattgtcttggagaattggcctctgcagctgacctgcagcagtccaccaggatgcttgtttaaacagtgaacgcagaagaagtgatgaccggccgctaaactttgaagtattgagttccaggcctggaaagcgtatgcagatcaggttgttttactttgctttttaataaggctgaagagcagatacacaagtcagttttctttggaaaggcaagcaatgaccctggagtagagaagatccacagggtgctgctgtgccagggtgaatgaatggcctgattgtccacagtgaccgatggcatgagaagggtccaaccagagctgtcacactctgggataatacaggcccactgttggtcctttaagattatgtttagagatccagccagcagcat

SEQ ID NO: 388434 - DNA, 472 bp, Homo sapiens
tttttttccacacagagtttcgctcttgtcacccaggctgcagtgaaatggcacaatctcagctcactgcaacatccacttcctgggttcaagtgattctcctgcctcagcctcctgagtagctggaattacaagtgtgcgccaccatgcccagctaatttttgtatttttagtagagacggggtttcatcacgttggccaggctggtctcgaattcctgacttcaggtgatctgcccgccttggcctcccaaagtgctgggattacaggcatgagccactgtgcctggccaatgatttttaaaagtatttttttaatgaatgatgttttaaaaaataatgagattatagctattgtggtaaggccaccagtaccagctctgtagaaggtctctcaaataatatttactggttgcattaatgaatgacaatcagtggccacgtactagagatcagagaatttttctgtatta

SEQ ID NO: 388435 - DNA, 467 bp, Homo sapiens
ctaagacttgagttagtatttttgtgtacatcagatacaacactcttctcatcttttttgtcattatttttcaatgttgttttaatctttccactgttgtttcatgtcatgcactttgttaatattctttaagttattcttagtttttaacaatgatacttaagaaagacttaataggactatagaataggtactccctattccccaaccctgggaacacaatataacatattagttcatttgtatttaagatctatcttgtttacgcctcagtttagttattgctcttacctttcaaacagttaatattttgtatctagttctgtgaaagcaaaaagcaactttattctttcttacaattccccttttacttaatcggaacatttctttcctgtttgttcattagtcactctcagataaatgaatagtctctttttctaaaaaaaaaaaataacatttgacctaaa

SEQ ID NO: 388436 - DNA, 279 bp, Homo sapiens
cagtgacccctgtgcctgggagcattttgtgtatggaaggggacacagttttcactctcatgtccctattggcctgtcccaggctggcggcagctgatcagaccagggccagatctgatggttgcaatggaggaggagaggagaaggaggtagtgacccatgggttaaaggggggaggcccccaggtgtgtcaggatgcagccctgccacaaagcgtggggtcagcccaatcctaactcaactctacttgctgtgtgaccctgcacaagtcacatcccc

SEQ ID NO: 388437 - DNA, 806 bp, Homo sapiens
ctaagtttgaggagactgtaggcatctaagtagtggtgctgaggagggagatagatgtggtgaatctggagaaaactgacctggaggtgaaatgttgggcatcatgagcttttactggtatttactggtatttgttgttgtttttcaatgaagaacgttacattatttcttttctcatagttggaactagtctttacagctatttagaggattttcagggtgatggctgttcttagtagtttgagacccatccctatcctttgtgcgtttcctaccagccaaattcaaactttcacgtttggccaacaaaggaagccttttgcaggacagaggggacagaatggtgaggaccttggcaggtgagagccctgtgtgggcagcacggcctgcctagtccatctctaaaatcagatacacatacgttcatattccagctccataaatggtattttaagctgggaggctggatgagatcataaagaaatgagaataggtaaagaggatcagagacggagcctggggcctccaacatttacagtgaggcggtgaggaggaaccaagccaggagcctgggcaggagcagcccacaacataggaagaaactaaagaggatggcatcctggaaataaatgatgaaagcatttcaggtatgatagagagactaacagagccaagtgctgctgatgtgtcaaggaagatgagggctgaaaatccactattatatttagcaatacaaggtcattggtaattttcactaaagcagtttctatggagtgtttgggtgtgaaagcctaactggagagggt

SEQ ID NO: 388438 - DNA, 761 bp, Homo sapiens
ttgcctgctgagtagacataaacacctgctaaagaaatgtgaaaagagtggaaacgtgctatttggaggttattttcctagtcgacatccaggagatctccagagatctatttcagccccacctgttgatttcatcatgaaaaggaggaagctcaaactgaagtgagttaaaaacttcatctcctagagaggactgtggctcggcctgagttgagtttttttatgtttatgtgcaagcgcaatgaagaagaacaccagcaagactaccatgaggatcaataagcaagatgctctctgcaccccacactcccatgatccgagagatcttcaaaatatgttggatggaggagagtatgccccttttgtatctcctcccatgttagagagcaattttatccagctgctcagctgatttcacagaggggtgacaagggaggacaacagacacttcaaaaggcaagaagaggatggcaggagctcttttgccatggctaccaggccgatctccgagcggaaccaggatgccactgtgtacgtggggggcctgaatgagaagttgcagcaattgaagccatgaatgggcagtacctctgtaaccaccctatcaccgtatcttatgccttcgagaaggactccaagggtgagcgccatggcttagcagctggacgacttctggcagctcagaacccgctctcccagcctgaccgccctcatcagctgtttgcagatgcacctccttcaccctctgcccccaatcctgt

SEQ ID NO: 388439 - DNA, 125 bp, Homo sapiens
tcatgctccgctctggacatgggtcatttccaaaggcactgcttctaagtcacatcctcttaccttcccgctgaaggcataaggataagaaagtactagatatacttttgaattgaaatatggta

SEQ ID NO: 388440 - DNA, 301 bp, Homo sapiens
aagtctttagcacttgaagaaatgggacatcttaattttagcttctgatcacagtttataaactataaaacaaatttctttttaaagtcttataggaacaagaagtgatcttgactaagattcccctgagatagcctcgcaagtgaacagataataagatcacaaaaatgtgtttgcctgtgatctttagatggccacacacagcacacagtctactttcaggtaattttcaagtaaaaatctcagtgtaatcataatgtattgatttgttttgccttggttccttttcacaaatatattg

SEQ ID NO: 388441 - DNA, 376 bp, Homo sapiens
tggctagagagtaggggaggagacatgggagtgaatattggtgagggtaaagagagatgttcacaacagacactttgctccttggacattgacatcctagggactgttgcctgtttagaaaggcgttgctgccacatggcggttcttgggtgacctcggcatatgagcaggggaaggtctgaaacagtgggaggctcttatttcggagagttgagcacagaatgttggagtcctttttgattgcaaagtcacccacaaaggcatgtgtgtccctgcagcttgggctacagatgggcagtgaagcatgcgcgcacgcacacacacacgcgcacactctgagagactgacttcagatgagcttttattagctaacata

SEQ ID NO: 388442 - DNA, 437 bp, Homo sapiens
gcttactatatttagagagatgagataacttaaacagcaaactttaaaaagcatatcagaattccacatgcaaaacacagtagctaaaataggaactcaataggtttaacagtgggaagataggtcaggaaacaaatacgcatattgagggacagagacattaaggatagacaatgcattggtaaacctaactgaaaatataattattgcaggagcgaatggggcaataatcgagattgatgactttgcagaactgttaataaagtgttaactttaagcatgacaaaaataaccagttaaagatattaagactaggcactgcagcttaattagtgtaatcctagcactttgggaggcagaggtgggaggattgcttgagcccaggagttcaaggctgcacttcagcctgcataacagagccaagacgtctttaaaaa

SEQ ID NO: 388443 - DNA, 834 bp, Homo sapiens
ccactgcactccagcctgggccagtgagactatgtctcaaaaaaaaacttagtaaatgcttgtggcttaccattatacataagcctatgtttgcaagacagtgtaccttaaacaaagaccaggaatactgtcatttcctggacccaggaaaattggccaggcgcagttgcacgcgcttgtagtcccagatattctggaggctaaggcagaagaatcacttgagccctggagttcagggctatagtgcgctatgttgatctggtgttcatgctaagttccgcatcaatatggtgacttcttgggagtgggggaccaccaggttgcctaaggaggggtgaacctgcctacgttggaaatagagctggtcaaaactcctgtgctcatcagtagtagaattgcacctgtgaatagccaccgccctccagcatgggcaacatagcaagaccctgcctcttaagataaaaattggaaaacactggtaggaaaaaaaggctgtttggtctaaataagtctggattgggtataaatgacacaaaactatcatgaatttgaaagcatttctaatttcttgaaagtctgaaaaagtttaaacagaattttagctgaaaagtcctgaaagacatttgaaaaaaaacagcaagaacacttaaaactattcaaggtttgggctgggcacagtggctcatgcctgtaatcccagcactttgggaggccaaggcaggcagatcacttgaggccaggagctcaagaccagcctggccaacatggcgaaaccccttctctattaaaaatacaaaaattagccaggcatgatggtgcgtgcctgtagtccca

SEQ ID NO: 388444 - DNA, 1187 bp, Homo sapiens
agtaaaggctgtgggcaaacacagtgcagatgccacaaaaccaggcccactggggttggggatttctcctgccatccacacactcctgtctctgcaccctttttgcaggtgagggagggtgcttttgcccttcataggtccttcatctttaagaaatatgtacactcccaccctccatctcccttggtgctctctgataactgctgctgctggtatcgccctcctttgcttctctgcctcctccttgtctcttgtgtgaactggatcttctttggaagtccttgcaactcttttggagtttgtctcccggttttgctgaaaatgaggtttttgttttctcttcttgttttgtttggatggttccaggaggaaaaggggagaatgctgagctcatgcagccgagttcgtactgagagtctcagcatttcttccctgcccctccccgctgctcttcatgtgtgtgactgtgctccctgggtccttctcttctgggtacactcatattttgtcagtttactctaagtgaattacccagattcagaaaaggataattttcttcctccctcaaaaaggtgttttgttttggagacagggttttgctgtgtcacccaggctggagtgcagtggtgcaatctcagctcactgcaccctctgccacctgggctcaagtgatcctcctggctctacctctctagtagctgggtctacaggcatgcaccagcatactaggctaatttttgtattttttgttttgtagagatggggtttcaccattgttggccaggcttgtttctaactcctgggctcaagcaatccacccgcctcagcctcccaaagtgctggaattacaggcatgagccactgtgcccagccaaaaagttttaatactacttttcctatttagagcatcatcacatctttggctcatacaagactttgggtctagttaaatttttttttgcattttgttcacaagccaaccttttcttccatctagtatttatttgctttttaggaaaaatgaagcttacttaattgtggtgtcattttatctcaatagttttgtgctctttttttttttttaaattgaatcatggtttggcatcgtttatctgttcctctgtactttcatgacactcacacatttggttagcatgttttctttgttctttgtctaagtttaataa

SEQ ID NO: 388445 - DNA, 595 bp, Homo sapiens
tcataatagccattctaacaggtgtgagttaaagggtctgtagtactcttgcagtgtctttgctgatattctgtgtttgttttcctgttctttatttcatttatttccactctagtctttattatttcttcattatttaggagtgttatttaatttccatatatttgtgatttttcctttctttttttggtctgtattgagttctacttttattccattgtggttggaaaacacactttgacttaatcattttaaatttattgaggttcattttatagcctaacatattgcctgctggaggatgttccatatatccttaagtatgtacattctggccaggcacggtggctcacgcctgtaatcccagcagtttgggaggccgaggtgggcagatcacgaggtcaagagatcgagaccatcctggccaacatgtgtgaaaccccatctttactaaaaatataaaagttagctgggcatggtggcgcacgcctttagtcccagctacttgggaggctgaggcaggagaatcgcttgaatccaggaagtggaggttgcagtgaggtgagattgtgcctggtgacggagtgagattctg

SEQ ID NO: 388446 - DNA, 367 bp, Homo sapiens
tgagctttattgtgtgatctctgtgacatctatttctgttacataatggtctcatttcttctgtattgttttgctgtattcataatagtggaatttgactgacagaggatctccagataaggaaaatgctgttaaatacacaatctttaattagcagatgattttgtcaataatttgaaagcttccctcttccatactccccaaatctctgaatatactttagaaaatgaagatcctaaaacatatttcaacattttgaaaaataaaataattgaagtaattcccaactgtcttaaatataaatcaaagtatgggttatttaatacccaagaatgaaaaataacatcagagaagaaaaggtaaatat

SEQ ID NO: 388447 - DNA, 352 bp, Homo sapiens
ttattaaagtttaggaagcacagggatagtcatcccctacctaggcaatgaggttttgttaatccttccatagaggtgccaattatgggaggaaaatggtagtgagtaggagattgtggttgataatgatgtaccctacaggattacagtgtgggggcaaatgagagagagtcataaatacagagtctgagtgaaccaaaatgagccttggagggagtaaatcttactgtagacaagcatcaagtttaccaaccagcacagatcctacaatcttgcaaggatgcaagaattttcttaaatgggttaacaagtaacttcagttcaaaaaattccaacattcaaagtttctgtc

SEQ ID NO: 388448 - DNA, 395 bp, Homo sapiens
aacttttgaatgctatacctttccaattcactacttattctcaaacaaataaccttaaataaatacagtaaataattcagtctctttttctacacaatcttccagacctcaataaacaaagataattctgcttaaataaccacttaaaatgtacatttcctttgacccacagatcccacgtccaggaacaatttttacccagaaatattgtacatgtacacagataaagatacacagaaaatctaaattaaattggaagccaatctatgagtccatcaagaggggaatgtttaaataatttatagggaaccgatactatgaaatactatgttattattaaaaagaatgaagtacaatgtatctgttattgttattgaatgacttctaagtcatat

SEQ ID NO: 388449 - DNA, 606 bp, Homo sapiens
tcagaaaaggccttgtcccttccaggaataagaagggactttattatagatgcagtaataaaaacagctgccattaagtgagcacttactaagtgtcaggctttttgctaggcactgatatccattatctcctgtctacacaaagcattcttgttcccattccaaagacgagcaatatgaggctcagaaagattaacatgcccaaggtcacacaggtaaatgatggggtcagaatctgaactctaggtctgtcttgggagggaggggaaaaaatcagaacaaataaggaggacacagggagaatagactcaggaatatgaaatacaacacacaccaccgaaggacagttcacatgtctttacacagggggtataaaatatgtatgcaaagctgaattctgagtcagaatgacccaactcgtgcttgaaagcaagtgcctcttaatttgcccctcatggcagcctgtgagacagtggtgtcctaactcctggcctttgaggaagtcaaattcaccaagtttccatgagccctccacagccacacccttctcaaatcaggcaagctcatttctcttgaccctcccctggtgtcactgaggggacaggt

SEQ ID NO: 388450 - DNA, 1762 bp, Homo sapiens
gtcagattcaacattatgcaagattattgtataggagcaattgccaatgatttgaaataaaaaccatggaagaaaaatcaacattactgttctattaagctgtttctcccccctaggagttaagaaaagacctctcactattctagcagtatagcatatttgttcaattccagaaagatgggaacttagtctaaaaatgactctttgagcaactcatatttttctggaactctatgtaaaagcaaattaatataaatatatatgttttgagatactgggacatcacacttttttttaatctttcagttgaatttcttcccaaatagagaatatttttattctttgattcttctagcctatctgtattttatgatcagattttgctaaaacagacctgaagatgcacctggataattaggtaattgagtataatttggaaagtcagtgcttatataaaccatgcttaataatggactattttgattctgtcttgaccctagaacttaagtctcaggaagttattatttatgatgatgtagacctgagtgaaaaagagtcaaaagatgaagataaactgaaaatgtggaagcccaagtttctgacaccaaaggaaaaaaaagagaaaaacggtgctgaagaatcagaaagtttctctcctagaaatttcttcaaaaccaagaagcaaaacttagaaaagaacagaatgaaaagagaagaaaaactatttagagaaaggtttaagtacgacaaagagattattgtcatcaatacagcagtggcctgttccaataattcaagaaatggaatatttgatttgccaataagtcctggagaagaattggaagtcattgataccaccgaacaaaatctagtgatatgtcgtaattctaaaggcaaatatggatatgtgctcattgaacatctagatttcaagcatcaaagttggtcaccttagaaaaatcaagatcaaatgctatggactgcacaaaggagaactagtcctaagatcctagtcctgcgttacatcagtttcagtttacatgtcaaaattttgagatggtggaatctgtggaaactttcgttctgaacttaaaagagaaaaataaaaacaaatcctcaacatttagatgttggttttactcctaaaaggttatctttcaatgtctatttcagtatctacttcactgtcagttcaagagaatgtgaaacagtatgtgttagcatttgagcacttatttaatgagccatatccaaagttagaaatcatgccttatggcacctagtcagttgtgcagatggttagtttgcttctaatattagtatatgagcatttgtaatttctagatgttgtgcactcaaacttggtataatttaattctgaacagtaaacagtgtaaccaaggtcttttaaatactcaagtttaaggtataatcttaattatggctcagtctttaaaaaagtataaatgtccttttactttatcacaaaaataaactcatatgaatactgttccacatttgtttcttttgggaatagtttgcagaaaaataatttattcctaaattcacccatcattttaagaagtgcccaaatgtatttaacaaaataatatatatgctgtattactttaaaacatctttttgtccaaaataagaacaattgtcattattttgtctatgcccaaataactattcaaataatagcattcatatgtactttcatttatatggaattaaataaaaatttaaaagctgacatcta

SEQ ID NO: 388451 - DNA, 1794 bp, Homo sapiens
  misc_feature (1752)..(1752): n is a, c, g, or t
  misc_feature (1761)..(1761): n is a, c, g, or t
gtcagattcaacattatgcaagattattgtataggagcaattgccaatgatttgaaataaaaaccatggaagaaaaatcaacattactgttctattaagctgtttctcccccctaggagttaagaaaagacctctcactattctagcagtatagcatatttgttcaattccagaaagatgggaacttagtctaaaaatgactctttgagcaactcatatttttctggaactctatgtaaaagcaaattaatataaatatatatgttttgagatactgggacatcacacttttttttaatctttcagttgaatttcttcccaaatagagaatatttttattctttgattcttctagcctatctgtattttatgatcagattttgctaaaacagacctgaagatgcacctggataattaggtaattgagtataatttggaaagtcagtgcttatataaaccatgcttaataatggactattttgattctgtcttgaccctagaacttaagtctcaggaagttattatttatgatgatgtagacctgagtgaaaaagagtcaaaagatgaagataaactgaaaatgtggaagcccaagtttctgacaccaaaggaaaaaaaagagaaaaacggtgctgaagaatcagaaagtttctctcctagaaatttcttcaaaaccaagaagcaaaacttagaaaagaacagaatgaaaagagaagaaaaactatttagagaaaggtttaagtacgacaaagagattattgtcatcaatacagcagtggcctgttccaataattcaagaaatggaatatttgatttgccaataagtcctggagaagaattggaagtcattgataccaccgaacaaaatctagtgatatgtcgtaattctaaaggcaaatatggatatgtgctcattgaacatctagatttcaagcatcaaagttggtcaccttagaaaaatcaagatcaaatgctatggactgcacaaaggagaactagtcctaagatcctagtcctgcgttacatcagtttcagtttacatgtcaaaattttgagatggtggaatctgtggaaactttcgttctgaacttaaaagagaaaaataaaaacaaatcctcaacatttagatgttggttttactcctaaaaggttatctttcaatgtctatttcagtatctacttcactgtcagttcaagagaatgtgaaacagtatgtgttagcatttgagcacttatttaatgagccatatccaaagttagaaatcatgccttatggcacctagtcagttgtgcagatggttagtttgcttctaatattagtatatgagcatttgtaatttctagatgttgtgcactcaaacttggtataatttaattctgaacagtaaacagtgtaaccaaggtcttttaaatactcaagtttaaggtataatcttaattatggctcagtctttaaaaaagtataaatgtccttttactttatcacaaaaataaactcatatgaatactgttccacatttgtttcttttgggaatagtttgcagaaaaataatttattcctaaattcacccatcattttaagaagtgcccaaatgtatttaacaaaataatatatatgctgtattactttaaaacatctttttgtccaaaataagaacaattgtcattattttgtctatgcccaaataactattcaaataatagcattcatatgtactttcatttatatggaattaaataaatatgatgcgnccacgcccntttttttttcattataccgtgattattatatat

SEQ ID NO: 388452 - DNA, 906 bp, Homo sapiens
tagtgaatcctgatagggagataagcagaaagggatataggcaaataggaatgtgctcattgaacatctagattcaagcatcaaagttggtcaccttagaaaaatcaagatcaaatgctatggactgcacaaaggagaactagtcctaagatcctagtcctgcgttacatcagtttcagtttacatgtcaaaattttgagatggtggaatctgtggaaactttcgttctgaacttaaaagagaaaaataaaaacaaatcctcaacatttagatgttggttttactcctaaaaggttatctttcaatgtctatttcagtatctacttcactgtcagttcaagagaatgtgaaacagtatgtgttagcatttgagcacttatttaatgagccatatccaaagttagaaatcatgccttatggcacctagtcagttgtgcagatggttagtttgcttctaatattagtatatgagcatttgtaatttctagatgttgtgcactcaaacttggtataatttaattctgaacagtaaacagtgtaaccaaggtcttttaaatactcaagtttaaggtataatcttaattatggctcagtctttaaaaaagtataaatgtccttttactttatcacaaaaataaactcatatgaatactgttccacatttgtttcttttgggaatagtttgcagaaaaataatttattcctaaattcacccatcattttaagaagtgcccaaatgtatttaacaaaataatatatatgctgtattactttaaaacatctttttgtccaaaataagaacaattgtcattattttgtctatgcccaaataactattcaaataatagcattcatatgtactttcatttatatggaattaaataaaaatttaaaagctgacatcta

SEQ ID NO: 388453 - DNA, 1599 bp, Homo sapiens
gtcagattcaacattatgcaagattattgtataggagcaattgccaatgatttgaaataaaaaccatggaagaaaaatcaacattactgttctattaagctgtttctcccccctaggagttaagaaaagacctctcactattctagcagtatagcatatttgttcaattccagaaagatgggaacttagtctaaaaatgactctttgagcaactcatatttttctggaactctatgtaaaagcaaattaatataaatatatatgttttgagatactgggacatcacacttttttttaatctttcagttgaatttcttcccaaatagagaatatttttattctttgattcttctagcctatctgtattttatgatcagattttgctaaaacagacctgaagatgcacctggataattaggtaattgagtataatttggaaagtcagtgcttatataaaccatgcttaataatggactattttgattctgtcttgaccctagaacttaagtctcaggaagttattatttatgatgatgtagacctgagtgaaaaagagtcaaaagatgaagataaactgaaaatgtggaagcccaagtttctgacaccaaaggaaaaaaaagagaaaaacggtgctgaagaatcagaaagtttctctcctagaaatttcttcaaaaccaagaagcaaaacttagaaaagaacaaaatctagtgatatgtcgtaattctaaaggcaaatatggatatgtgctcattgaacatctagatttcaagcatcaaagttggtcaccttagaaaaatcaagatcaaatgctatggactgcacaaaggagaactagtcctaagatcctagtcctgcgttacatcagtttcagtttacatgtcaaaattttgagatggtggaatctgtggaaactttcgttctgaacttaaaagagaaaaataaaaacaaatcctcaacatttagatgttggttttactcctaaaaggttatctttcaatgtctatttcagtatctacttcactgtcagttcaagagaatgtgaaacagtatgtgttagcatttgagcacttatttaatgagccatatccaaagttagaaatcatgccttatggcacctagtcagttgtgcagatggttagtttgcttctaatattagtatatgagcatttgtaatttctagatgttgtgcactcaaacttggtataatttaattctgaacagtaaacagtgtaaccaaggtcttttaaatactcaagtttaaggtataatcttaattatggctcagtctttaaaaaagtataaatgtccttttactttatcacaaaaataaactcatatgaatactgttccacatttgtttcttttgggaatagtttgcagaaaaataatttattcctaaattcacccatcattttaagaagtgcccaaatgtatttaacaaaataatatatatgctgtattactttaaaacatctttttgtccaaaataagaacaattgtcattattttgtctatgcccaaataactattcaaataatagcattcatatgtactttcatttatatggaattaaataaaaatttaaaagctgacatcta

SEQ ID NO: 388454 - DNA, 410 bp, Homo sapiens
actgaggctcataaaggagatgaaatgtgattataagcaggctgatctcttgcatctggattcaaatttggattaccacacatcaggggtcagcaaactatggcctgaggaccaaatatggcctgccacttgtttctgtgtataaagttgcaacagtagagttgaagagctgccatagagataatatggcctgcaaagcctaaaatatttattatatggcctttccatggattatcaaaatatatttctagatgactttttaattttttgtaaaacataattgcccatgaagtgttgatggttccatgaatatataattcagtcttaatttacttgctcaaaatatatttctcctcagagatgaagataaactgaaaatgtggaagcccaagtttctgacaccaaaggaa

SEQ ID NO: 388455 - DNA, 237 bp, Homo sapiens
tagaatgtccctcaatttgggttggtctgatgtttctcatgatttgatttcaggttgtgcatctttgtcaggaacctcccagaagtgatgccggctcttctcagtgcatctgctctcgtagacctggctccgtgtgtcccattactgcttcccttggacaacttggtggagcttctccactgtaaaatgacttttccctttgaaaagagatattttgttggcagttgggcattttga

SEQ ID NO: 388456 - DNA, 563 bp, Homo sapiens
gaccacaagagagggttcttggatctcatgcaagaaagattcagggcgagtcgcagtgcaaagtataagcaagtttattaagaaagtaaagtggtgaaacaacagctgctccatagacagagtaggatgttccccaaagtaagaggaggggctaggcgcagtggctcaccacacctgtaatcccagcattttgggaggcctaggcaggtggatcacctgaggtcaggagttcgagaccagcctggccaacacggtgaaaccccgtctctactaaaaatacaaaaatagctgggactacaggcacgcaccactacgcccagctaatttttgtgtttttagtagagatggggtttcaccatattggccaggatggtctccatctattgacctcgtgatccgccccctcagccttccaaagtgctgggattacaggcgtgagccactgtgcccggcaaaactctgtctcaaaaaaaaaaagtaagaggaggaacacattcaccctcggtataatgcttgtatatatggagagatgtgctctgctacaaaagtttgtgataaaggat

SEQ ID NO: 388457 - DNA, 607 bp, Homo sapiens
atgataaaattggttatgttacacatcatttcacttaaagatgaagttttcaagagtgtatctatgatgacattaaataaagacttactgtgatcattaaatagtgactccacattattgcttctcccagcctctggtaactacagttgactgctgaacaacatgggtttcaatccatttatatgtatattttttcattaaatacagtggaaaattttggggaaagcttcaacaatttgaaaaacctcatagatgaaccatatatcctggaaatatcaaaaaactctaaaatttagatatgtcatgaatgtataaaacatatgtggtaactcatctattttatcatttactaccaaaaaatatacacaaatctattataaaaagttaaaacgtattaaaacttaggcacacaaacacagactatatacggtgttattcctagttgagagaaatgtaaataaacacaaagatgcagtgttaaataataactgcataaaattaactgtagtacgtattgtactactgtgataatatcatagccacctcctgttgctattgcagtgagcccaaatgttgtatctgctgaaaacgctatgtgatgcaaatc

SEQ ID NO: 388458 - DNA, 381 bp, Homo sapiens
accttgaatgttggctcctggaaatccaattaaatatggaaagtgtttggctgaagtgaaatgcaaattactacccccctccaaccccaagtgtccctttagaaagcagagtccagaggagcctataaggtgggggtcaagaggtgtaggtttgttcctaggtctgtcactggtaatctgtgtggtcttcaataagccccttcctttctttgggtctttttcctgctttggaatgttatgctcaaggagcttctcccttttagccccctgatgctaggaggccaggccatgggccatgccctgtgagggaccctgtgtgcagaggagcaggagtgagggaagctgttgtggttacaagcgcattattaacctgtatgagtg

SEQ ID NO: 388459 - DNA, 341 bp, Homo sapiens
tttgatgcctgtccaatcccgcgcactccagaaacccataatacgggagacaatgaagccaagagtcgagtctttgggcactttggacgttctactctggcagagtcagctgggggactccaacggccaaaggtccacctgctcctcaccgtctgctcttcactgcttcctccgcctgctcttcaccgtctcaaaagtcgccggcccctctacaggcgacaactgcagcttctcaggcgaaagtcactctctttcccattcttagccccgctcacaccttgcactcacagtcatttctgccaggcctgggccagcagacgcgcgcgtgggaaggaccagaa

SEQ ID NO: 388460 - DNA, 352 bp, Homo sapiens
aacatctccagcttagacacagtctcgttcctaactgccagttctcagccacaatggctcaaagaagccgaaggctctggatggaagaaaattgctttccacaggcaaaaatggaagatatctgcacacactgcaagtgcacagacatcagaagagagcactgcattccacatggcatccatctggtatgaaaccccgcattttttaataaacgagaagcctgttccatatatagggagactcctgaaaacctggtgatacatatatttgaaaatgagggtgtttccataggaatgaaagaaactgtctgtttatagagcctgttacaacagaatagaccgattatacctac

SEQ ID NO: 388461 - DNA, 449 bp, Homo sapiens
aggtacctaacatttgagtgtctatggcaggcagtatgctgggtgctttcttttccttatagatagaatttaatcctcatatttgtgtcgtataaggaattgtgatcattttacagaagaagaaactgaagcaactgaggcatatagtgattaactagtttgcatttgtttacatagctagtaagagaagaaaagctcgtatttaaaaacctgatctgccttgctccagagccattgttctttttgttgtactgcatataaatcttcctggttttaagctgttaaatcagtagtcttctttttttttttgagacagagtctcgctttgtctcccggcctggagtacagtggcacgatctctgctcactgcaaactcttcctcccaggttcaagtgattcttctaccttagcctcttgagtagctaggaccacaggcccgtgccaccatg

SEQ ID NO: 388462 - DNA, 345 bp, Homo sapiens
tctttgggcaaagcagaacaccatctaacaccagaggactagactgcggccggagcattgcccgagccatcccaggggatggagatggggaaatggaggcccagaaagaaaaggagactttcctaaggtcacatactggagctcgtggtgcagctagactgcaacctaatgtggtggagttcctactaatatctggattcatcattcaagtcactttgatgttctctgttctttgagctactggagaatgccttgtttgtctttccaattcatagagacacagacttgatggagatttgaaattcaacaattgtggattacattttaaagcattttttcctaatt

SEQ ID NO: 388463 - DNA, 2148 bp, Homo sapiens
ccagctctaggcaacatagtgagaccctgtctctaccaaaaagaagaaaaaagaaatcaacaacatgcaaccataagaatggatgagatggccctaaaagaataaggattacatataatgagaagacgtgtgggctgaaatacctagtgaacaatatttaagggaaactgaagtgcaaatggcctcacaggtttgtttttgtgtttaagacaaggtctcactctgttgcctggactggagtacatagcacgaacatggtttactgcacctcagcttcctgggcacaagtgattctcccacctcagcctcccgagtagctgggagtggtggcacatgcctgtagtcccagctgtgtgggaggctgaggcaggggaattgcttgaacctgggaggtggaggttgcagtgacccaagattgcatgcaccactgcactccagcctgggtgacaaagcgagaccctgtctcaaaaaaaacaaggactctacagatagatagacatcatatatcatattagtttgaatcctggctgttagctgttagacttgggcaaataatttaacctcaactttccctatctataaaatgggaattaaaatatttgcaccttatagggttattgtgaggattaaataggaacattgtataaagcacttaaaacagtacctgggacatactaagtaatataattgttaactcttactagcattctgtcccttttatttcctaaatatctctcatgcccatctcctaaatatctctttcctaaatatctctcatgcttttggcttaagacctcttttcctccttatctattgactggactgcggcaaatgcctgctaatcgttatttttgtgttcattcatttagcaagccaatttattacgcgcttagggtgctgccagggctacaaaagctgttgagactgtacttgatatgaagaagcttgctgattatcatgggaagactgacataaggaagcaccataaaattctgctgtatgagaggtatacacgggatactgggggttaataattgagggtatggtccattcaacatgagtgagacagaaacaattcataaaggagatgaaatgtcttgaggaatgagctcttagaagaatagttttcaaatgagtgtgcatcacagtcacctgtaagacttattaaaacagatcgctgggccctacacccagaggctgtggttcagtaggctgtagtaaaccagtaatttgtatttctatgacgttcccaggttctaatgctgttccccaaggccacaccttggaaaccaccacattaaaatacccagaaggcattaattcccagtccttcctctacacagctgcaaaacaatggtcctgaccatttcatctttgcactacatccttcactgtctctcttttgcccataggataagtacaaactagatctggttactgcctgccccaccagcctcagcatctctcacaactaggactaactttttcttctgacaactataaaatatttcccttgccttctcaagtttgctcaaggtcaagttatgccttttgcctggaatgacttgacttctcttttgttttacttagctggctgcttttcatcttgtaggttaggtcaaggactccaggaagtcttccctggacaagtaatgaagagggcataatccaagggccaactcccatgtttggaacctgactccattttcaggcacgtaatattgtcaaattccttttaaaagcacctgtctgtctgttaacgttggtgcagatactgctattcccctcctccataccattgctgatggttactgagggtatgggaagggccgactagtccagctgttcacaaacagcccttaatgtcaaactgaatactgccaacgtagttccagtttctgtatctaaagactcagcttggagtcacttgtctggactaaaagtaacccctccttgtctggtttgtgactttctgtactctgatgcccccagctttctgccttctagaaatttgtcagaatttccaaaattcttgggccttccttcttgctctatatatggttttggattcattccttttaaaaaatatttactgtcatttcagtagaattttgacacaataaatataagcacatcagattttttgcc

SEQ ID NO: 388464 - DNA, 2190 bp, Homo sapiens
ccagctctaggcaacatagtgagaccctgtctctaccaaaaagaagaaaaaagaaatcaacaacatgcaaccataagaatggatgagatggccctaaaagaataaggattacatataatgagaagacgtgtgggctgaaatacctagtgaacaatatttaagggaaactgaagtgcaaatggcctcacaggtttgtttttgtgtttaagacaaggtctcactctgttgcctggactggagtacatagcacgaacatggtttactgcacctcagcttcctgggcacaagtgattctcccacctcagcctcccgagtagctgggagtataggtgtgtgccaccacgtccagctaatttttttatttccttgtggagatggggtctcatgaccttgtccaggatgatctcaaactcctgggctcaagcaatcctgtgttggcctcctaaactgctgagattattgcaagtgcctccttgcccacctgggtgacaaagcgagaccctgtctcaaaaaaaacaaggactctacagatagatagacatcatatatcatattagtttgaatcctggctgttagctgttagacttgggcaaataatttaacctcaactttccctatctataaaatgggaattaaaatatttgcaccttatagggttattgtgaggattaaataggaacattgtataaagcacttaaaacagtacctgggacatactaagtaatataattgttaactcttactagcattctgtcccttttatttcctaaatatctctcatgcccatctcctaaatatctctttcctaaatatctctcatgcttttggcttaagacctcttttcctccttatctattgactggactgcggcaaatgcctgctaatcgttatttttgtgttcattcatttagcaagccaatttattacgcgcttagggtgctgccagggctacaaaagctgttgagactgtacttgatatgaagaagcttgctgattatcatgggaagactgacataaggaagcaccataaaattctgctgtatgagaggtatacacgggatactgggggttaataattgagggtatggtccattcaacatgagtgagacagaaacaattcataaaggagatgaaatgtcttgaggaatgagctcttagaagaatagttttcaaatgagtgtgcatcacagtcacctgtaagacttattaaaacagatcgctgggccctacacccagaggctgtggttcagtaggctgtagtaaaccagtaatttgtatttctatgacgttcccaggttctaatgctgttccccaaggccacaccttggaaaccaccacattaaaatacccagaaggcattaattcccagtccttcctctacacagctgcaaaacaatggtcctgaccatttcatctttgcactacatccttcactgtctctcttttgcccataggataagtacaaactagatctggttactgcctgccccaccagcctcagcatctctcacaactaggactaactttttcttctgacaactataaaatatttcccttgccttctcaagtttgctcaaggtcaagttatgccttttgcctggaatgacttgacttctcttttgttttacttagctggctgcttttcatcttgtaggttaggtcaaggactccaggaagtcttccctggacaagtaatgaagagggcataatccaagggccaactcccatgtttggaacctgactccattttcaggcacgtaatattgtcaaattccttttaaaagcacctgtctgtctgttaacgttggtgcagatactgctattcccctcctccataccattgctgatggttactgagggtatgggaagggccgactagtccagctgttcacaaacagcccttaatgtcaaactgaatactgccaacgtagttccagtttctgtatctaaagactcagcttggagtcacttgtctggactaaaagtaacccctccttgtctggtttgtgactttctgtactctgatgcccccagctttctgccttctagaaatttgtcagaatttccaaaattcttgggccttccttcttgctctatatatggttttggattcattccttttaaaaaatatttactgtcatttcagtagaattttgacacaataaatataagcacatcagattttttgcc

SEQ ID NO: 388465 - DNA, 816 bp, Homo sapiens
gtggcgcaatatcggctcactgcaacctctgcctcccgggttctagctattctcctgcctcagcctcccaagtagctgtgattacaggcgtgtgccaccatgcccagctaatttttgtatttttagtagagatggagttttgccatgttggccaggctggtttcaaactcctgatcttaggtgatacacccgcctcggcctcccaaagtgctgggattacaggcgtgagccacgtcccccagccagtttcttaatctatacatctagcccagtccatgcccctgtttcagactattatatccaaccacctgctatacatctcataaaggtatctcaaacacagcatatctaaagctgaagtcatcatcttgccctggtttttcctgtctctttgctgatggcatcccatttacccagtcattcaaactggaaatctaaaagcctcacttagcaagagtttggaggcagaatatgataaagaacaaggactctgggaggccaaggcaggtggattgcttgaggtcaagagttcgagaccagtctggccaacatggcgaaaccccgtctttgctaaaaaaacacaaagaaattagctagacgtggtggcacatgcctgtagtcccagctgtgtgggaggctgaggcaggggaattgcttgaacctgggaggtggaggttgcagtgacccaagattgcatgcaccactgcactccagcctgggtgacaaagcgagaccctgtctcaaaaaaaacaaggactctacagatagatagacatcatatatcatattagtttgaatcctggctgttagctgtta

SEQ ID NO: 388466 - DNA, 478 bp, Homo sapiens
caaatcttccagggctccgggtcctgatttgcaggtgagcccgggagccaagatgtgaatctcaaagcccgtccccagccctcactcttagacaccgccctgtgctgcgaagggcagggccatgccaaagttcaatagcacctaggtagagggaagactttctggaagagacacacccctaagcaaaattttagaaaggacgtattctagcctggcaaatgtcaagagggaagaaaaaggaaacggcggctgtgtccatctcacaagtagctggtattgtgtcagaatctttacctacgctcttgtttaagcctgaagacgtgagttaggtataatgactcccatttgacagatgagaaaactgaggccacaccgtaatcgaagattcgagtcagtttatggaaggaccaacctcctgacactcatccccatattctgttcagggcttcacttagcaagccagcaaggcagggagagt

SEQ ID NO: 388467 - DNA, 322 bp, Homo sapiens
accagcagtaatccaagacatggaattagagatgacattttttctacttttattttgaaagactccctattttttgcctgaagaagagaaataggcaaagaaatatggataattatgaaagtagtgaagccacatctgattcctttgagatatttttcaagaacatttaatccttttaagcaatgttactcttgtcttattgccaatgtcagtgatagcttggataatcctctagctatgaactaactgtttaaatgtgacctggcaagtaacatactcattctgtactctaacttaatattgcaacgtttgtcattcatag

SEQ ID NO: 388468 - DNA, 348 bp, Homo sapiens
ttagtttttaagtctttttacccctcttctgaagagtctatagaagaagcctctgtttggtctggaaaccggggtatgtatgttcttgtctagatctaatggcaaagcttcctcactttcacttttgttgatgtctttgaaacacccagattcgatcatctgcatgcacagaataacaggacagagaagccgcagagaaactgccaggtcagtgggtgtctcccagtgccagcagctcctgcccagccccgtgcggggcacctcagagctcctgcacccactgtggggccccttttctgggttcctccttccctgcttcctgacctcttcttggaataagtaatgtgg

SEQ ID NO: 388469 - DNA, 449 bp, Homo sapiens
caaagtgctgcgattacaggcatgagccaccatgctcggaccatgccatttatgctgtacttacaagtttaattcctaaataacaattcttaacagcaagtgccttctggcaggctgtggactcccagcctgggttcatcctgaattcacctcttccacaaccttttattatgtgatgccataactctcgacactgcctttcccattaaattgagtttccttaagggaatgccccttgctgtttttgtctctgaaccaagcctagcatggtgcctggcatagagcaggctcttagtaaatacttaatgcatgactatgtgaagacataatagattttgttaaaagaaaaaaattccaaagcactcacagaaataaagcagagctgttaatttccccctcactccttgacaatggaaataactctcgtaaacacaaatgactgtgctatg

SEQ ID NO: 388470 - DNA, 246 bp, Homo sapiens
agatggagcctcactctctcgccagactggagtgcagtggcacgatctcagctcactgcaacctccacctccctggttcaagcgattctcctgcctcagcctcccgagtagctgggattacagatgccactgcgagaacgggaacaatggaacaggccctcaccaaatgccaaatgtgctatcaccttgattttggatttcccagcctccggaactgtgaggaataaatttttttacttataaatt

SEQ ID NO: 388471 - DNA, 373 bp, Homo sapiens
atgccttagaaatcctaccacctcccagaaatgatagttatggaaattaacatggcatgtcagatatggttcgctgatgccttgctttagttctcagaaataaggctttaaaagactggcatgtttcaggattgctgtcaggaaatgataatttaaaatacccaagagtacactaagaattatggaagcatctgtgaaactaataagccagtggacatactgatttttaccaatgtgtctacatactatattaaaaaacttcctacaaagtattgtcccaattcagttcatctgaggatgtgaaaacactacagtgtaccttaaaacatcacattcacaaccctgacagactgaaataaaaatgaaattaggg

SEQ ID NO: 388472 - DNA, 591 bp, Homo sapiens
cctccaaccttttattttgggctttttttactcaaagagagctcatgccatcaagcaaacagacagttaccatggttatactaacgctgctacttcacaacagataaccacaggttagaaatcttgttgctaggttgcaacatgctagctaagagtccatatctaaatgagaggctccctcaaaaacacacttccttggagagggacctggcgtttacattttagaaatttttttttgaagttcattttttccctctggtatacggagttcatcaatgctacaaactgcctttatccacctggataagactgagggacctcacagacaaatttcattttgtgatggataacgtgggagcaatcttcagctaaagtctagataaagccttaaagagaaaattgagctcggaagacctgaaaataaagaaaacaccctggcaccaacaagggagagaaacaaaacaaagaagctcaccaaagatggtttgactgtgcaaaaccatgggtacggtaaccagtaacacccttattttatcaagatgtctattgtaacaggatgtgttttcaataaatgtaaatgacctgtaaatg

SEQ ID NO: 388473 - DNA, 568 bp, Homo sapiens
  misc_feature (544)..(544): n is a, c, g, or t
  misc_feature (547)..(547): n is a, c, g, or t
  misc_feature (554)..(554): n is a, c, g, or t
  misc_feature (558)..(558): n is a, c, g, or t
  misc_feature (564)..(564): n is a, c, g, or t
cctccaaccttttattttgggctttttttactcaaagagagctcatgccatcaagcaaacagacagttaccatggttatactaacgctgctacttcacaacagataaccacaggttagaaatcttgttgctaggttgcaacatgctagctaagagtccatatctaaatgagaggctccctcaaaaacacacttccttggagagggacctggcgtttacattttagaaatttttttttgaagttcattttttccctctggtatacggagttcatcaatgctacaaactggtacgtattcatacacactgaatcacattccttactccagttgcaggcacttgatgtttaataactagtttatctcaagtcaggaagtttacagtgtcaaaatgaatcaaattgattttaccatttttatcaagtattctctgaatatgctctttaaaaaaaaagaatatatatatatgccaggtgcggtggctcaggcctgtaatcccagcactttgggaggcccaggcccaagatgagataccacaggcccaanatnagggtancganctcganttcg

SEQ ID NO: 388474 - DNA, 802 bp, Homo sapiens
atcacatttattctgtgattagtggaggacagagaagagggactggggagaaaaactgcctttattttaagaaagctcattttcctgtaactattcaaaaagaattgattatcaagtgttagataacaatattactaacatttatcatcattcaaatatttagtaaaatttctccatatatttaaaattttacttaagaattttcccagttaaaatatgactgcttagtttgaataaggaagacattcctttcaattcatgacacaatagtacatttttattcttttctcagacagcagagagacactgttactgctttcccttgtaagtcaacagtctgtgatacatgctgtacttttactgattagcaatgcaatgttactgtgaatatttaactagaacttattatattggaatttaaaattttctaacattgaatttagttctcttcatcaaataagcaagcattatttttatgaaatgaaataatcattcttaagcagtgatgataatggaattctgaatacgatgtaaaatcaaacattctattttttctgtttatcctttgacattgagttgttttaatttattacatattattaagttgaaataagctttataccatgttctctgatgttcttgtcataataattttgggtcttttgttaagtaaatatcagaaaatatctgtgagttttgattatgtgatattttcatctgattgattttttaaatttctcattggatttaaagtgttttctttgctaatgttatatacagaattcaataaaagaccaaaaaa

SEQ ID NO: 388475 - DNA, 695 bp, Homo sapiens
tgctgcggcacaggggcggtgcccttcagggaggcgcgcaggagcccatcttgggggagctggagcatggcgggctgcaggtcccagccctaccccatggggaggcggctgaggcccagcgagaattcgagcactgcgcacgagggacggcagtgctgggggaccgggcgccccctccgcagctgctggcctgggtgctaagcccctcactgcccggggctggcggcgacggagggcggctccgagtgagtgcggggcgcggagccccacgcccacccggaactcacgctggcccgcgaacgctgcgcgcagccccagttcccgcctgcgtctctgcctccacacctccacgtaagcagagggggccagctccaaccttggccagcccagagaggggcgtcccacagtgcagcggcgggctgaagggctcctcaagcctgaccagagcggacgccgaggccgaggaggcgctgagaaggagcgagggccgccagcacgttgtcacctctcaagagttcagaacgactacagccttgacattaaccctggaaatcagattctgtgctaaaatgggggtgaccaaggaacagatgtacaagtagagctgagatctccctatgttgcccaagctgttcttgaactcctgagatgaaacaattctcctgccttgacttcccaaagtgctgggattccag

SEQ ID NO: 388476 - DNA, 815 bp, Homo sapiens
accctggctattcacacgcttcagttcacaacttccatccagaatcctacttctctgattgtcctcatggggaaagtatgctatttccttcatcctacaagatgcttctcactgactctatccatattcttctcatccttcaagagccaagtcaaatctctctgcttccaataagccttccttgctacactcagaaatggaatgaatccccaagatggcttaaggatgcccttctgttttggaatgctttctcttggtgtatatcaaggttggttcagtttaccagagaaaagatgccagggtctcattctgtcacccaagctggagtccagtgacatggtcacagctcactgaagcctcaacctccttggctcaagcaatcctttcacctcagccttctaagtagctaggagcacagtgtcataacagaagaatattcgaagctctataaatatgttgcttctacgtggcaaaaaggactttacagcatctgacgctacactggattatctgcgctgggcacaactgtaactcacaaggggcttcctaaccaaggacacgaccgccggctcaacgcagcaacacccggaccgacctcataacatcggctcccaacgatggacgaccgcggacacaagctcaaggaatccaggtggcctctagaagcctgccaagtcacagacacgaactctcccctagcagcctcacgcaaggaccacagccctgctgacagcctgatcaaggattcctgacctccagactacgttgatgccccaaaccgacctgccactccaacttctatacctttccgaacg

SEQ ID NO: 388477 - DNA, 415 bp, Homo sapiens
gccaaattgtagtgcctggggttatttatcaagctgtcactgaacacctagggaagtgcagttccagctaatttattacaatgttgttttcatttttactgggcgcagaaggactcacattgaggccatcgagctgtgatctgcactggaacagacgcagtgacaatgctacttcacttgcacattttttatggcatgtatttttccctgactctgctattttctcataacatttaagaatgttcgttaagctcaaaagaagctaagcgctatttatataggtggaatgaagatggagaggggaaggtgagaaggttgaaacaaatgaatgctgccccaagaactacgcgcatgttacttgcaaatgtgacttgtttaaaccccgaatgtcttacatggggtgactctatcaacg

SEQ ID NO: 388478 - DNA, 276 bp, Homo sapiens
tcaattaattccggctagcaaatcaagaaagaatgaaaagaaaatgacagcttttgcagtttaaaagtgtgccatcaccctccactacatacacaggatgaatccaggtaaacagagcatccgcagaaagctagaaagagcagtagaggcccagggccagtatggagaagagagaactagggaagtgatgccaaattgtaaaggttccttaatagtcgctataacttcaagaaagtttcttccttgatttgctaatgaaatagttctgagtccagg

SEQ ID NO: 388479 - DNA, 3222 bp, Homo sapiens
  misc_feature (174)..(174): n is a, c, g, or t
  misc_feature (183)..(183): n is a, c, g, or t
  misc_feature (186)..(186): n is a, c, g, or t
  misc_feature (208)..(208): n is a, c, g, or t
gccccctgccaccacgcctcctccgtctcccgcgtccggcccgtcccaactcggcccttccgggacacccgggggaaccctccgggctccagggacctctgagtgatcgcccgccccgccctattcgcagccgccgggcctggtcacgcgcagagccgcgccgcgggatcgggnccagcgccnggnggaggcgggacggggacggggncggagggttgaaatcgcgcggccgggccggggcgcgccgagccgaacccagccacgcggcgccagcgaggcggccggacccgcagccccgatgctgctgacgctggccgggggcgcgctcttcttcccggggctcttcgcgctctgcacctgggcgctgcgccgctcccagcccggatggagccgcaccgactgcgtgatgatcagcaccaggtaccggcgccgccgagacgccccccgaggcccggggcgctgcccaccgcaccccacccggccgcggggcccagggcggaaaaggggggcggcaggaagcccgggggctgctccctccgcgtcccggcggcccgagtttccgaagcccctccgcgtcctcccctggcgggagcggggccggggcgggcgggaatggccgatgagcctccggagcccgctccccacatctgcctgcggctggggagagtcaggccgaagggccggggccgggctccctgcggtcctcggaccggactgagcgcgcgcgctgttctctccgcccgcgctaggctggtttcctcggtgcacgccgtgctggccaccggctcggggatcgtcatcattcgctcctgcgacgacgtgatcaccggcaggcactggcttgcccgggaatatgtgtggtttctgattccatacatgatctatgactcgtacgccatgtacctctgtgaatggtgccgaaccagagaccagaaccgtgcgccctccctcactcttcgaaacttcctaagtcgaaaccgcctcatgatcacacatcatgcggtcattctctttgtccttgtgccagtcgcacagaggctccggggagaccttggggacttctttgtcggctgcatcttcacggcagaactgagcactccgtttgtgtcgctgggcagggttctgattcagctaaagcagcagcacacccttctgtacaaggtgaatggaatcctcacgctggccaccttcctttcctgccggatccttctcttccccttcatgtactggtcctatggccgccagcagggactaagcctgctccaagtacccttcagcatcccattctactgcaacgtggccaatgccttcctcgtagctcctcagatctactggttctgtctgctgtgcaggaaggcagtccggctctttgacactccccaagccaaaaaggatggctaaatgctcctgggagtcaggcgcagcctcacaccagctgcctcctccactcagcattccatggaccaaattgtgccctgggtagcctcagactttgggtattgataagccgatggatttgagtttttctaaagaatattcatattacctccttcttctaacttgccctatttgcaaaagcacttttgtagtaacaactattgggtcctgtcagacctccacggacagcaaagtggttttaatgcaagcccaaggatccttcttaaggtcttatctcaagagctctgggaggtggaagcatggggtgggatcggtggaccagggtggtaagtgtctgcacatctgcctgtccctgtatcagcggctacccaccttccaaaccactcaggacagtacccgtggcactgggcccgcagaagcaagggatgacttggttcttggaagtaatgtcgtcttgtgacattggcctgggacaatcattgtgggtaggtagttattgatcgtttactagataacccattggttctttgcctcatcctctcatccatgggtcagagttgaattcttatgtctatagacttccaatcagaagtctcactggtggggctgggggtgggggccaggcaggaggcatggatgggaacctgagtaggtagtgtggccaagagatcagcacaacctttgcaggctgacttgctaagtctgacagtgacaaacttgtgagcttactgcagtcagtcacagaggctgttctttttcacacaccccttcatgcccggctttccccatatccacatgcagagggcgagctcataaaactacagggaagcgtgaaatgatggctttggtagctgtttactgggtaaccccactgtgacactgtccttttcatgtgatgtggaaacctacttctgtcctccaaaccatgaaatgtgtcatctagactgcagagtacttgagtgctttgcctcccgatatgccagagcttgtggtccaaagcccattcctgtgtgtccgtcctgccatttagccacagaaggctgcggagtgaggcggcagctagcctggccagtggctgtcccgtggaccgacacctgcgcccccttctgcaagcaggattttctggtgccaacactcattcatcattcccgatcaactaggatgaatttaagactgtgctaccatgtgttctcaagtggtagtttaaaaagtggatttttaaagtgcctttcaattgtctgtgaacgtctaaaggactgatttgtctcattttgactgttgagtctttaatgggtgccatttaaaaaacaaaatgctattttttaattgtcttttttttttaactatcagtgtatctttaaaagtcacccttacggtgattaaattgcactaacattcccaacttattctcatttgtgaaatacatcaatatcagtgtcctgtaagaatcatcctgtgacctagctcgactggctgccgtgtgctgtggctcaaggtctgtgtccatgtaactagcagaggggtgtgtgtgtgaatgctttcagcctccagaaaggtctagctcacacctcactcaaacctatttttgtggttcatggtctcagtaatacattgaaggttcccagagttcaagcgtagtggtcacacgtaacttgagaccgtttcttctcttcataagtgaatcttactaggaattgggagagtggaagaccgattattggtcagggagccaagcctactttacctgaggagaacctgagtaatgccccattgtgaaggagggtgtggatatggagggagtgatgggacatattttttccccct

SEQ ID NO: 388480 - DNA, 1677 bp, Homo sapiens
cttcttaaggtcttatctcaagaaggatccttgggcttggcattaaaaccactttgctgtccgtggaggtctgacaggacccaaagtggttttaatgcaagcccaaggatccttcttaaggtcttatctcaagagctctgggaggtggaagcatggggtgggatcggtggaccagggtggtaagtgtctgcacatctgcctgtccctgtatcagcggctacccaccttccaaaccactcaggacagtacccgtggcactgggcccgcagaagcaagggatgacttggttcttggaagtaatgtcgtcttgtgacattggcctgggacaatcattgtgggtaggtagttattgatcgtttactagataacccattggttctttgcctcatcctctcatccatgggtcagagttgaattcttatgtctatagacttccaatcagaagtctcactggtggggctgggggtgggggccaggcaggaggcatggatgggaacctgagtaggtagtgtggccaagagatcagcacaacctttgcaggctgacttgctaagtctgacagtgacaaacttgtgagcttactgcagtcagtcacagaggctgttctttttcacacaccccttcatgcccggctttccccatatccacatgcagagggcgagctcataaaactacagggaagcgtgaaatgatggctttggtagctgtttactgggtaaccccactgtgacactgtccttttcatgtgatgtggaaacctacttctgtcctccaaaccatgaaatgtgtcatctagactgcagagtacttgagtgctttgcctcccgatatgccagagcttgtggtccaaagcccattcctgtgtgtccgtcctgccatttagccacagaaggctgcggagtgaggcggcagctagcctggccagtggctgtcccgtggaccgacacctgcgcccccttctgcaagcaggattttctggtgccaacactcattcatcattcccgatcaactaggatgaatttaagactgtgctaccatgtgttctcaagtggtagtttaaaaagtggatttttaaagtgcctttcaattgtctgtgaacgtctaaaggactgatttgtctcattttgactgttgagtctttaatgggtgccatttaaaaaacaaaatgctattttttaattgtcttttttttttaactatcagtgtatctttaaaagtcacccttacggtgattaaattgcactaacattcccaacttattctcatttgtgaaatacatcaatatcagtgtcctgtaagaatcatcctgtgacctagctcgactggctgccgtgtgctgtggctcaaggtctgtgtccatgtaactagcagaggggtgtgtgtgtgaatgctttcagcctccagaaaggtctagctcacacctcactcaaacctatttttgtggttcatggtctcagtaatacattgaaggttcccagagttcaagcgtagtggtcacacgtaacttgagaccgtttcttctcttcataagtgaatcttactaggaattgggagagtggaagaccgattattggtcagggagccaagcctactttacctgaggagaacctgagtaatgccccattgtgaaggagggtgtggatatggagggagtgatgggacatattttttccccct

SEQ ID NO: 388481 - DNA, 1820 bp, Homo sapiens
aatttttgtatttttagtagagacggggtttcgccatgttggccaggctgatcttgaactcctgacctcaagtgatccacccgcctcagcctcccaaagtgctgagattacaggtgtgagccaccgaacccggccagatattacctccttcttctaacttgccctatttgcaaaagcacttttgtagtaacaactattgggtcctgtcagacctccacggacagcaaagtggttttaatgcaagcccaaggatccttcttaaggtcttatctcaagagctctgggaggtggaagcatggggtgggatcggtggaccagggtggtaagtgtctgcacatctgcctgtccctgtatcagcggctacccaccttccaaaccactcaggacagtacccgtggcactgggcccgcagaagcaagggatgacttggttcttggaagtaatgtcgtcttgtgacattggcctgggacaatcattgtgggtaggtagttattgatcgtttactagataacccattggttctttgcctcatcctctcatccatgggtcagagttgaattcttatgtctatagacttccaatcagaagtctcactggtggggctgggggtgggggccaggcaggaggcatggatgggaacctgagtaggtagtgtggccaagagatcagcacaacctttgcaggctgacttgctaagtctgacagtgacaaacttgtgagcttactgcagtcagtcacagaggctgttctttttcacacaccccttcatgcccggctttccccatatccacatgcagagggcgagctcataaaactacagggaagcgtgaaatgatggctttggtagctgtttactgggtaaccccactgtgacactgtccttttcatgtgatgtggaaacctacttctgtcctccaaaccatgaaatgtgtcatctagactgcagagtacttgagtgctttgcctcccgatatgccagagcttgtggtccaaagcccattcctgtgtgtccgtcctgccatttagccacagaaggctgcggagtgaggcggcagctagcctggccagtggctgtcccgtggaccgacacctgcgcccccttctgcaagcaggattttctggtgccaacactcattcatcattcccgatcaactaggatgaatttaagactgtgctaccatgtgttctcaagtggtagtttaaaaagtggatttttaaagtgcctttcaattgtctgtgaacgtctaaaggactgatttgtctcattttgactgttgagtctttaatgggtgccatttaaaaaacaaaatgctattttttaattgtcttttttttttaactatcagtgtatctttaaaagtcacccttacggtgattaaattgcactaacattcccaacttattctcatttgtgaaatacatcaatatcagtgtcctgtaagaatcatcctgtgacctagctcgactggctgccgtgtgctgtggctcaaggtctgtgtccatgtaactagcagaggggtgtgtgtgtgaatgctttcagcctccagaaaggtctagctcacacctcactcaaacctatttttgtggttcatggtctcagtaatacattgaaggttcccagagttcaagcgtagtggtcacacgtaacttgagaccgtttcttctcttcataagtgaatcttactaggaattgggagagtggaagaccgattattggtcagggagccaagcctactttacctgaggagaacctgagtaatgccccattgtgaaggagggtgtggatatggagggagtgatgggacatattttttccccct

SEQ ID NO: 388482 - DNA, 2348 bp, Homo sapiens
  misc_feature (174)..(174): n is a, c, g, or t
  misc_feature (183)..(183): n is a, c, g, or t
  misc_feature (186)..(186): n is a, c, g, or t
  misc_feature (208)..(208): n is a, c, g, or t
gccccctgccaccacgcctcctccgtctcccgcgtccggcccgtcccaactcggcccttccgggacacccgggggaaccctccgggctccagggacctctgagtgatcgcccgccccgccctattcgcagccgccgggcctggtcacgcgcagagccgcgccgcgggatcgggnccagcgccnggnggaggcgggacggggacggggncggagggttgaaatcgcgcggccgggccggggcgcgccgagccgaacccagccacgcggcgccagcgaggcggccggacccgcagccccgatgctgctgacgctggccgggggcgcgctcttcttcccggggctcttcgcgctctgcacctgggcgctgcgccgctcccagcccggatggagccgcaccgactgcgtgatgatcagcaccaggctggtttcctcggtgcacgccgtgctggccaccggctcggggatcgtcatcattcgctcctgcgacgacgtgatcaccggcaggcactggcttgcccgggaatatgtgtggtttctgattccatacatgatctatgactcgtacgccatgtacctctgtgaatggtgccgaaccagagaccagaaccgtgcgccctccctcactcttcgaaacttcctaagtcgaaaccgcctcatgatcacacatcatgcggtcattctctttgtccttgtgccagtcgcacagaggctccggggagaccttggggacttctttgtcggctgcatcttcacggcagaactgagcactccgtttgtgtcgctgggcagggttctgattcagctaaagcagcagcacacccttctgtacaaggtgaatggaatcctcacgctggccaccttcctttcctgccggatccttctcttccccttcatgtactggtcctatggccgccagcagggactaagcctgctccaagtacccttcagcatcccattctactgcaacgtggccaatgccttcctcgtagctcctcagatctactggttctgtctgctgtgcaggaaggcagtccggctctttgacactccccaagccaaaaaggatggctaaatgctcctgggagtcaggcgcagcctcacaccagctgcctcctccactcagcattccatggaccaaattgtgccctgggtagcctcagactttgggtattgataagccgatggatttgagtttttctaaagaatattcatattacctccttcttctaacttgccctatttgcaaaagcacttttgtagtaacaactattgggtcctgtcagacctccacggacagcaaagtggttttaatgcaagcccaaggatccttcttaaggtcttatctcaagagctctgggaggtggaagcatggggtgggatcggtggaccagggtggtaagtgtctgcacatctgcctgtccctgtatcagcggctacccaccttccaaaccactcaggacagtacccgtggcactgggcccgcagaagcaagggatgacttggttcttggaagtaatgtcgtcttgtgacattggcctgggacaatcattgtggccacagaaggctgcggagtgaggcggcagctagcctggccagtggctgtcccgtggaccgacacctgcgcccccttctgcaagcaggattttctggtgccaacactcattcatcattcccgatcaactaggatgaatttaagactgtgctaccatgtgttctcaagtggtagtttaaaaagtggatttttaaagtgcctttcaattgtctgtgaacgtctaaaggactgatttgtctcattttgactgttgagtctttaatgggtgccatttaaaaaacaaaatgctattttttaattgtcttttttttttaactatcagtgtatctttaaaagtcacccttacggtgattaaattgcactaacattcccaacttattctcatttgtgaaatacatcaatatcagtgtcctgtaagaatcatcctgtgacctagctcgactggctgccgtgtgctgtggctcaaggtctgtgtccatgtaactagcagaggggtgtgtgtgtgaatgctttcagcctccagaaaggtctagctcacacctcactcaaacctatttttgtggttcatggtctcagtaatacattgaaggttcccagagttcaagcgtagtggtcacacgtaacttgagaccgtttcttctcttcataagtgaatcttactaggaattgggagagtggaagaccgattattggtcagggagccaagcctactttacctgaggagaacctgagtaatgccccattgtgaaggagggtgtggatatggagggagtgatgggacatattttttccccct

SEQ ID NO: 388483 - DNA, 1769 bp, Homo sapiens
  misc_feature (174)..(174): n is a, c, g, or t
  misc_feature (183)..(183): n is a, c, g, or t
  misc_feature (186)..(186): n is a, c, g, or t
  misc_feature (208)..(208): n is a, c, g, or t
gccccctgccaccacgcctcctccgtctcccgcgtccggcccgtcccaactcggcccttccgggacacccgggggaaccctccgggctccagggacctctgagtgatcgcccgccccgccctattcgcagccgccgggcctggtcacgcgcagagccgcgccgcgggatcgggnccagcgccnggnggaggcgggacggggacggggncggagggttgaaatcgcgcggccgggccggggcgcgccgagccgaacccagccacgcggcgccagcgaggcggccggacccgcagccccgatgctgctgacgctggccgggggcgcgctcttcttcccggggctcttcgcgctctgcacctgggcgctgcgccgctcccagcccggatggagccgcaccgactgcgtgatgatcagcaccaggctggtttcctcggtgcacgccgtgctggccaccggctcggggatcgtcatcattcgctcctgcgacgacgtgatcaccggcaggcactggcttgcccgggaatatgtgtggtttctgattccatacatgatctatgactcgtacgccatgtacctctgtgaatggtgccgaaccagagaccagaaccgtgcgccctccctcactcttcgaaacttcctaagtcgaaaccgcctcatgatcacacatcatgcggtcattctctttgtccttgtgccagtcgcacagaggctccggggagaccttggggacttctttgtcggctgcatcttcacggcagaactgagcactccgtttgtgtcgctgggcagggttctgattcagctaaagcagcagcacacccttctgtacaaggtgaatggaatcctcacgctggccaccttcctttcctgccggatccttctcttccccttcatgtactggtcctatggccgccagcagggactaagcctgctccaagtacccttcagcatcccattctactgcaacgtggccaatgccttcctcgtagctcctcagatctactggttctgtctgctgtgcaggaaggcagtccggctctttgacactccccaagccaaaaaggatggctaaatgctcctgggagtcaggcgcagcctcacaccagctgcctcctccactcagcattccatggaccaaattgtgccctgggtagcctcagactttgggtattgataagccgatggatttgagtttttctaaagaatattcatattacctccttcttctaacttgccctatttgcaaaagcacttttgtagtaacaactattgggtcctgtcagacctccacggacagcaaagtggttttaatgcaagcccaaggatccttcttaaggtcttatctcaagagctctgggaggtggaagcatggggtgggatcggtggaccagggtggtaagtgtctgcacatctgcctgtccctgtatcagcggctacccaccttccaaaccactcaggacagtacccgtggcactgggcccgcagaagcaagggatgacttggttcttggaagtaatgtcgtcttgtgacattggcctgggacaatcattgtgggtaggtagttattgatcgtttactagataacccattggttctttgcccccttcttgctcctgctttcaccatgtgacatgcctgatcccccttcgccttttgccatggtcataagcttcctgaggcctccctggaagctgagcagatgccagcaccatgcttcctgtacatcctgcagaaccataagccaattaaacctttttaataataaaaaa

SEQ ID NO: 388484 - DNA, 2893 bp, Homo sapiens
  misc_feature (174)..(174): n is a, c, g, or t
  misc_feature (183)..(183): n is a, c, g, or t
  misc_feature (186)..(186): n is a, c, g, or t
  misc_feature (208)..(208): n is a, c, g, or t
gccccctgccaccacgcctcctccgtctcccgcgtccggcccgtcccaactcggcccttccgggacacccgggggaaccctccgggctccagggacctctgagtgatcgcccgccccgccctattcgcagccgccgggcctggtcacgcgcagagccgcgccgcgggatcgggnccagcgccnggnggaggcgggacggggacggggncggagggttgaaatcgcgcggccgggccggggcgcgccgagccgaacccagccacgcggcgccagcgaggcggccggacccgcagccccgatgctgctgacgctggccgggggcgcgctcttcttcccggggctcttcgcgctctgcacctgggcgctgcgccgctcccagcccggatggagccgcaccgactgcgtgatgatcagcaccaggctggtttcctcggtgcacgccgtgctggccaccggctcggggatcgtcatcattcgctcctgcgacgacgtgatcaccggcaggcactggcttgcccgggaatatgtgtggtttctgattccatacatgatctatgactcgtacgccatgtacctctgtgaatggtgccgaaccagagaccagaaccgtgcgccctccctcactcttcgaaacttcctaagtcgaaaccgcctcatgatcacacatcatgcggtcattctctttgtccttgtgccagtcgcacagaggctccggggagaccttggggacttctttgtcggctgcatcttcacggcagaactgagcactccgtttgtgtcgctgggcagggttctgattcagctaaagcagcagcacacccttctgtacaaggtgaatggaatcctcacgctggccaccttcctttcctgccggatccttctcttccccttcatgtactggtcctatggccgccagcagggactaagcctgctccaagtacccttcagcatcccattctactgcaacgtggccaatgccttcctcgtagctcctcagatctactggttctgtctgctgtgcaggaaggcagtccggctctttgacactccccaagccaaaaaggatggctaaatgctcctgggagtcaggcgcagcctcacaccagctgcctcctccactcagcattccatggaccaaattgtgccctgggtagcctcagactttgggtattgataagccgatggatttgagtttttctaaagaatattcatattacctccttcttctaacttgccctatttgcaaaagcacttttgtagtaacaactattgggtcctgtcagacctccacggacagcaaagtggttttaatgcaagcccaaggatccttcttaaggtcttatctcaagagctctgggaggtggaagcatggggtgggatcggtggaccagggtggtaagtgtctgcacatctgcctgtccctgtatcagcggctacccaccttccaaaccactcaggacagtacccgtggcactgggcccgcagaagcaagggatgacttggttcttggaagtaatgtcgtcttgtgacattggcctgggacaatcattgtgggtaggtagttattgatcgtttactagataacccattggttctttgcctcatcctctcatccatgggtcagagttgaattcttatgtctatagacttccaatcagaagtctcactggtggggctgggggtgggggccaggcaggaggcatggatgggaacctgagtaggtagtgtggccaagagatcagcacaacctttgcaggctgacttgctaagtctgacagtgacaaacttgtgagcttactgcagtcagtcacagaggctgttctttttcacacaccccttcatgcccggctttccccatatccacatgcagagggcgagctcataaaactacagggaagcgtgaaatgatggctttggtagctgtttactgggtaaccccactgtgacactgtccttttcatgtgatgtggaaacctacttctgtcctccaaaccatgaaatgtgtcatctagactgcagagtacttgagtgctttgcctcccgatatgccagagcttgtggtccaaagcccattcctgtgtgtccgtcctgccatttagccacagaaggctgcggagtgaggcggcagctagcctggccagtggctgtcccgtggaccgacacctgcgcccccttctgcaagcaggattttctggtgccaacactcattcatcattcccgatcaactaggatgaatttaagactgtgctaccatgtgttctcaagtggtagtttaaaaagtggatttttaaagtgcctttcaattgtctgtgaacgtctaaaggactgatttgtctcattttgactgttgagtctttaatgggtgccatttaaaaaacaaaatgctattttttaattgtcttttttttttaactatcagtgtatctttaaaagtcacccttacggtgattaaattgcactaacattcccaacttattctcatttgtgaaatacatcaatatcagtgtcctgtaagaatcatcctgtgacctagctcgactggctgccgtgtgctgtggctcaaggtctgtgtccatgtaactagcagaggggtgtgtgtgtgaatgctttcagcctccagaaaggtctagctcacacctcactcaaacctatttttgtggttcatggtctcagtaatacattgaaggttcccagagttcaagcgtagtggtcacacgtaacttgagaccgtttcttctcttcataagtgaatcttactaggaattgggagagtggaagaccgattattggtcagggagccaagcctactttacctgaggagaacctgagtaatgccccattgtgaaggagggtgtggatatggagggagtgatgggacatattttttccccct

SEQ ID NO: 388485 - DNA, 2797 bp, Homo sapiens
  misc_feature (174)..(174): n is a, c, g, or t
  misc_feature (183)..(183): n is a, c, g, or t
  misc_feature (186)..(186): n is a, c, g, or t
  misc_feature (208)..(208): n is a, c, g, or t
gccccctgccaccacgcctcctccgtctcccgcgtccggcccgtcccaactcggcccttccgggacacccgggggaaccctccgggctccagggacctctgagtgatcgcccgccccgccctattcgcagccgccgggcctggtcacgcgcagagccgcgccgcgggatcgggnccagcgccnggnggaggcgggacggggacggggncggagggttgaaatcgcgcggccgggccggggcgcgccgagccgaacccagccacgcggcgccagcgaggcggccggacccgcagccccgatgctgctgacgctggccgggggcgcgctcttcttcccggggctcttcgcgctctgcacctgggcgctgcgccgctcccagcccggatggagccgcaccgactgcgtgatgatcagcaccaggctggtttcctcggtgcacgccgtgctggccaccggctcggggatcgtcatcattcgctcctgcgacgacgtgatcaccggcaggcactggcttgcccgggaatatgtgtggtttctgattccatacatgatctatgactcgtacgccatgtacctctgtgaatggtgccgaaccagagaccagaaccgtgcgccctccctcactcttcgaaacttcctaagtcgaaaccgcctcatgatcacacatcatgcggtcattctctttgtccttgtgccagtcgcacagctaaagcagcagcacacccttctgtacaaggtgaatggaatcctcacgctggccaccttcctttcctgccggatccttctcttccccttcatgtactggtcctatggccgccagcagggactaagcctgctccaagtacccttcagcatcccattctactgcaacgtggccaatgccttcctcgtagctcctcagatctactggttctgtctgctgtgcaggaaggcagtccggctctttgacactccccaagccaaaaaggatggctaaatgctcctgggagtcaggcgcagcctcacaccagctgcctcctccactcagcattccatggaccaaattgtgccctgggtagcctcagactttgggtattgataagccgatggatttgagtttttctaaagaatattcatattacctccttcttctaacttgccctatttgcaaaagcacttttgtagtaacaactattgggtcctgtcagacctccacggacagcaaagtggttttaatgcaagcccaaggatccttcttaaggtcttatctcaagagctctgggaggtggaagcatggggtgggatcggtggaccagggtggtaagtgtctgcacatctgcctgtccctgtatcagcggctacccaccttccaaaccactcaggacagtacccgtggcactgggcccgcagaagcaagggatgacttggttcttggaagtaatgtcgtcttgtgacattggcctgggacaatcattgtgggtaggtagttattgatcgtttactagataacccattggttctttgcctcatcctctcatccatgggtcagagttgaattcttatgtctatagacttccaatcagaagtctcactggtggggctgggggtgggggccaggcaggaggcatggatgggaacctgagtaggtagtgtggccaagagatcagcacaacctttgcaggctgacttgctaagtctgacagtgacaaacttgtgagcttactgcagtcagtcacagaggctgttctttttcacacaccccttcatgcccggctttccccatatccacatgcagagggcgagctcataaaactacagggaagcgtgaaatgatggctttggtagctgtttactgggtaaccccactgtgacactgtccttttcatgtgatgtggaaacctacttctgtcctccaaaccatgaaatgtgtcatctagactgcagagtacttgagtgctttgcctcccgatatgccagagcttgtggtccaaagcccattcctgtgtgtccgtcctgccatttagccacagaaggctgcggagtgaggcggcagctagcctggccagtggctgtcccgtggaccgacacctgcgcccccttctgcaagcaggattttctggtgccaacactcattcatcattcccgatcaactaggatgaatttaagactgtgctaccatgtgttctcaagtggtagtttaaaaagtggatttttaaagtgcctttcaattgtctgtgaacgtctaaaggactgatttgtctcattttgactgttgagtctttaatgggtgccatttaaaaaacaaaatgctattttttaattgtcttttttttttaactatcagtgtatctttaaaagtcacccttacggtgattaaattgcactaacattcccaacttattctcatttgtgaaatacatcaatatcagtgtcctgtaagaatcatcctgtgacctagctcgactggctgccgtgtgctgtggctcaaggtctgtgtccatgtaactagcagaggggtgtgtgtgtgaatgctttcagcctccagaaaggtctagctcacacctcactcaaacctatttttgtggttcatggtctcagtaatacattgaaggttcccagagttcaagcgtagtggtcacacgtaacttgagaccgtttcttctcttcataagtgaatcttactaggaattgggagagtggaagaccgattattggtcagggagccaagcctactttacctgaggagaacctgagtaatgccccattgtgaaggagggtgtggatatggagggagtgatgggacatattttttccccct

SEQ ID NO: 388486 - DNA, 1864 bp, Homo sapiens
  misc_feature (174)..(174): n is a, c, g, or t
  misc_feature (183)..(183): n is a, c, g, or t
  misc_feature (186)..(186): n is a, c, g, or t
  misc_feature (208)..(208): n is a, c, g, or t
gccccctgccaccacgcctcctccgtctcccgcgtccggcccgtcccaactcggcccttccgggacacccgggggaaccctccgggctccagggacctctgagtgatcgcccgccccgccctattcgcagccgccgggcctggtcacgcgcagagccgcgccgcgggatcgggnccagcgccnggnggaggcgggacggggacggggncggagggttgaaatcgcgcggccgggccggggcgcgccgagccgaacccagccacgcggcgccagcgaggcggccggacccgcagccccgatgctgctgacgctggccgggggcgcgctcttcttcccggggctcttcgcgctctgcacctgggcgctgcgccgctcccagcccggatggagccgcaccgactgcgtgatgatcagcaccaggctggtttcctcggtgcacgccgtgctggccaccggctcggggatcgtcatcattcgctcctgcgacgacgtgatcaccggcaggcactggcttgcccgggaatatgtgtggtttctgattccatacatgatctatgactcgtacgccatgtacctctgtgaatggtgccgaaccagagaccagaaccgtgcgccctccctcactcttcgaaacttcctaagtcgaaaccgcctcatgatcacacatcatgcggtcattctctttgtccttgtgccagtcgcacagaggctccggggagaccttggggacttctttgtcggctgcatcttcacggcagaactgagcactccgtttgtgtcgctgggcagggttctgattcagctaaagcagcagcacacccttctgtacaaggtgaatggaatcctcacgctggccaccttcctttcctgccggatccttctcttccccttcatgtactggtcctatggccgccagcagggactaagcctgctccaagtacccttcagcatcccattctactgcaacgtggccaatgccttcctcgtagctcctcagatctactggttctgtctgctgtgcaggaaggcagtccggctctttgacactccccaagccaaaaaggatggctaaatgctcctgggagtcaggcgcagcctcacaccagctgcctcctccactcagcattccatggaccaaattgtgccctgggtagcctcagactttgggtattgataagccgatggatttgagtttttctaaagaatattcatattacctccttcttctaacttgccctatttgcaaaagcacttttgtagtaacaactattgggtcctgtcagacctccacggacagcaaagtggttttaatgcaagcccaaggatccttcttaaggtcttatctcaagagctctgggaggtggaagcatggggtgggatcggtggaccagggtggtaagtgtctgcacatctgcctgtccctgtatcagcggctacccaccttccaaaccactcaggacagtacccgtggcactgggcccgcagaagcaagggatgacttggttcttggaagtaatgtcgtcttgtgacattggcctgggacaatcattgtggccacagaaggctgcggagtgaggcggcagctagcctggccagtggctgtcccgtggaccgacacctgcgcccccttctgcaagcaggattttctggtgccaacactcattcatcattcccgatcaactaggatgaatttaagactgtgctaccatgtgttctcaagtggtagtttaaaaagtggatttttaaagtgcctttcaattgtctgtgaacgtctaaaggactgatttgtctcattttgactgttgagtctttaatgggtgccatttaaaaaacaaaatgccagtaacgggatcctctagaccac

SEQ ID NO: 388487 - DNA, 285 bp, Homo sapiens
aatttcatccacagacttccacctctggcaattactaactggtaccagatctaccctcctctgccactgtaaacaatcagaaaactgagcaaaatattggaggcaaccattttcaggcaagggacaacaggcagtgcagaaccagagcacctgccggcagggaagcagctggtaaatatgtggatacatacaaaacagcagcttttcttttgtcctcttaatttccttaagatgcaagtggctatttaaaataataatattgcaaggtgaggtttacatacacac

SEQ ID NO: 388488 - DNA, 565 bp, Homo sapiens
  misc_feature (1)..(1): n is a, c, g, or t
  misc_feature (30)..(30): n is a, c, g, or t
  misc_feature (84)..(84): n is a, c, g, or t
  misc_feature (169)..(169): n is a, c, g, or t
  misc_feature (288)..(288): n is a, c, g, or t
  misc_feature (311)..(311): n is a, c, g, or t
  misc_feature (394)..(394): n is a, c, g, or t
nggttataccctgccagattatatggttanaccctgccaggttatatagttataccctgccaggttataaggctcaagcacttnaaaattgctaaatgagcacctatggtggatctttcccattcttccctgcagagccatcttctatccttctctaccctgttgcatnacaggaggaggacctgcatggactacatcaaggagctttcttgcgctctggcttccatttgggtttcagccaaattgagggtgggagggggtgcagcagcaggagactgaaaggagatnagaatatttattgccctggctcnccctccctaccagatcttgtgtcctttgaccaaaggctacagttcccatcagatagctctctccacaccaactttcctctctnaattctgataaccattcccctccctttgtcccttcaggcatagaaatggtgatgcctgttggtagccccaaattactttgtttgtttatttatttatttatttatttatttagaaacggtcttgctctgtcacccaggctggagtgcagtggcgtgatcacagtgcactgc

SEQ ID NO: 388489 - DNA, 471 bp, Homo sapiens
atttgagaccttaagcagattgctttaccacaataacctcagagaaaaatgaaaaggaatggagaagtttgtaaactatggaattttacaagtgctgcttggggatcatcaaagttaacctctctgatgtactaatatttccactaatggccgtggattcttctaaacaggttgagaggtttctctgttagccaggactcagtgacatagctatataatttgcatcttctgcttcagaggtgagaagcagcagctgcttcttttttttttttttttttttttaattcttgattcctaaatggccctagtcctcagtccaatggatgttaggcaaattctgctgctggcatatttttgcctttgccccactgaccttttgtccaaagcatcttctgagtttcaaaaaggacagagaactcagagtcctctgagtttccagacatgcttgtgtgactgttttcagccacctgt

SEQ ID NO: 388490 - DNA, 268 bp, Homo sapiens
attacatgttttgaggaagcgaaaggctgccactcaaacttaggtctagagattacagccaaactcagcctcatctacttgtaaggaaatcaagaggaatttggcttaggaaagctatgatttgatttgatttactgttaagtttttttttgtttgttttctgtctcaaaaaacaaaaattgtgtagtaatattttgtcaacataagattataagcacctgtatggttgtaaacatgtagtgggcaaggaatctattctcactttggt

SEQ ID NO: 388491 - DNA, 973 bp, Homo sapiens
agagcagactaatactgtaatgacacataaaagattgatagctataaggtcttaagttctgtttcttacttaaatgaccatgggagctgtatgcatctaataaatgtagtcagtgacactgcagacccagtgatgagtggagggtgcttttgagggtatttttcctctgtttagcagatggcatctggcactaggttacaagatgaaaaacagtctctgagagtgcagaatctggcagggcagacaggtaaaggagaggaatgtagttggatttgtattggaaagatcagtgcagcagcagagccctgaaggcagtaagaccgcaaaggtgcaagcaaccctccaaacaccattgctgacacagcatgacacacacagtccatgaggaacaaggtccttaagtgaccatttaggttttggtgcttatgtagaagtaagaattaacactttatatcatatatgagctactacattattacatgtatagcctcaaaggtagaagaatgatcttgtattctcatttatgcagaaatatacaattgagaatgacttgtcccctgttgaccttccataccactgaaagaccagtgtatttctccctcctctccagcagcacggagctgctaatagctctccattaatgcatgtttgctttatttcttacccacgtgcttttgttcctgctattctttctgcctccccttcctccaccctaagtagcccttttctgggtccccatgctcatgtgcgcatatctccatcattgtacagaatacagtgtagtagagattttatctctgtttattgccttagtttgtgagctctagcggacctctgagtagatgatgaggtcaggattatatcatattcatttttgtcaccctagcaccctgaactgccaggaggtgctaaactaaaggtcattggtttttttccataatgttaaaaaaaaaaaaaacttaaaaaattagta

SEQ ID NO: 388492 - DNA, 401 bp, Homo sapiens
  misc_feature (344)..(344): n is a, c, g, or t
cactggggaaaaggggtttctgcagtcaaggattcagtaagtgtagtttgcagaacagtattcatactctcaactgggtctggaatcctccagtcaagagatcctctaatttaccttctccaggaatataagcctgggactacttttttttgttttttcctcttcaggccccccggtggaatggtatctcctatggccctggattcttaggaaaatcatggcttcccaactggatgggcagcaggacttggggtgaagtaaatggtagactacccagggccgagtgacacagaacaagaacatgaatgtagtttaaacttttttcctactccaggagccatggngattccaatagggaagaggctggaggagtctcagttactagttccttctgtttcccc

SEQ ID NO: 388493 - DNA, 493 bp, Homo sapiens
aaacaagcgggttcagtactcagtgtgttccttatcccttgtagcatttgggataactattaaacactgcaaatataaagtggttttggttttgttttgttttgttttttttaattggtgatcattttaataatacagtccatgcataatgttagaataccaggagggaaggaaaatattaaatagtaaaaggtccaaggcatggtttcacttgcaatttaaggaaattttacctttctcatcaataatagaacagatttcaccaccctgacccattctaatcaccattttaatggccatactctttgctgtattctagtacagagaggtggggagccttttttgtagcaaaggctgtgacacattgtgaaatatcaaaaaggtgtcacgtataaagaccagcttaggctgggcatggtggctcacacctgtaatcacagtgctttggaaggctgaggcaggaggattgcttgaggccaggggtttgagacca

SEQ ID NO: 388494 - DNA, 588 bp, Homo sapiens
gtttttattatttagagatataattgatatactatagaattaatcgttttagagagtacaattgaatggtagatagagcggaaaccttaatatattcacaaggttgtgcaaccatcactactatctaactccagaacattttaatcacccaccaaagaaactctgtttcctttagcagtgcgctgccatgctcagctattttttgggagagaaggggtctccccatgttgtccacgctggtctcaaactcggttgcttaagcagtcctcccacttgagccgctgtgcccaggcctgagttactatatttataaaagttatttcatatgatagacaaatcattcaaaacataatgaggtaaactgccaaaagaaaccattttaccatatttgaaggcatttaatgtaaatgttgaatttaatttcatgtactggaatcagtctttttgcatatgtaattttcataccaaaaatctctcttcagttgactcctggaactctctcatgataaaataaaagtttcaaataatgtcggggtggtggctaacacctgtaatcccagcactgtgggagtccgaggcaggtggatc

SEQ ID NO: 388495 - DNA, 753 bp, Homo sapiens
  misc_feature (353)..(353): n is a, c, g, or t
  misc_feature (355)..(355): n is a, c, g, or t
aaccagaactagggagctggtggagaaggtggcggccgctggaaggaggcccgggaggtggctgaggggtccaggcggcgggacgactctggccttttgaagaccgggaggaaactctacagagaagaatgtcagatgcagcagaagctccccgagaagcaacaggagaaaatggagaaacagaaatgaaagaagaggaggaacctaatccaaattataaagaagtagaagatccacaacaggaatcaaaacgatgacacaatacgcactggagacgagtctcaggaggaggacgaggaaaacgggcgaggacggaaacgggggaggagcgacggagaacagaggacggacgngngacaggacggaccaaaaacgatctgctacctgcgacagaacaacctgaggacacaagggctgtgacgaaagtcccaaggaagacagggcaggccttcagggcacatacccagggaaggaaaacacagcaaggatagaaggcccgcaagcggaacgatcaacagacagttccccattgaaatcaagatttgggaggaaacaccacggattttaaccctgagttcccccaagtgtcaaatgcgaacagttcagggcacaaatttttcccccgaaagaaaaacccccaaaaagaaaggggtagacacagggtcacacaagcgttattccctgtgtaccgaaatggggaggcgagatggccagaagaaaaccaggcactggaaggcctgttaaaaggaagaa

SEQ ID NO: 388496 - DNA, 279 bp, Homo sapiens
gcatttccttcctccaaggatggcagctgcactgtctgggcacgtgggcgccggctcgtccgtgcagtgtggtggaacgacgcacagccgtcctggtcctgcacggggtggcggcacacaccggagtctcagccgggcacgccggccagggcctccctcctgctgtgtgcaggtctcaggctgagtagggcagtggtgggacaaggccccaccgtccctgccagcagctgccccagcctggccctgcccaggccctcctggttgtggacaagggaaggg

SEQ ID NO: 388497 - DNA, 631 bp, Homo sapiens
caacagaaggatggggaaattagacaggttattattatcaagcttaagcctaggcagctggtttgaaattagcctgggaagtcacacaaaggaaaataagaccctattttctgggttgcttaggactctgcttcagtgatcaaatcttagctgcagagctcataagatgtgctgtatttaggcatggacatagaggcagtgtggtaggataattacctgtttaaataccttcttcctcaaatacagattaatctgggactagggcaaggatgaatctgcaagttcagctgtgggagacctggggctgacagaagaaatagaaatggagccagaggactgaaattccattgtagttctgttgtagttccctgtatcatcactatcaccacatccactgttagcaatttggttaagaaaaaaacagtatcttgagtgtacattgagcttttgattcaagatgctcaaaacctttttttttttttttgagacaaagcctcactatgtcacccaggctggagtgcagtggtgcgatctcagctcactgcaacctccgcctcccgggttcaagctaagtttccagccttagcccctggggaagctgggactacaggtgctggcccccacgcctggt

SEQ ID NO: 388498 - DNA, 3201 bp, Homo sapiens
agagtcgttgttttttctgattcttcttgctcctcatcctatttcctttgtcttaatttccccacaaagacaccctctccagagcccagcaattgtgagggactgatggagaagtatgtggctgctatggtgctgagtgcagctggagatgccctggggtactacaatgggaagtgggagttcctccaggatggggagaagatacaccggcagttggcccagctgggcggcttggatgccctagacgtgggaaggtggagagttagtgacgacacagtgatgcacttggccacagcagaagctcttgtggaagctgggaaagcccctaagttgactcaactgtattacctccttgctaagcattaccaagactgcatggaagacatggatgggcgggcaccaggtggtgcctcggtgcacaacgccatgcagctgaagccgggcaagcccaatggctggaggattcccttcaacagccatgagggcggctgtggggctgccatgcgggccatgtgcatcggtctcaggttcccacaccatagccaactggacacactgatccaagtgagcatcgagagtggtcggatgacccaccaccacccaacaggctacctgggggcccttgcgtctgctctttttacagcctatgctgtgaatagcagaccacccttgcagtggggaaaaggactgatggagctgctaccagaagctaaaaagtacattgtccaatcaggctactttgtagaggaaaatcttcaacactggtcctacttccaaaccaaatgggaaaattacctaaaacttagagggattttggatggagaatcagcccctaccttccctgagtctttcggtgtgaaggagagggatcagttctacacctccctgagctactctggctggggtggcagcagtgggcacgatgcccccatgattgcctacgatgctgttcttgctgcaggagactcctggaaggagcttgcccaccgagcctttttccatggtggagacagtgattctacagctgccattgctggctgctggtggggagttatgtatggttttaaaggagtgagtccctccaactatgagaaactagaatacagaaaccggctggaagagacagctagggctttatattctctcgggtcaaaagaagacactgtaatttccctttagggagacgtgatgttcacttctgatggattcttcttttgtgtatttccttttctgctatttcttttcagtttttccaaagtcaagagtcttaaccttgtactcagggaattttgagataacaagtcccttgggcaccttaagctcagttttttcaggctcatcctgttcttccagaatctatcccttttcttacactgaagagtcctttagctcaattgatagggtcagcgtctcgcaagcaaaaaatctcatgacctcatatttgagtcttcattttcatcatctacttgttctaaaagttttttctgtttgtctcaagttgggttcccacaaagtggactttgagacaaagatctgaatgcaagcagtttatatgggagatgattccaggaaataccgatatgagaatggggaaatgaaaccaggaagggaagagagctagtatggggtatgttaatgagcaggtttccactgtgggcggttggcactctgccatctgagtcctctgcctaaagcattcctcagaactgtcccatttgaagggcaagcaaacctggggtatttatccactgacttccatctgacactggttgaggaccactgccagggatgctaactccctggtaattcttggcttaccctttgtacaaaccaaaccttagtgtcttcaggtaaagactcagagatacttgcaggggcaagctgtaaagggcatgggaacagtgagggacatatgtggggtcctaacaatatctgctaggctggtctacctcctaaatatactctgaatctatcacctctattgccttcttgcactgaggatttttcagctggatttctgcaatccaagctactcaagtctgggagatgctgctctgagctgctctcagtactctcctcatcatggcagttaacacattaccaattttgttattgtctgtttgcttgtttgcattatttctaaacagaacctagcacagtgcttgggcagccaataggcattaatcagtatctattgagtgttatgaactagcctcctagctcgtgcttccctcattaccctccagagttatgtttacgaataacaaattgaccatgctaaactaatcatgttccaatgaatacatcacctttcttcatttcttgatgctcttcccaatccttgtctacctgataataaattcttacttgtccttcaagacccaactcagatagatagagcttcctgagtgaaacctgctttgattgttcaggcacttggccaccttctcctcactcctcccacagccttctgtcttggccttgtcatcacatcaatcctgttgtgtggtgctgtgtgtcttctgggtcagtcctaggcacatgctgcccagcacatgtccacctgggaaatgagatgccatcgtcacattcatttggtcaccctcagtccagccagtgggcttgctctcatttggcctgttctcaggggtgggaaggaagagcgtcccttccttctccttttgagcagctggaaggggtgggtaaatgaggtctgatgatagcagtcctgccaccttctagttcatcccataggaatgtttttccaagtccttccagtctttttagaacgtggtggaggagggttgtgtgtgccccagggggtcgggggtaggggatgcagggaggatcttagcatttgttgttttctagtgcagggctttagccacaattgtaaacaacaggaaaaggctctttagagatcctattagatttgctttgccgattgtcactcttcatcacaggcacatttcaaaaagaggttagactttcagacttcttttttctcaaacctcaaaacttccaccccaaacttcgctctcagctggtgactttgcttctttatgtgtgtgtatgtgtgtcagagaaagagagagagagagagagaagggaggatgagaacgaatggggggaagagataaactttatgcataacattagggtaaatcaataaagatggtctgacacatcgtaaaaaaaaac

SEQ ID NO: 388499 - DNA, 2384 bp, Homo sapiens
agagtcgttgttttttctgattcttcttgctcctcatcctatttcctttgtcttaatttccccacaaagacaccctctccagagcccagcaattgtgagggactgatggagaagtatgtggctgctatggtgctgagtgcagctggagatgccctggggtactacaatgggaagtgggagttcctccaggatggggagaagatacaccggcagttggcccagctgggcggcttggatgccctagacgtgggaaggtggagagttagtgacgacacagtgatgcacttggccacagcagaagctcttgtggaagctgggaaagcccctaagttgactcaactgtattacctccttgctaagcattaccaagactgcatggaagacatggatgggcgggcaccaggtggtgcctcggtgcacaacgccatgcagctgaagccgggcaagcccaatggctggaggattcccttcaacagccatgagggcggctgtggggctgccatgcgggccatgtgcatcggtctcaggttcccacaccatagccaactggacacactgatccaagtgagcatcgagagtggtcggatgacccaccaccacccaacaggctacctgggggcccttgcgtctgctctttttacagcctatgctgtgaatagcagaccacccttgcagtggggaaaaggactgatggagctgctaccagaagctaaaaagtacattgtccaatcaggctactttgtagaggaaaatcttcaacactggtcctacttccaaaccaaatgggaaaattacctaaaacttagagggattttggatggagaatcagcccctaccttccctgagtctttcggtgtgaaggagagggatcagttctacacctccctgagctactctggctggggtggcagcagtgggcacgatgcccccatgattgcctacgatgctgttcttgctgcaggagactcctggaaggagcttgcccaccgagcctttttccatggtggagacagtgattctacagctgccattgctggctgctggtggggagttatgtatggttttaaaggagtgagtccctccaactatgagaaactagaatacagaaaccggctggaagagacagctagggctttatattctctcgggtcaaaagaagacactgtaatttccctttagggagacgtgatgttcacttctgatggattcttcttttgtgtatttccttttctgctatttcttttcagtttttccaaagtcaagagtcttaaccttgtactcagggaattttgagataacaagtcccttgggcaccttaagctcagttttttcaggctcatcctgttcttccagaatctatcccttttcttacactgaagagtcctttagctcaattgatagggtcagcgtctcgcaagcaaaaaatctcatgacctcatatttgagtcttcattttcatcatctacttgttctaaaagttttttctgtttgtctcaagttgggttcccacaaagtggactttgagacaaagatctgaatgcaagcagtttatatgggagatgattccaggaaataccgatatgagaatggggaaatgaaaccaggaagggaagagagctagtatggggtatgttaatgagcaggtttccactgtgggcggttggcactctgccatctgagtcctctgcctaaagcattcctcagaactgtcccatttgaagggcaagcaaacctggggtatttatccactgacttccatctgacactggttgaggaccactgccagggatgctaactccctggtaattcttggcttaccctttgtacaaaccaaaccttagtgtcttcaggtaaagactcagagatacttgcaggggcaagctgtaaagggcatgggaacagtgagggacatatgtggggtcctaacaatatctgctaggctggtctacctcctaaatatactctgaatctatcacctctattgccttcttgcactgaggatttttcagctggatttctgcaatccaagctactcaagtctgggagatgctgctctgagctgctctcagtactctcctcatcatggcagttaacacattaccaattttgttattgtctgtttgcttgtttgcattatttctaaacagaacctagcacagtgcttgggcagccaataggcattaatcagtatctattgagtgttatgaactagcctcctagctcgtgcttccctcattaccctccagagttatgtttacgaataacaaattgaccatgctaaactaatcatgttccaatgaatacatcacctttcttcatttcttgatgctcttcccaatccttgtctacctgataataaattcttacttgtccttcaagaccca

SEQ ID NO: 388500 - DNA, 1003 bp, Homo sapiens
cctcgcatacggacgacgtgcatgctaaactaatcatgttccaatgaatacatcacctttcttcatttcttgatgctcttcccaatccttgtctacctgataataaattcttacttgtccttcaagacccaactcagatagatagagcttcctgagtgaaacctgctttgattgttcaggcacttggccaccttctcctcactcctcccacagccttctgtcttggccttgtcatcacatcaatcctgttgtgtggtgctgtgtgtcttctgggtcagtcctaggcacatgctgcccagcacatgtccacctgggaaatgagatgccatcgtcacattcatttggtcaccctcagtccagccagtgggcttgctctcatttggcctgttctcaggggtgggaaggaagagcgtcccttccttctccttttgagaaaaccacagaactatgactctcatgatttttcctttgtgaaatccctgggttttcagctggaaggggtgggtaaatgaggtctgatgatagcagtcctgccaccttctagttcatcccataggaatgtttttccaagtccttccagtctttttagaacgtggtggaggagggttgtgtgtgccccagggggtcgggggtaggggatgcagggaggatcttagcatttgttgttttctagtgcagggctttagccacaattgtaaacaacaggaaaaggctctttagagatcctattagatttgctttgccgattgtcactcttcatcacaggcacatttcaaaaagaggttagactttcagacttcttttttctcaaacctcaaaacttccaccccaaacttcgctctcagctggtgactttgcttctttatgtgtgtgtatgtgtgtcagagaaagagagagagagagagagaagggaggatgagaacgaatggggggaagagataaactttatgcataacattagggtaaatcaataaagatggtctgacacatcgtaaaaaaaaac

SEQ ID NO: 388501 - DNA, 3256 bp, Homo sapiens
agagtcgttgttttttctgattcttcttgctcctcatcctatttcctttgtcttaatttccccacaaagacaccctctccagagcccagcaattgtgagggactgatggagaagtatgtggctgctatggtgctgagtgcagctggagatgccctggggtactacaatgggaagtgggagttcctccaggatggggagaagatacaccggcagttggcccagctgggcggcttggatgccctagacgtgggaaggtggagagttagtgacgacacagtgatgcacttggccacagcagaagctcttgtggaagctgggaaagcccctaagttgactcaactgtattacctccttgctaagcattaccaagactgcatggaagacatggatgggcgggcaccaggtggtgcctcggtgcacaacgccatgcagctgaagccgggcaagcccaatggctggaggattcccttcaacagccatgagggcggctgtggggctgccatgcgggccatgtgcatcggtctcaggttcccacaccatagccaactggacacactgatccaagtgagcatcgagagtggtcggatgacccaccaccacccaacaggctacctgggggcccttgcgtctgctctttttacagcctatgctgtgaatagcagaccacccttgcagtggggaaaaggactgatggagctgctaccagaagctaaaaagtacattgtccaatcaggctactttgtagaggaaaatcttcaacactggtcctacttccaaaccaaatgggaaaattacctaaaacttagagggattttggatggagaatcagcccctaccttccctgagtctttcggtgtgaaggagagggatcagttctacacctccctgagctactctggctggggtggcagcagtgggcacgatgcccccatgattgcctacgatgctgttcttgctgcaggagactcctggaaggagcttgcccaccgagcctttttccatggtggagacagtgattctacagctgccattgctggctgctggtggggagttatgtatggttttaaaggagtgagtccctccaactatgagaaactagaatacagaaaccggctggaagagacagctagggctttatattctctcgggtcaaaagaagacactgtaatttccctttagggagacgtgatgttcacttctgatggattcttcttttgtgtatttccttttctgctatttcttttcagtttttccaaagtcaagagtcttaaccttgtactcagggaattttgagataacaagtcccttgggcaccttaagctcagttttttcaggctcatcctgttcttccagaatctatcccttttcttacactgaagagtcctttagctcaattgatagggtcagcgtctcgcaagcaaaaaatctcatgacctcatatttgagtcttcattttcatcatctacttgttctaaaagttttttctgtttgtctcaagttgggttcccacaaagtggactttgagacaaagatctgaatgcaagcagtttatatgggagatgattccaggaaataccgatatgagaatggggaaatgaaaccaggaagggaagagagctagtatggggtatgttaatgagcaggtttccactgtgggcggttggcactctgccatctgagtcctctgcctaaagcattcctcagaactgtcccatttgaagggcaagcaaacctggggtatttatccactgacttccatctgacactggttgaggaccactgccagggatgctaactccctggtaattcttggcttaccctttgtacaaaccaaaccttagtgtcttcaggtaaagactcagagatacttgcaggggcaagctgtaaagggcatgggaacagtgagggacatatgtggggtcctaacaatatctgctaggctggtctacctcctaaatatactctgaatctatcacctctattgccttcttgcactgaggatttttcagctggatttctgcaatccaagctactcaagtctgggagatgctgctctgagctgctctcagtactctcctcatcatggcagttaacacattaccaattttgttattgtctgtttgcttgtttgcattatttctaaacagaacctagcacagtgcttgggcagccaataggcattaatcagtatctattgagtgttatgaactagcctcctagctcgtgcttccctcattaccctccagagttatgtttacgaataacaaattgaccatgctaaactaatcatgttccaatgaatacatcacctttcttcatttcttgatgctcttcccaatccttgtctacctgataataaattcttacttgtccttcaagacccaactcagatagatagagcttcctgagtgaaacctgctttgattgttcaggcacttggccaccttctcctcactcctcccacagccttctgtcttggccttgtcatcacatcaatcctgttgtgtggtgctgtgtgtcttctgggtcagtcctaggcacatgctgcccagcacatgtccacctgggaaatgagatgccatcgtcacattcatttggtcaccctcagtccagccagtgggcttgctctcatttggcctgttctcaggggtgggaaggaagagcgtcccttccttctccttttgagaaaaccacagaactatgactctcatgatttttcctttgtgaaatccctgggttttcagctggaaggggtgggtaaatgaggtctgatgatagcagtcctgccaccttctagttcatcccataggaatgtttttccaagtccttccagtctttttagaacgtggtggaggagggttgtgtgtgccccagggggtcgggggtaggggatgcagggaggatcttagcatttgttgttttctagtgcagggctttagccacaattgtaaacaacaggaaaaggctctttagagatcctattagatttgctttgccgattgtcactcttcatcacaggcacatttcaaaaagaggttagactttcagacttcttttttctcaaacctcaaaacttccaccccaaacttcgctctcagctggtgactttgcttctttatgtgtgtgtatgtgtgtcagagaaagagagagagagagagagaagggaggatgagaacgaatggggggaagagataaactttatgcataacattagggtaaatcaataaagatggtctgacacatcgtaaaaaaaaac

SEQ ID NO: 388502 - DNA, 3912 bp, Homo sapiens
tcgtttttctttgcttttatttacgatcaggatacaagaattctacgctgctgccaaataaatgactagttaaaattaactaactgaatccttaacaaccattctaagaggcagatattattatcccactttatgcgtgagggcccagaaccctggcaagggcggcacactcagtacgctcttcaagcatctgggcacacccggtccactacagtcctacaaagtcggacgtgagcacgggcgaaggcgtcagccggggccacacgggagtcactgaccacagccaggcgagagccggctttccggtgccgccacattccgggcaccaggctccgggctcttcagagcatttggggcgggcgacggaggtcccgtccactctcgcttgggtgcagaagggcgcggcggtgccaggaagccgccttggaggctccaagattagctcactcagcgcggccaagcgcaggtgcgggggccctcgccgccaccctgcttatctggggacagtcccggaacccggtgacccggctccgccccaacccgcgccctcgtccacccgcagcagccaaggcctcttccccggccccgggagcccgcgccacgcccgtcgctcgcgcgttccagtccaggctacagcaggggctctccagcctgcattccatggccaacagcagtgcagctgcagaagcacttctggaagcctcctgacttgaactagaccttggacaccctctccagagcccagcaattgtgagggactgatggagaagtatgtggctgctatggtgctgagtgcagctggagatgccctggggtactacaatgggaagtgggagttcctccaggatggggagaagatacaccggcagttggcccagctgggcggcttggatgccctagacgtgggaaggtggagagttagtgacgacacagtgatgcacttggccacagcagaagctcttgtggaagctgggaaagcccctaagttgactcaactgtattacctccttgctaagcattaccaagactgcatggaagacatggatgggcgggcaccaggtggtgcctcggtgcacaacgccatgcagctgaagccgggcaagcccaatggctggaggattcccttcaacagccatgagggcggctgtggggctgccatgcgggccatgtgcatcggtctcaggttcccacaccatagccaactggacacactgatccaagtgagcatcgagagtggtcggatgacccaccaccacccaacaggctacctgggggcccttgcgtctgctctttttacagcctatgctgtgaatagcagaccacccttgcagtggggaaaaggactgatggagctgctaccagaagctaaaaagtacattgtccaatcaggctactttgtagaggaaaatcttcaacactggtcctacttccaaaccaaatgggaaaattacctaaaacttagagggattttggatggagaatcagcccctaccttccctgagtctttcggtgtgaaggagagggatcagttctacacctccctgagctactctggctggggtggcagcagtgggcacgatgcccccatgattgcctacgatgctgttcttgctgcaggagactcctggaaggagcttgcccaccgagcctttttccatggtggagacagtgattctacagctgccattgctggctgctggtggggagttatgtatggttttaaaggagtgagtccctccaactatgagaaactagaatacagaaaccggctggaagagacagctagggctttatattctctcgggtcaaaagaagacactgtaatttccctttagggagacgtgatgttcacttctgatggattcttcttttgtgtatttccttttctgctatttcttttcagtttttccaaagtcaagagtcttaaccttgtactcagggaattttgagataacaagtcccttgggcaccttaagctcagttttttcaggctcatcctgttcttccagaatctatcccttttcttacactgaagagtcctttagctcaattgatagggtcagcgtctcgcaagcaaaaaatctcatgacctcatatttgagtcttcattttcatcatctacttgttctaaaagttttttctgtttgtctcaagttgggttcccacaaagtggactttgagacaaagatctgaatgcaagcagtttatatgggagatgattccaggaaataccgatatgagaatggggaaatgaaaccaggaagggaagagagctagtatggggtatgttaatgagcaggtttccactgtgggcggttggcactctgccatctgagtcctctgcctaaagcattcctcagaactgtcccatttgaagggcaagcaaacctggggtatttatccactgacttccatctgacactggttgaggaccactgccagggatgctaactccctggtaattcttggcttaccctttgtacaaaccaaaccttagtgtcttcaggtaaagactcagagatacttgcaggggcaagctgtaaagggcatgggaacagtgagggacatatgtggggtcctaacaatatctgctaggctggtctacctcctaaatatactctgaatctatcacctctattgccttcttgcactgaggatttttcagctggatttctgcaatccaagctactcaagtctgggagatgctgctctgagctgctctcagtactctcctcatcatggcagttaacacattaccaattttgttattgtctgtttgcttgtttgcattatttctaaacagaacctagcacagtgcttgggcagccaataggcattaatcagtatctattgagtgttatgaactagcctcctagctcgtgcttccctcattaccctccagagttatgtttacgaataacaaattgaccatgctaaactaatcatgttccaatgaatacatcacctttcttcatttcttgatgctcttcccaatccttgtctacctgataataaattcttacttgtccttcaagacccaactcagatagatagagcttcctgagtgaaacctgctttgattgttcaggcacttggccaccttctcctcactcctcccacagccttctgtcttggccttgtcatcacatcaatcctgttgtgtggtgctgtgtgtcttctgggtcagtcctaggcacatgctgcccagcacatgtccacctgggaaatgagatgccatcgtcacattcatttggtcaccctcagtccagccagtgggcttgctctcatttggcctgttctcaggggtgggaaggaagagcgtcccttccttctccttttgagaaaaccacagaactatgactctcatgatttttcctttgtgaaatccctgggttttcagctggaaggggtgggtaaatgaggtctgatgatagcagtcctgccaccttctagttcatcccataggaatgtttttccaagtccttccagtctttttagaacgtggtggaggagggttgtgtgtgccccagggggtcgggggtaggggatgcagggaggatcttagcatttgttgttttctagtgcagggctttagccacaattgtaaacaacaggaaaaggctctttagagatcctattagatttgctttgccgattgtcactcttcatcacaggcacatttcaaaaagaggttagactttcagacttcttttttctcaaacctcaaaacttccaccccaaacttcgctctcagctggtgactttgcttctttatgtgtgtgtatgtgtgtcagagaaagagagagagagagagagaagggaggatgagaacgaatggggggaagagataaactttatgcataacattagggtaaatcaataaagatggtctgacacatcgtaaaaaaaaac

SEQ ID NO: 388503 - DNA, 290 bp, Homo sapiens
gctcaggcaatctggacaacttaagagtggtttcatatggctaggcactgtggtcaacacctgaaatctcagcactttgggaggtcaagtcaggaggatcacttcagcctaggagtttgagaccagtttgggcaatagtgcaagacctaacctccacaaaaaatacgaaaattagccaaccatggtggcaccacctgtagtctagctactcaggaggctgaggcaggaggattgcttgagcccaggagtttgagaccagcctggacaacacaacaaaaccccatcgctac

SEQ ID NO: 388504 - DNA, 571 bp, Homo sapiens
ggtgcctggcacctgggaggtgctcagtaaatatttgttcatgcataaatgaatctgagacccactggcctctgggaagagcataggagagggggacaacagcatgaggaccatatgtttgccatcttgctgaaggaatttcagccaacataataagacatgaaaatggcattcgaggtgtattagacagacaaggggatgttagtgtttgcaggagacttggtctgcctcagtgatgtcagtcagcagtgattgtgattccccaggggacactcggcagcatctggagacattttagtttaaacttccccagtgatctgtgatgtacaggagacactttcggttgtcacactgggggaggaggctgcatgtcactggcatctgttgggtgacacctacaatgcacaggacaaccacaacaaataattcaggcccaaatgttgctggtgctgagggtgaggtcctagtgttagtaacaggaggaaaacccagcagtctggaggagagacctcttcccagggcagcccaggggccatcaggagggttcatctcatgcattagaggtcttggg

SEQ ID NO: 388505 - DNA, 349 bp, Homo sapiens
agagctgattatcttactgatgtgctagaatcttttagttatacagtaagtttttattgacctctatagtgtgaaagacatcaagaaaatgttgaattaccaatagggtgttctaattttaaaacaatgtattctgttcttaaatttttttccagaaaaattggaaaaataaagtttcagtgcttccataaggttaagttttaggcctataaggattcacttaagtggggtattttattcctccatgattacagatgaaggaggcatttctaatagtataatctccacctttatttggattctactttgatgagtcttgccaaaaatgtccctaaaattcatgttgtaa

SEQ ID NO: 388506 - DNA, 86 bp, Homo sapiens
ttcctaggacccctgcctcaggtgactgtcaaaccatggaagtgccttcttctcctgccaaacctactttgaccaccctttggtag

SEQ ID NO: 388507 - DNA, 148 bp, Homo sapiens
caattggcctatctttaaattcactgattcctctttcatcttctcaaatctgatactgattttttttctttttgagatgaagtcttgctctgctgcccaggctggagtgcagtggtaccatctcagctcactgcaacatccacttccc

SEQ ID NO: 388508 - DNA, 423 bp, Homo sapiens
acacactggacatatggaatatggtcacaaagagtggacggctctgtcttttctacttccagtctttctttggcgtcctttcagctctcaaggggtaggtcaaagcaaaactcttctgtaggatgaagtgaacgtcaccaactaacccaaacaaatagtgtggagatgagcaggtgcttcatcagcacatggtcaagacaaatagaggcagaaaagaacctcgactaagtttacctatgcattttttgtcaggttaaaaagagaatatgcaggccaggcctggtggctcacacttgtaatcccagcactttgggaggccaaggcaggcggatcacctgaagttgggagttcgagaccagtctgaccaacatggagaaaccccatctctcctaaaaatacaaaattagccaggtatgatggcac

SEQ ID NO: 388509 - DNA, 418 bp, Homo sapiens
gaatggattgacagtcatgggaatgtaccaggtatcatgggggcaggccctgctctaggttatggagccactgttgggtagtcctacccttctcacatccagatgcagattccgctggcaattccatctagtcctatgagacattccctggaaatgatgtgctcatcctcatcagctacgtgatgaatgaatccaggggtgtttgtctgtgaagtgtctgctatctcctgtgcttgatttactgacgtggatgttgttctcgaggtgtgggttgaagccatgaaaataaatgccttcaaggaaggtatgtaagcagactgcagtattggagggtactcacagttggtaagtagggcagggaagaggaatgagaaaaggtaagaaggagagagagaagtgagagaatgagagtgaggta

SEQ ID NO: 388510 - DNA, 386 bp, Homo sapiens
ctccatcctcccacctcccactgccatcatggaaatcatctctcacaaggccaaatagcccatctaatcctctagactttggcctgtagtgggttccataaggactccccttggtctttcacagcataggacaatcaggagcttgttgcaaatattcacttgggtggaagtcaagggaaagcaatgagaatatacatgaagggaacaattctcaagacaactggtgggcaaatggacgcaaacttagcccaagacatgaaagaataacaaatacctccaagattttggtcctggggaaatgaaggttgtgctataaaaagaacgtgaaaagttagatccagtttggatatcttgactttgagatgctgggacattcaaatagactg

SEQ ID NO: 388511 - DNA, 465 bp, Homo sapiens
taaaattagattgtcatcctggttgtccaactctgaatgtactggaaaccattgaagtatacattttaaatgggtgtgctaaatggtatatgaattatttctcaataagtgtgtttttttaaaaaagctattgattatttccatcagtctcattcctcttgacaaaaatctgagttgatggtgagcatgtacttcattcctgactccaaagggtacaatatttacaatatttgaatttgggagtgactttactattacaaccttccccttgaagacctggaagacccagcaacataaggacaaacagtagtctcagccttgtactaagacttcagcaaaaataagagagatgggagggactactattgggaaggaggggcaatatttctaggcaaatattgtggtagaatggataagagcttcggctcattgggcaaataaaccaagttttaaatcctgattcta

SEQ ID NO: 388512 - DNA, 876 bp, Homo sapiens
ttccctcaaaaccctaatatgagcttcgaaagatgcatgatttgaatatgtggagatgggaaattactgagcccgtagagtaaatatcacatgtggggctcagtcttaagtgaggttactggggcacctaccttatggacagaattcaaagcgatgccaaaaagcttattaatcaagttaaataatattttaatgaagtatttaaaaaagcaaactagtaaaaaaagataaaaaacatatcaaactttaaaaagacaagatccgtgacaatccttcaaatatttttagacaggtgtctgaaaacctctcagagcctctaaggcttctaagagcctctctttctgggttgaaatcttgctgtggtgtcaaatgtctcttataggacatggtatttagatctctcactactcttccattaattcattcaacaaattatttgttcattgtgtgtctactaagtgccatccagaatagtaattaaatatttgtcaaattaataaacaagcaaatatctaattacagtgtttttaaaaagacacccacaggggctgtctagtctagtagaaagaagaagcattaacaaagtggtgggtgtcagaagggcttggattggatggtaaaggatccttaaaataggtttgttatttattaagtcaataaataattatttagtatatactaatgcagggcattctacatatatcagttaagcatttcaaaatgctagtaggcaaaatgatttagagactcaaagtgtaaattgtcagtattttcaagagattaatttcatggaggaaggcctccttggtgaattactctaagagacaatgtttactggatacatgtcattgcattcctctagctgttattcctcta

SEQ ID NO: 388513 - DNA, 516 bp, Homo sapiens
tgggaagtggctccctgggcctcttgctggaaacttgggctgggctcaggccgggcaggaaagtcaccggttctgtcccgcctcagaaggagcctggggaggaggcgggggagctgctggatctggaagaggttatttaggacatgcagattgtctcctagggaggctgggggagagggtgggtgagctggcaccttcctccaccttgctctgtggcgggccaagtcttctgctgaccctgagaggagtctctgggccccatctcccagggaggagggcagcaagcaggctgctgtgattggctggcagggaagccagggtactggggcccccgactgctgtgagtcgaggaacaggattcctcttcctgccaagtagctcagagatgggagtaggaggccagagttgggaatccaggaggcgccacagctctttgtgatgaatctggtagtttttggcaagtctgaaggtggagctagtttccagggccagagagcaagatgtttttggaggggt

SEQ ID NO: 388514 - DNA, 232 bp, Homo sapiens
tgctgggattacaggcatgagctaccgtgttcggctgacagtcgttttttaaaggtcgttttcaattcgggatgcagattgaatagttaattgatagatgaaatgacagaactaggattttgtttaaaacataaaaagacctcaaagtggggagggtcctagtgtgttggaggcacggccaggaggccagtatggctggaacagagtgagcaggctgaagtggggatgggat

SEQ ID NO: 388515 - DNA, 441 bp, Homo sapiens
gccattggctgtcacacggccaaggttctcccatgccttcctagctcatctgacatcttcctctcctactcccagcatgcccctaagtcacctttttttttgtaatcagatctcaggttcctttatcttagttcatagtgattatttcgcagaacatgacaactcgcttaaaagaacagtgattgatttcatggagcacttataaaacataggtactgagtacttttacatatgttatttcatttaacctttatggtaacttgattaaaactttgtaacttttcaggtagctttgtttttgtggtacactgaaggaaagaggactagggaagttaaaaacctttcccatgatcacatggcagaaactgggagagtgagaactggaatccaagtctacctgattcaaaacttgttcttagtctgaactttaccataataata

SEQ ID NO: 388516 - DNA, 858 bp, Homo sapiens
ggggacagaagtcgctactggaaacaccttgggacaatgactgcacacacaagcccctccccccatggacatacgcaccctacacctcctctccccagacatacacacatccccgcttacaagctgaggtgggagggcagaagaaagaagcaaaaagccagcatcacccaggatctttcctttagtctgaaacttaggggttccctagccacaccccatggtccacaagggtccccaagtgcagccacagaaaggctcagaaggacctatcgggcgcatgtgtgcagggacacagaccccagcagcccacgccccctcctcttctgctcatcacctctggaacccccttccattcaattagtccggccccagccttctcctctgccctgccagttccagcacaccaactagagacactgcctgctgcgccctccacccacaccatgcacccaggggccacagaagaggaggtgcaggctggtgaagcctcctggttccaaaggggctctagggaggggtggcgcccgagcggcgcgggaggtggggatcacagacactgatgcaggcgggaggcggccgagcggcgcgggggctggctctgcagggaccccgtgtccccgggcgcgggcggctgcgaggcagcggacgacggggcccgcgccttggtggactccaggctgctgagtccggagtccttgttgtcactgtgcgcccgcgcgcccgcaggctccggggggccccctccgcccagctccttccactcgttgaagttgaggtcagtcagcgggctctgcaccaccacggtgtggcggcgccagctgctccggcgccgccgggtctcgggcgacagcggccgcc

SEQ ID NO: 388517 - DNA, 638 bp, Homo sapiens
ggggacagaagtcgctactggaaacaccttgggacaatgactgcacacacaagcccctccccccatggacatacgcaccctacacctcctctccccagacatacacacatccccgcttacaagctgaggtgggagggcagaagaaagaagcaaaaagccagcatcacccaggatctttcctttagtctgaaacttaggggttccctagccacaccccatggtccacaagggtccccaagtgcagccacagaaaggctcagaaggacctatcgggcgcatgtgtgcagggacacagaccccagcagcccacgccccctcctcttctgctcatcacctctggaacccccttccattcaattagtccggccccagccttctcctctgccctgccagttccagcacaccaactagagacactgcctgctgcgccctccacccacaccatgcacccaggggccacagaagaggaggtgcaggctggtgaagcctcctggttccaaaggggctctagggaggggtggcgcccgagcggcgcgggaggtggggatcacagacactgatgcagctgagagcgccggagcgcctcgtccgattaacccggcctctacctagcctagtttcttttttctttttttttt

SEQ ID NO: 388518 - DNA, 392 bp, Homo sapiens
atagagaagccaatgaaaaggtgcttaaagaagtatttgcaaaacatggtccccttttggaagttcttttgataaaaggtcgaaccagtaagtccagagattttgtggtcattatttttgagaatgctgcagatgctaagaatgctgccagagatatgaatggaaagtctttggatggaaaagaaataaaagtagaacaagcaaagaaaccatcttttccaagtggtggtaggcggagaccaccaccttcttcaagaaacagaagcccttcaggaagtctgagatctgcaagaggaagtagtggaggaacaagaccgtggctgccctcacatgaaggacacttggatgatggtggatacgctcttgatctcaacacgagttcttctagggga

SEQ ID NO: 388519 - DNA, 201 bp, Homo sapiens
cagttttactgtgtgtgcccttcagttctgactggctggagttctccacgatttaaggcactacccctttcctttatgtgtcttagcctttgggtaaagctgctgtagtcattattatctttctttggtggttatttcttcttctttttttttttttttctttttgtaggtcattcaatgaaacctatagttctcattggg

SEQ ID NO: 388520 - DNA, 383 bp, Homo sapiens
cctgagcctgggaggggacgcctggtgagatttcagagttagctctgcccttcactttctcctcttgcccattctctcgccctgcagaagatacacatcccatgtctgggggcctggactttctggcagccaattcagcctcattgggcctttgctcctggtttattcaactcctcattggtggccctcctgggccaggccaaccacgttactgcaagcagacccggccaaggcagcctcagggaggtggaggaacaattcctcccacatcaatatttattgcctgagagctgctggaagcagatcatcatgttctcagcccttgtttctttttaaagaacctctcacccccttccctccccactccccatccccagtgtgct

SEQ ID NO: 388521 - DNA, 229 bp, Homo sapiens
caagaaagggagaaattattatcagcaaaaaaatttggggggagttagaaaatccaggaaaatcaactaaagttccctcacaataggacaaaagtaccagaaattacctttactagcaaccgtaagaacaatgtcccagacctaaaaatatttaaatgaatggaagaaatgccatattgtggaatattaggattgactcttggaaacattctttttaaataaatttatg

SEQ ID NO: 388522 - DNA, 447 bp, Homo sapiens
catttccaaaatatgtatttttttctattgatttctaattcagttgtgttgaggtaagaaaacattgtatgttatggattctttggttattttcaaaaacctcctttgtggcatggttttctgattaaattttgtaaacattccatgtgtgtgaaaagatgtgaagtgcagttctatgtccattagttcgaacttgtgaatttgttttgtctagtcttttaacagctttattgagacataattaatgtaacttaaaattaactcatttaaagtacacaattcaataattttaagtatcttcacagaattatgcaaccatcaccacaatcgttaataattttctgcgttctttttctattttctgaagcagtgctaagaatagaacaatattatgagccacattttattgtaattttaaattttctggtagccaaatttaaaaggtta

SEQ ID NO: 388523 - DNA, 308 bp, Homo sapiens
ctagtggactttggttcagaaggaagagctatgcttgttagggcctcttgtctcctcccaggagtggacaaggtgggttaggagcagtttctccctgagtggctgctgctgggtggttgaggagatgcacggcttctgttcctagtcacaaggctgcagcagacgctcctcagatgctctgtgccttggatctggccccactcccgtcctcccagccctcctctcctccagctacctgccagccggcacttttggtcaagctgttttgcattcactgttgcacatatgctcagtcacacacacagcat

SEQ ID NO: 388524 - DNA, 423 bp, Homo sapiens
gcaggtgggcattttggaaaataagtccttggggtgattctcctagagatgggcctagcttgacaacaggtaacagagctgtgacgtcagctgagctctggcggttctcacactgcaggattccaactacaaacctagaccggggaggaacaggctcagaagtaggttttcgccgggtgcagtggctcatgcttgtaatcctagcactttgggaggccgaggtgggtggatcacaaggtcaggagttcgagaccagcctggccaagaaggtgaaaccctgtctctactaaaaatacaaaaattagctattcaggaggccaaggcaggggaattgcttgaacctggatggcagaggttgcagtgagctgagttcatgccactgcactccagcctgggcgacagaatgagactccgtctcaaaaa

SEQ ID NO: 388525 - DNA, 352 bp, Homo sapiens
tttttttttaatattaggtatagagagagtcaaccattttccgtcttgtacctaaagaaacttcactatcttttttgaacgtgcttcctttgaacttgactatttctgatcaattattagtgtcactgtggctccttaagataaatgccaacccccctactacctaacttgctatcatacacagatatcggcaccttagttaagctaaatcatgtatgggaagtggtaaataagtattctgcaattattttccaagtttatttgacaaaatttaggatctattttatgagaatttttcacagattctatttgaggcactgacaagcatgaatacatttaaagtagatttgaa

SEQ ID NO: 388526 - DNA, 384 bp, Homo sapiens
aacagtctcttcaacaaatggtgctgggaaacctggatatccacatgcaaaagagtgaggttgggccgcaccttatgttgtacacaaatattaactcaaaatagatcaaagacctaaccgtaagacctaaaactataaaacttctagaagaaaacactctctgacattggatttggcagtaatatcttaaatacaacaccaaaagcagaggtaacaaaagcaaaaatagacaaataggactatatccaactaaaaaacttctgcacatcgaaagacaataaatagtgaaaaggcaacctacagaatgagaagaaatatctgcaaatcatatatctgctaaggggttaagatctagaataggcaaggtgtatggctcacgcctat

SEQ ID NO: 388527 - DNA, 432 bp, Homo sapiens
ccatatttaatgcaatgcttggcagtactagcaagctacttctatgaacatgaacaagtagttgatttttggtttttaattgttgcattttttgggtttaaattataaatgaatgttactttagctttatcatttttgatttaatttgttgagatttatttggccatttattgagggtcattaggttaaacattatttggatatttggttgatgagtattagcattaatagtataagctcaaactgcaaattgtttatttttttcttctaagttgtcactgggttctttttcaattggaaaggtggaatgaatcagagagatggattagaaccataaaaaatgttccacatcactaatatcagagaaatgcaaattaaaaccacagtgagataccatctcacacgagtcaggatggctatggttaaaaagtc

SEQ ID NO: 388528 - DNA, 972 bp, Homo sapiens
aaaggactcatttatgactgacttgaagaaaaacagtttaaaaatgattagggataggtttgttaaaattagattgccagaccaacttagatttttctctgatgcagttagtagactagcaacgctataatatatttggacttaagcttagcttttggtaaagtcattttgatatccttgagagtaaagtgggggaacaataagttagctaccagctgattgtgataattaatttacacaattctgactttaaatgatcccatccagagattcattgatcttgaaaggtggctttgttctttgctttgggtaatatactaaatgttccaaaataatttttgaggctgagttgttgtactaagtttagatgaactttttgggagtatatatgtaaggcctaaaaaacaccaggatacattaaggtagcatcgctctacagcatcacatatgaaaaagacctgagggtggctgttggcagtaaactagatataagacaaaagtatcatatggcttcccatcttcttcctcacccctcccctaaaaaatccatttcaattaatggaagagtagagtaactgctgaataccaaagtattgttatttttagttctgtgaatattcaagaggaaggatgtgaaaaagttgggtatgttgccagtttaaggaactaagaatttaagagaaatcttgggctgggcgtgatgtctcacgcctgtaatcccagcacttggggaagctgaggcgtgcgggttgcttgaggccaggagtttgagaccagcctggacaacatggtgaaaccctgtctctactaaaattacaaaaattagctgggcatgttggtgcacgcctgtaatcccagctatgttgagaggctgaggcacgagaattgcttgaacccaggaggcagaggttgcagtgagcagagatcacgccactgcactccagtctggatgacagagtgagactctttctc

SEQ ID NO: 388529 - DNA, 1199 bp, Homo sapiens
tcatgaagaatggaagagatcagagcagaaagaagaaaaatattaagacataacagaagaaaactttctgaaacaaatacttaaatctgaagctcaaatggacacatggtattccaagaaaaatttgatatggaataatccatactaagacatttccaccagtgctcagcactagaacactacccagtacatagtacgcactcagtgaataattgttgattgggcgggcaaatggaagaaagtttcatatggctctcccggctgaatgaacaagtcacataaaaggagaagaagacaggctggcttctggttttcttaaagaatcactcagtgccagaaggcagtaatgtctatgaagtcctaagtgtaataaggggtaactgaagaattgtattgccagtccagttgtacagaagcaacagatagacactttcaatatgaatgaactgagggaatatactactcatgcactttccagaaaacctgtagacaacaaaatgatgagtcaaaattcaaaacctagaaatgaagaagctatggtaaaagcattcatggtgagtacagtaatgattttgttttcgtattggattaaaactaaacaactctgcttatggaacagaaaccttgacaatgtggtagtaatataaataaccaaaaccagtacttgggaggaagtgtgagtactgatttctttactttcataatggggaatagatttgtcagtagctaaagtctgaaattgaaatatatagttgaaaaaataatgatttcagcatcctaatgtttttcattacttttttcttaactttagagagatcttttagaaactattctctctttgtgaagacccattcatctgaagttctacaattccttcagtttcacctcaatttctgtttctttgttaagttcaagcaaagtttatacttaatgctttttcactacaataacatgtatggtatgattccatttatatgtatccatttacctgccctccctcctgcccttctgttctttcattcttctatcttttcctctgaacatctgcagaaatatgtctggaatgatgttgaccacatattatgatgtttatttctgggtggtgggatcctggataatttttttaaaatcttctttgtactttattatattgcctggcttttaaaaaataataaatatatcattttttcaaaaacaat

SEQ ID NO: 388530 - DNA, 7382 bp, Homo sapiens
ggcagtttgtaggtcgcgagggaagcgctgaggatcaggaagggggcactgagtgtccgtgggggaatcctcgtgataggaactggaatatgccttgagggggacactatgtctttaaaaacgtcggctggtcatgaggtcaggagttccagaccagcctgaccaacgtggtgaaactccgtctctactaaaaatacaaaaattagccgggcgtggtgccgctccagctactcaggaggctgaggcaggagaatcgctagaacccgggaggcggaggttgcagtgagccgagatcgcgccattgcactccagcctgggcgacagagcgagactgtctcaaaacaaaacaaaacaaaacaaaacaaaaaacaccggctgttcattggaacagaaagaaatggatttatctgctcttcgcgttgaagaagtacaaaatgtcattaatgctatgcagaaaatcttagagtgtcccatctgtctggagttgatcaaggaacctgtctccacaaagtgtgaccacatattttgcaaattttgcatgctgaaacttctcaaccagaagaaagggccttcacagtgtcctttatgtaagaatgatataaccaaaaggagcctacaagaaagtacgagatttagtcaacttgttgaagagctattgaaaatcatttgtgcttttcagcttgacacaggtttggagtatgcaaacagctataattttgcaaaaaaggaaaataactctcctgaacatctaaaagatgaagtttctatcatccaaagtatgggctacagaaaccgtgccaaaagacttctacagagtgaacccgaaaatccttccttgcaggaaaccagtctcagtgtccaactctctaaccttggaactgtgagaactctgaggacaaagcagcggatacaacctcaaaagacgtctgtctacattgaattgggatctgattcttctgaagataccgttaataaggcaacttattgcagtgtgggagatcaagaattgttacaaatcacccctcaaggaaccagggatgaaatcagtttggattctgcaaaaaaggctgcttgtgaattttctgagacggatgtaacaaatactgaacatcatcaacccagtaataatgatttgaacaccactgagaagcgtgcagctgagaggcatccagaaaagtatcagggtagttctgtttcaaacttgcatgtggagccatgtggcacaaatactcatgccagctcattacagcatgagaacagcagtttattactcactaaagacagaatgaatgtagaaaaggctgaattctgtaataaaagcaaacagcctggcttagcaaggagccaacataacagatgggctggaagtaaggaaacatgtaatgataggcggactcccagcacagaaaaaaaggtagatctgaatgctgatcccctgtgtgagagaaaagaatggaataagcagaaactgccatgctcagagaatcctagagatactgaagatgttccttggataacactaaatagcagcattcagaaagttaatgagtggttttccagaagtgatgaactgttaggttctgatgactcacatgatggggagtctgaatcaaatgccaaagtagctgatgtattggacgttctaaatgaggtagatgaatattctggttcttcagagaaaatagacttactggccagtgatcctcatgaggctttaatatgtaaaagtgaaagagttcactccaaatcagtagagagtaatattgaagacaaaatatttgggaaaacctatcggaagaaggcaagcctccccaacttaagccatgtaactgaaaatctaattataggagcatttgttactgagccacagataatacaagagcgtcccctcacaaataaattaaagcgtaaaaggagacctacatcaggccttcatcctgaggattttatcaagaaagcagatttggcagttcaaaagactcctgaaatgataaatcagggaactaaccaaacggagcagaatggtcaagtgatgaatattactaatagtggtcatgagaataaaacaaaaggtgattctattcagaatgagaaaaatcctaacccaatagaatcactcgaaaaagaatctgctttcaaaacgaaagctgaacctataagcagcagtataagcaatatggaactcgaattaaatatccacaattcaaaagcacctaaaaagaataggctgaggaggaagtcttctaccaggcatattcatgcgcttgaactagtagtcagtagaaatctaagcccacctaattgtactgaattgcaaattgatagttgttctagcagtgaagagataaagaaaaaaaagtacaaccaaatgccagtcaggcacagcagaaacctacaactcatggaaggtaaagaacctgcaactggagccaagaagagtaacaagccaaatgaacagacaagtaaaagacatgacagcgatactttcccagagctgaagttaacaaatgcacctggttcttttactaagtgttcaaataccagtgaacttaaagaatttgtcaatcctagccttccaagagaagaaaaagaagagaaactagaaacagttaaagtgtctaataatgctgaagaccccaaagatctcatgttaagtggagaaagggttttgcaaactgaaagatctgtagagagtagcagtatttcattggtacctggtactgattatggcactcaggaaagtatctcgttactggaagttagcactctagggaaggcaaaaacagaaccaaataaatgtgtgagtcagtgtgcagcatttgaaaaccccaagggactaattcatggttgttccaaagataatagaaatgacacagaaggctttaagtatccattgggacatgaagttaaccacagtcgggaaacaagcatagaaatggaagaaagtgaacttgatgctcagtatttgcagaatacattcaaggtttcaaagcgccagtcatttgctccgttttcaaatccaggaaatgcagaagaggaatgtgcaacattctctgcccactctgggtccttaaagaaacaaagtccaaaagtcacttttgaatgtgaacaaaaggaagaaaatcaaggaaagaatgagtctaatatcaagcctgtacagacagttaatatcactgcaggctttcctgtggttggtcagaaagataagccagttgataatgccaaatgtagtatcaaaggaggctctaggttttgtctatcatctcagttcagaggcaacgaaactggactcattactccaaataaacatggacttttacaaaacccatatcgtataccaccactttttcccatcaagtcatttgttaaaactaaatgtaagaaaaatctgctagaggaaaactttgaggaacattcaatgtcacctgaaagagaaatgggaaatgagaacattccaagtacagtgagcacaattagccgtaataacattagagaaaatgtttttaaagaagccagctcaagcaatattaatgaagtaggttccagtactaatgaagtgggctccagtattaatgaaataggttccagtgatgaaaacattcaagcagaactaggtagaaacagagggccaaaattgaatgctatgcttagattaggggttttgcaacctgaggtctataaacaaagtcttcctggaagtaattgtaagcatcctgaaataaaaaagcaagaatatgaagaagtagttcagactgttaatacagatttctctccatatctgatttcagataacttagaacagcctatgggaagtagtcatgcatctcaggtttgttctgagacacctgatgacctgttagatgatggtgaaataaaggaagatactagttttgctgaaaatgacattaaggaaagttctgctgtttttagcaaaagcgtccagaaaggagagcttagcaggagtcctagccctttcacccatacacatttggctcagggttaccgaagaggggccaagaaattagagtcctcagaagagaacttatctagtgaggatgaagagcttccctgcttccaacacttgttatttggtaaagtaaacaatataccttctcagtctactaggcatagcaccgttgctaccgagtgtctgtctaagaacacagaggagaatttattatcattgaagaatagcttaaatgactgcagtaaccaggtaatattggcaaaggcatctcaggaacatcaccttagtgaggaaacaaaatgttctgctagcttgttttcttcacagtgcagtgaattggaagacttgactgcaaatacaaacacccaggatcctttcttgattggttcttccaaacaaatgaggcatcagtctgaaagccagggagttggtctgagtgacaaggaattggtttcagatgatgaagaaagaggaacgggcttggaagaaaataatcaagaagagcaaagcatggattcaaacttaggtgaagcagcatctgggtgtgagagtgaaacaagcgtctctgaagactgctcagggctatcctctcagagtgacattttaaccactcagcagagggataccatgcaacataacctgataaagctccagcaggaaatggctgaactagaagctgtgttagaacagcatgggagccagccttctaacagctacccttccatcataagtgactcttctgcccttgaggacctgcgaaatccagaacaaagcacatcagaaaaagcagtattaacttcacagaaaagtagtgaataccctataagccagaatccagaaggcctttctgctgacaagtttgaggtgtctgcagatagttctaccagtaaaaataaagaaccaggagtggaaaggtcatccccttctaaatgcccatcattagatgataggtggtacatgcacagttgctctgggagtcttcagaatagaaactacccatctcaagaggagctcattaaggttgttgatgtggaggagcaacagctggaagagtctgggccacacgatttgacggaaacatcttacttgccaaggcaagatctagagggaaccccttacctggaatctggaatcagcctcttctctgatgaccctgaatctgatccttctgaagacagagccccagagtcagctcgtgttggcaacataccatcttcaacctctgcattgaaagttccccaattgaaagttgcagaatctgcccagagtccagctgctgctcatactactgatactgctgggtataatgcaatggaagaaagtgtgagcagggagaagccagaattgacagcttcaacagaaagggtcaacaaaagaatgtccatggtggtgtctggcctgaccccagaagaatttatgctcgtgtacaagtttgccagaaaacaccacatcactttaactaatctaattactgaagagactactcatgttgttatgaaaacagatgctgagtttgtgtgtgaacggacactgaaatattttctaggaattgcgggaggaaaatgggtagttagctatttctgggtgacccagtctattaaagaaagaaaaatgctgaatgagcatgattttgaagtcagaggagatgtggtcaatggaagaaaccaccaaggtccaaagcgagcaagagaatcccaggacagaaagatcttcagggggctagaaatctgttgctatgggcccttcaccaacatgcccacagatcaactggaatggatggtacagctgtgtggtgcttctgtggtgaaggagctttcatcattcacccttggcacaggtgtccacccaattgtggttgtgcagccagatgcctggacagaggacaatggcttccatgcaattgggcagatgtgtgaggcacctgtggtgacccgagagtgggtgttggacagtgtagcactctaccagtgccaggagctggacacctacctgataccccagatcccccacagccactactgactgcagccagccacaggtacagagccacaggaccccaagaatgagcttacaaagtggcctttccaggccctgggagctcctctcactcttcagtccttctactgtcctggctactaaatattttatgtacatcagcctgaaaaggacttctggctatgcaagggtcccttaaagattttctgcttgaagtctcccttggaaatctgccatgagcacaaaattatggtaatttttcacctgagaagattttaaaaccatttaaacgccaccaattgagcaagatgctgattcattatttatcagccctattctttctattcaggctgttgttggcttagggctggaagcacagagtggcttggcctcaagagaatagctggtttccctaagtttacttctctaaaaccctgtgttcacaaaggcagagagtcagacccttcaatggaaggagagtgcttgggatcgattatgtgacttaaagtcagaatagtccttgggcagttctcaaatgttggagtggaacattggggaggaaattctgaggcaggtattagaaatgaaaaggaaacttgaaacctgggcatggtggctcacgcctgtaatcccagcactttgggaggccaaggtgggcagatcactggaggtcaggagttcgaaaccagcctggccaacatggtgaaaccccatctctactaaaaatacagaaattagccggtcatggtggtggacacctgtaatcccagctactcaggtggctaaggcaggagaatcacttcagcccgggaggtggaggttgcagtgagccaagatcataccacggcactccagcctgggtgacagtgagactgtggctcaaaaaaaaaaaaaaaaaaaggaaaatgaaactaggaaaggtttcttaaagtctgagatatatttgctagatttctaaagaatgtgttctaaaacagcagaagattttcaagaaccggtttccaaagacagtcttctaattcctcattagtaataagtaaaatgtttattgttgtagctctggtatataatccattcctcttaaaatataagacctctggcatgaatatttcatatctataaaatgacagatcccaccaggaaggaagctgttgctttctttgaggtgatttttttcctttgctccctgttgctgaaaccatacagcttcataaataattttgcttgctgaaggaagaaaaagtgtttttcataaacccattatccaggactgtttatagctgttggaaggactaggtcttccctagcccccccagtgtgcaagggcagtgaagacttgattgtacaaaatacgttttgtaaatgttgtgctgttaacactgcaaataaacttggtagcaaacacttccaacatgaatga

SEQ ID NO: 388531 - DNA, 7242 bp, Homo sapiens
aaaactgcgactgcgcggcgtgagctcgctgagacttcctggaccccgcaccaggctgtggggtttctcagataactgggcccctgcgctcaggaggccttcaccctctgctctgggtaaagttcattggaacagaaagaaatggatttatctgctcttcgcgttgaagaagtacaaaatgtcattaatgctatgcagaaaatcttagagtgtcccatctgtctggagttgatcaaggaacctgtctccacaaagtgtgaccacatattttgcaaggtcttactctgttgtcccagctggagtacagtggtgcgatcatgaggcttactgttgccttgacctcctaggctcaagcgatcctatcacctcagtctcccaagtagctgggactattttgcatgctgaaacttctcaaccagaagaaagggccttcacagtgtcctttatgtaagaatgatataaccaaaaggagcctacaagaaagtacgagatttagtcaacttgttgaagagctattgaaaatcatttgtgcttttcagcttgacacaggtttggagtatgcaaacagctataattttgcaaaaaaggaaaataactctcctgaacatctaaaagatgaagtttctatcatccaaagtatgggctacagaaaccgtgccaaaagacttctacagagtgaacccgaaaatccttccttgcaggaaaccagtctcagtgtccaactctctaaccttggaactgtgagaactctgaggacaaagcagcggatacaacctcaaaagacgtctgtctacattgaattgggatctgattcttctgaagataccgttaataaggcaacttattgcagtgtgggagatcaagaattgttacaaatcacccctcaaggaaccagggatgaaatcagtttggattctgcaaaaaaggctgcttgtgaattttctgagacggatgtaacaaatactgaacatcatcaacccagtaataatgatttgaacaccactgagaagcgtgcagctgagaggcatccagaaaagtatcagggtagttctgtttcaaacttgcatgtggagccatgtggcacaaatactcatgccagctcattacagcatgagaacagcagtttattactcactaaagacagaatgaatgtagaaaaggctgaattctgtaataaaagcaaacagcctggcttagcaaggagccaacataacagatgggctggaagtaaggaaacatgtaatgataggcggactcccagcacagaaaaaaaggtagatctgaatgctgatcccctgtgtgagagaaaagaatggaataagcagaaactgccatgctcagagaatcctagagatactgaagatgttccttggataacactaaatagcagcattcagaaagttaatgagtggttttccagaagtgatgaactgttaggttctgatgactcacatgatggggagtctgaatcaaatgccaaagtagctgatgtattggacgttctaaatgaggtagatgaatattctggttcttcagagaaaatagacttactggccagtgatcctcatgaggctttaatatgtaaaagtgaaagagttcactccaaatcagtagagagtaatattgaagacaaaatatttgggaaaacctatcggaagaaggcaagcctccccaacttaagccatgtaactgaaaatctaattataggagcatttgttactgagccacagataatacaagagcgtcccctcacaaataaattaaagcgtaaaaggagacctacatcaggccttcatcctgaggattttatcaagaaagcagatttggcagttcaaaagactcctgaaatgataaatcagggaactaaccaaacggagcagaatggtcaagtgatgaatattactaatagtggtcatgagaataaaacaaaaggtgattctattcagaatgagaaaaatcctaacccaatagaatcactcgaaaaagaatctgctttcaaaacgaaagctgaacctataagcagcagtataagcaatatggaactcgaattaaatatccacaattcaaaagcacctaaaaagaataggctgaggaggaagtcttctaccaggcatattcatgcgcttgaactagtagtcagtagaaatctaagcccacctaattgtactgaattgcaaattgatagttgttctagcagtgaagagataaagaaaaaaaagtacaaccaaatgccagtcaggcacagcagaaacctacaactcatggaaggtaaagaacctgcaactggagccaagaagagtaacaagccaaatgaacagacaagtaaaagacatgacagcgatactttcccagagctgaagttaacaaatgcacctggttcttttactaagtgttcaaataccagtgaacttaaagaatttgtcaatcctagccttccaagagaagaaaaagaagagaaactagaaacagttaaagtgtctaataatgctgaagaccccaaagatctcatgttaagtggagaaagggttttgcaaactgaaagatctgtagagagtagcagtatttcattggtacctggtactgattatggcactcaggaaagtatctcgttactggaagttagcactctagggaaggcaaaaacagaaccaaataaatgtgtgagtcagtgtgcagcatttgaaaaccccaagggactaattcatggttgttccaaagataatagaaatgacacagaaggctttaagtatccattgggacatgaagttaaccacagtcgggaaacaagcatagaaatggaagaaagtgaacttgatgctcagtatttgcagaatacattcaaggtttcaaagcgccagtcatttgctccgttttcaaatccaggaaatgcagaagaggaatgtgcaacattctctgcccactctgggtccttaaagaaacaaagtccaaaagtcacttttgaatgtgaacaaaaggaagaaaatcaaggaaagaatgagtctaatatcaagcctgtacagacagttaatatcactgcaggctttcctgtggttggtcagaaagataagccagttgataatgccaaatgtagtatcaaaggaggctctaggttttgtctatcatctcagttcagaggcaacgaaactggactcattactccaaataaacatggacttttacaaaacccatatcgtataccaccactttttcccatcaagtcatttgttaaaactaaatgtaagaaaaatctgctagaggaaaactttgaggaacattcaatgtcacctgaaagagaaatgggaaatgagaacattccaagtacagtgagcacaattagccgtaataacattagagaaaatgtttttaaagaagccagctcaagcaatattaatgaagtaggttccagtactaatgaagtgggctccagtattaatgaaataggttccagtgatgaaaacattcaagcagaactaggtagaaacagagggccaaaattgaatgctatgcttagattaggggttttgcaacctgaggtctataaacaaagtcttcctggaagtaattgtaagcatcctgaaataaaaaagcaagaatatgaagaagtagttcagactgttaatacagatttctctccatatctgatttcagataacttagaacagcctatgggaagtagtcatgcatctcaggtttgttctgagacacctgatgacctgttagatgatggtgaaataaaggaagatactagttttgctgaaaatgacattaaggaaagttctgctgtttttagcaaaagcgtccagaaaggagagcttagcaggagtcctagccctttcacccatacacatttggctcagggttaccgaagaggggccaagaaattagagtcctcagaagagaacttatctagtgaggatgaagagcttccctgcttccaacacttgttatttggtaaagtaaacaatataccttctcagtctactaggcatagcaccgttgctaccgagtgtctgtctaagaacacagaggagaatttattatcattgaagaatagcttaaatgactgcagtaaccaggtaatattggcaaaggcatctcaggaacatcaccttagtgaggaaacaaaatgttctgctagcttgttttcttcacagtgcagtgaattggaagacttgactgcaaatacaaacacccaggatcctttcttgattggttcttccaaacaaatgaggcatcagtctgaaagccagggagttggtctgagtgacaaggaattggtttcagatgatgaagaaagaggaacgggcttggaagaaaataatcaagaagagcaaagcatggattcaaacttaggtgaagcagcatctgggtgtgagagtgaaacaagcgtctctgaagactgctcagggctatcctctcagagtgacattttaaccactcagcagagggataccatgcaacataacctgataaagctccagcaggaaatggctgaactagaagctgtgttagaacagcatgggagccagccttctaacagctacccttccatcataagtgactcttctgcccttgaggacctgcgaaatccagaacaaagcacatcagaaaaagcagtattaacttcacagaaaagtagtgaataccctataagccagaatccagaaggcctttctgctgacaagtttgaggtgtctgcagatagttctaccagtaaaaataaagaaccaggagtggaaaggtcatccccttctaaatgcccatcattagatgataggtggtacatgcacagttgctctgggagtcttcagaatagaaactacccatctcaagaggagctcattaaggttgttgatgtggaggagcaacagctggaagagtctgggccacacgatttgacggaaacatcttacttgccaaggcaagatctagagggaaccccttacctggaatctggaatcagcctcttctctgatgaccctgaatctgatccttctgaagacagagccccagagtcagctcgtgttggcaacataccatcttcaacctctgcattgaaagttccccaattgaaagttgcagaatctgcccagagtccagctgctgctcatactactgatactgctgggtataatgcaatggaagaaagtgtgagcagggagaagccagaattgacagcttcaacagaaagggtcaacaaaagaatgtccatggtggtgtctggcctgaccccagaagaatttatgctcgtgtacaagtttgccagaaaacaccacatcactttaactaatctaattactgaagagactactcatgttgttatgaaaacagatgctgagtttgtgtgtgaacggacactgaaatattttctaggaattgcgggaggaaaatgggtagttagctatttctgggtgacccagtctattaaagaaagaaaaatgctgaatgagcatgattttgaagtcagaggagatgtggtcaatggaagaaaccaccaaggtccaaagcgagcaagagaatcccaggacagaaagatcttcagggggctagaaatctgttgctatgggcccttcaccaacatgcccacagatcaactggaatggatggtacagctgtgtggtgcttctgtggtgaaggagctttcatcattcacccttggcacaggtgtccacccaattgtggttgtgcagccagatgcctggacagaggacaatggcttccatgcaattgggcagatgtgtgaggcacctgtggtgacccgagagtgggtgttggacagtgtagcactctaccagtgccaggagctggacacctacctgataccccagatcccccacagccactactgactgcagccagccacaggtacagagccacaggaccccaagaatgagcttacaaagtggcctttccaggccctgggagctcctctcactcttcagtccttctactgtcctggctactaaatattttatgtacatcagcctgaaaaggacttctggctatgcaagggtcccttaaagattttctgcttgaagtctcccttggaaatctgccatgagcacaaaattatggtaatttttcacctgagaagattttaaaaccatttaaacgccaccaattgagcaagatgctgattcattatttatcagccctattctttctattcaggctgttgttggcttagggctggaagcacagagtggcttggcctcaagagaatagctggtttccctaagtttacttctctaaaaccctgtgttcacaaaggcagagagtcagacccttcaatggaaggagagtgcttgggatcgattatgtgacttaaagtcagaatagtccttgggcagttctcaaatgttggagtggaacattggggaggaaattctgaggcaggtattagaaatgaaaaggaaacttgaaacctgggcatggtggctcacgcctgtaatcccagcactttgggaggccaaggtgggcagatcactggaggtcaggagttcgaaaccagcctggccaacatggtgaaaccccatctctactaaaaatacagaaattagccggtcatggtggtggacacctgtaatcccagctactcaggtggctaaggcaggagaatcacttcagcccgggaggtggaggttgcagtgagccaagatcataccacggcactccagcctgggtgacagtgagactgtggctcaaaaaaaaaaaaaaaaaaaggaaaatgaaactaggaaaggtttcttaaagtctgagatatatttgctagatttctaaagaatgtgttctaaaacagcagaagattttcaagaaccggtttccaaagacagtcttctaattcctcattagtaataagtaaaatgtttattgttgtagctctggtatataatccattcctcttaaaatataagacctctggcatgaatatttcatatctataaaatgacagatcccaccaggaaggaagctgttgctttctttgaggtgatttttttcctttgctccctgttgctgaaaccatacagcttcataaataattttgcttgctgaaggaagaaaaagtgtttttcataaacccattatccaggactgtttatagctgttggaaggactaggtcttccctagcccccccagtgtgcaagggcagtgaagacttgattgtacaaaatacgttttgtaaatgttgtgctgttaacactgcaaataaacttggtagcaaacacttccaacatgaatga

SEQ ID NO: 388532 - DNA, 6536 bp, Homo sapiens
aaaactgcgactgcgcggcgtgagctcgctgagacttcctggaccccgcaccaggctgtggggtttctcagataactgggcccctgcgctcaggaggccttcaccctctgctctgggtaaagttcattggaacagaaagaaatggatttatctgctcttcgcgttgaagaagtacaaaatgtcattaatgctatgcagaaaatcttagagtgtcccatctgtctggagttgatcaaggaacctgtctccacaaagtgtgaccacatattttgcaaattttgcatgctgaaacttctcaaccagaagaaagggccttcacagtgtcctttatgtaagaatgatataaccaaaaggagcctacaagaaagtacgagatttagtcaacttgttgaagagctattgaaaatcatttgtgcttttcagcttgacacaggtttggagtatgcaaacagctataattttgcaaaaaaggaaaataactctcctgaacatctaaaagatgaagtttctatcatccaaagtatgggctacagaaaccgtgccaaaagacttctacagagtgaacccgaaaatccttccttgcaggaaaccagtctcagtgtccaactctctaaccttggaactgtgagaactctgaggacaaagcagcggatacaacctcaaaagacgtctgtctacattgaattgggatctgattcttctgaagataccgttaataaggcaacttattgcagtgtgggagatcaagaattgttacaaatcacccctcaaggaaccagggatgaaatcagtttggattctgcaaaaaaggctgcttgtgaattttctgagacggatgtaacaaatactgaacatcatcaacccagtaataatgatttgaacaccactgagaagcgtgcagctgagaggcatccagaaaagtatcagggtagttctgtttcaaacttgcatgtggagccatgtggcacaaatactcatgccagctcattacagcatgagaacagcagtttattactcactaaagacagaatgaatgtagaaaaggctgaattctgtaataaaagcaaacagcctggcttagcaaggagccaacataacagatgggctggaagtaaggaaacatgtaatgataggcggactcccagcacagaaaaaaaggtagatctgaatgctgatcccctgtgtgagagaaaagaatggaataagcagaaactgccatgctcagagaatcctagagatactgaagatgttccttggataacactaaatagcagcattcagaaagttaatgagtggttttccagaagtgatgaactgttaggttctgatgactcacatgatggggagtctgaatcaaatgccaaagtagctgatgtattggacgttctaaatgaggtagatgaatattctggttcttcagagaaaatagacttactggccagtgatcctcatgaggctttaatatgtaaaagtgaaagagttcactccaaatcagtagagagtaatattgaagacaaaatatttgggaaaacctatcggaagaaggcaagcctccccaacttaagccatgtaactgaaaatctaattataggagcatttgttactgagccacagataatacaagagcgtcccctcacaaataaattaaagcgtaaaaggagacctacatcaggccttcatcctgaggattttatcaagaaagcagatttggcagttcaaaagactcctgaaatgataaatcagggaactaaccaaacggagcagaatggtcaagtgatgaatattactaatagtggtcatgagaataaaacaaaaggtgattctattcagaatgagaaaaatcctaacccaatagaatcactcgaaaaagaatctgctttcaaaacgaaagctgaacctataagcagcagtataagcaatatggaactcgaattaaatatccacaattcaaaagcacctaaaaagaataggctgaggaggaagtcttctaccaggcatattcatgcgcttgaactagtagtcagtagaaatctaagcccacctaattgtactgaattgcaaattgatagttgttctagcagtgaagagataaagaaaaaaaagtacaaccaaatgccagtcaggcacagcagaaacctacaactcatggaaggtaaagaacctgcaactggagccaagaagagtaacaagccaaatgaacagacaagtaaaagacatgacagcgatactttcccagagctgaagttaacaaatgcacctggttcttttactaagtgttcaaataccagtgaacttaaagaatttgtcaatcctagccttccaagagaagaaaaagaagagaaactagaaacagttaaagtgtctaataatgctgaagaccccaaagatctcatgttaagtggagaaagggttttgcaaactgaaagatctgtagagagtagcagtatttcattggtacctggtactgattatggcactcaggaaagtatctcgttactggaagttagcactctagggaaggcaaaaacagaaccaaataaatgtgtgagtcagtgtgcagcatttgaaaaccccaagggactaattcatggttgttccaaagataatagaaatgacacagaaggctttaagtatccattgggacatgaagttaaccacagtcgggaaacaagcatagaaatggaagaaagtgaacttgatgctcagtatttgcagaatacattcaaggtttcaaagcgccagtcatttgctccgttttcaaatccaggaaatgcagaagaggaatgtgcaacattctctgcccactctgggtccttaaagaaacaaagtccaaaagtcacttttgaatgtgaacaaaaggaagaaaatcaaggaaagaatgagtctaatatcaagcctgtacagacagttaatatcactgcaggctttcctgtggttggtcagaaagataagccagttgataatgccaaatgtagtatcaaaggaggctctaggttttgtctatcatctcagttcagaggcaacgaaactggactcattactccaaataaacatggacttttacaaaacccatatcgtataccaccactttttcccatcaagtcatttgttaaaactaaatgtaagaaaaatctgctagaggaaaactttgaggaacattcaatgtcacctgaaagagaaatgggaaatgagaacattccaagtacagtgagcacaattagccgtaataacattagagaaaatgtttttaaagaagccagctcaagcaatattaatgaagtaggttccagtactaatgaagtgggctccagtattaatgaaataggttccagtgatgaaaacattcaagcagaactaggtagaaacagagggccaaaattgaatgctatgcttagattaggggttttgcaacctgaggtctataaacaaagtcttcctggaagtaattgtaagcatcctgaaataaaaaagcaagaatatgaagaagtagttcagactgttaatacagatttctctccatatctgatttcagataacttagaacagcctatgggaagtagtcatgcatctcaggtttgttctgagacacctgatgacctgttagatgatggtgaaataaaggaagatactagttttgctgaaaatgacattaaggaaagttctgctgtttttagcaaaagcgtccagaaaggagagcttagcaggagtcctagccctttcacccatacacatttggctcagggttaccgaagaggggccaagaaattagagtcctcagaagagaacttatctagtgaggatgaagagcttccctgcttccaacacttgttatttggtaaagtaaacaatataccttctcagtctactaggcatagcaccgttgctaccgagtgtctgtctaagaacacagaggagaatttattatcattgaagaatagcttaaatgactgcagtaaccaggtaatattggcaaaggcatctcaggaacatcaccttagtgaggaaacaaaatgttctgctagcttgttttcttcacagtgcagtgaattggaagacttgactgcaaatacaaacacccaggatcctttcttgattggttcttccaaacaaatgaggcatcagtctgaaagccagggagttggtctgagtgacaaggaattggtttcagatgatgaagaaagaggaacgggcttggaagaaaataatcaagaagagcaaagcatggattcaaacttaggtgaagcagcatctgggtgtgagagtgaaacaagcgtctctgaagactgctcagggctatcctctcagagtgacattttaaccactcagcagagggataccatgcaacataacctgataaagctccagcaggaaatggctgaactagaagctgtgttagaacagcatgggagccagccttctaacagctacccttccatcataagtgactcttctgcccttgaggacctgcgaaatccagaacaaagcacatcagaaaaagcagtattaacttcacagaaaagtagtgaataccctataagccagaatccagaaggcctttctgctgacaagtttgaggtgtctgcagatagttctaccagtaaaaataaagaaccaggagtggaaagatgctgagtttgtgtgtgaacggacactgaaatattttctaggaattgcgggaggaaaatgggtagttagctatttctgggtgacccagtctattaaagaaagaaaaatgctgaatgagcatgattttgaagtcagaggagatgtggtcaatggaagaaaccaccaaggtccaaagcgagcaagagaatcccaggacagaaagatcttcagggggctagaaatctgttgctatgggcccttcaccaacatgcccacagatcaactggaatggatggtacagctgtgtggtgcttctgtggtgaaggagctttcatcattcacccttggcacaggtgtccacccaattgtggttgtgcagccagatgcctggacagaggacaatggcttccatgcaattgggcagatgtgtgaggcacctgtggtgacccgagagtgggtgttggacagtgtagcactctaccagtgccaggagctggacacctacctgataccccagatcccccacagccactactgactgcagccagccacaggtacagagccacaggaccccaagaatgagcttacaaagtggcctttccaggccctgggagctcctctcactcttcagtccttctactgtcctggctactaaatattttatgtacatcagcctgaaaaggacttctggctatgcaagggtcccttaaagattttctgcttgaagtctcccttggaaatctgccatgagcacaaaattatggtaatttttcacctgagaagattttaaaaccatttaaacgccaccaattgagcaagatgctgattcattatttatcagccctattctttctattcaggctgttgttggcttagggctggaagcacagagtggcttggcctcaagagaatagctggtttccctaagtttacttctctaaaaccctgtgttcacaaaggcagagagtcagacccttcaatggaaggagagtgcttgggatcgattatgtgacttaaagtcagaatagtccttgggcagttctcaaatgttggagtggaacattggggaggaaattctgaggcaggtattagaaatgaaaaggaaacttgaaacctgggcatggtggctcacgcctgtaatcccagcactttgggaggccaaggtgggcagatcactggaggtcaggagttcgaaaccagcctggccaacatggtgaaaccccatctctactaaaaatacagaaattagccggtcatggtggtggacacctgtaatcccagctactcaggtggctaaggcaggagaatcacttcagcccgggaggtggaggttgcagtgagccaagatcataccacggcactccagcctgggtgacagtgagactgtggctcaaaaaaaaaaaaaaaaaaaggaaaatgaaactaggaaaggtttcttaaagtctgagatatatttgctagatttctaaagaatgtgttctaaaacagcagaagattttcaagaaccggtttccaaagacagtcttctaattcctcattagtaataagtaaaatgtttattgttgtagctctggtatataatccattcctcttaaaatataagacctctggcatgaatatttcatatctataaaatgacagatcccaccaggaaggaagctgttgctttctttgaggtgatttttttcctttgctccctgttgctgaaaccatacagcttcataaataattttgcttgctgaaggaagaaaaagtgtttttcataaacccattatccaggactgtttatagctgttggaaggactaggtcttccctagcccccccagtgtgcaagggcagtgaagacttgattgtacaaaatacgttttgtaaatgttgtgctgttaacactgcaaataaacttggtagcaaacacttccaacatgaatga

SEQ ID NO: 388533 - DNA, 6331 bp, Homo sapiens
aaaactgcgactgcgcggcgtgagctcgctgagacttcctggaccccgcaccaggctgtggggtttctcagataactgggcccctgcgctcaggaggccttcaccctctgctctgggtaaagttcattggaacagaaagaaatggatttatctgctcttcgcgttgaagaagtacaaaatgtcattaatgctatgcagaaaatcttagagtgtcccatctgtctggagttgatcaaggaacctgtctccacaaagtgtgaccacatattttgcaaattttgcatgctgaaacttctcaaccagaagaaagggccttcacagtgtcctttatgtaagaatgatataaccaaaaggagcctacaagaaagtacgagatttagtcaacttgttgaagagctattgaaaatcatttgtgcttttcagcttgacacaggtttggagtatgcaaacagctataattttgcaaaaaaggaaaataactctcctgaacatctaaaagatgaagtttctatcatccaaagtatgggctacagaaaccgtgccaaaagacttctacagagtgaacccgaaaatccttccttgcaggaaaccagtctcagtgtccaactctctaaccttggaactgtgagaactctgaggacaaagcagcggatacaacctcaaaagacgtctgtctacattgaattgggatctgattcttctgaagataccgttaataaggcaacttattgcagtgtgggagatcaagaattgttacaaatcacccctcaaggaaccagggatgaaatcagtttggattctgcaaaaaaggctgcttgtgaattttctgagacggatgtaacaaatactgaacatcatcaacccagtaataatgatttgaacaccactgagaagcgtgcagctgagaggcatccagaaaagtatcagggtagttctgtttcaaacttgcatgtggagccatgtggcacaaatactcatgccagctcattacagcatgagaacagcagtttattactcactaaagacagaatgaatgtagaaaaggctgaattctgtaataaaagcaaacagcctggcttagcaaggagccaacataacagatgggctggaagtaaggaaacatgtaatgataggcggactcccagcacagaaaaaaaggtagatctgaatgctgatcccctgtgtgagagaaaagaatggaataagcagaaactgccatgctcagagaatcctagagatactgaagatgttccttggataacactaaatagcagcattcagaaagttaatgagtggttttccagaagtgatgaactgttaggttctgatgactcacatgatggggagtctgaatcaaatgccaaagtagctgatgtattggacgttctaaatgaggtagatgaatattctggttcttcagagaaaatagacttactggccagtgatcctcatgaggctttaatatgtaaaagtgaaagagttcactccaaatcagtagagagtaatattgaagacaaaatatttgggaaaacctatcggaagaaggcaagcctccccaacttaagccatgtaactgaaaatctaattataggagcatttgttactgagccacagataatacaagagcgtcccctcacaaataaattaaagcgtaaaaggagacctacatcaggccttcatcctgaggattttatcaagaaagcagatttggcagttcaaaagactcctgaaatgataaatcagggaactaaccaaacggagcagaatggtcaagtgatgaatattactaatagtggtcatgagaataaaacaaaaggtgattctattcagaatgagaaaaatcctaacccaatagaatcactcgaaaaagaatctgctttcaaaacgaaagctgaacctataagcagcagtataagcaatatggaactcgaattaaatatccacaattcaaaagcacctaaaaagaataggctgaggaggaagtcttctaccaggcatattcatgcgcttgaactagtagtcagtagaaatctaagcccacctaattgtactgaattgcaaattgatagttgttctagcagtgaagagataaagaaaaaaaagtacaaccaaatgccagtcaggcacagcagaaacctacaactcatggaaggtaaagaacctgcaactggagccaagaagagtaacaagccaaatgaacagacaagtaaaagacatgacagcgatactttcccagagctgaagttaacaaatgcacctggttcttttactaagtgttcaaataccagtgaacttaaagaatttgtcaatcctagccttccaagagaagaaaaagaagagaaactagaaacagttaaagtgtctaataatgctgaagaccccaaagatctcatgttaagtggagaaagggttttgcaaactgaaagatctgtagagagtagcagtatttcattggtacctggtactgattatggcactcaggaaagtatctcgttactggaagttagcactctagggaaggcaaaaacagaaccaaataaatgtgtgagtcagtgtgcagcatttgaaaaccccaagggactaattcatggttgttccaaagataatagaaatgacacagaaggctttaagtatccattgggacatgaagttaaccacagtcgggaaacaagcatagaaatggaagaaagtgaacttgatgctcagtatttgcagaatacattcaaggtttcaaagcgccagtcatttgctccgttttcaaatccaggaaatgcagaagaggaatgtgcaacattctctgcccactctgggtccttaaagaaacaaagtccaaaagtcacttttgaatgtgaacaaaaggaagaaaatcaaggaaagaatgagtctaatatcaagcctgtacagacagttaatatcactgcaggctttcctgtggttggtcagaaagataagccagttgataatgccaaatgtagtatcaaaggaggctctaggttttgtctatcatctcagttcagaggcaacgaaactggactcattactccaaataaacatggacttttacaaaacccatatcgtataccaccactttttcccatcaagtcatttgttaaaactaaatgtaagaaaaatctgctagaggaaaactttgaggaacattcaatgtcacctgaaagagaaatgggaaatgagaacattccaagtacagtgagcacaattagccgtaataacattagagaaaatgtttttaaagaagccagctcaagcaatattaatgaagtaggttccagtactaatgaagtgggctccagtattaatgaaataggttccagtgatgaaaacattcaagcagaactaggtagaaacagagggccaaaattgaatgctatgcttagattaggggttttgcaacctgaggtctataaacaaagtcttcctggaagtaattgtaagcatcctgaaataaaaaagcaagaatatgaagaagtagttcagactgttaatacagatttctctccatatctgatttcagataacttagaacagcctatgggaagtagtcatgcatctcaggtttgttctgagacacctgatgacctgttagatgatggtgaaataaaggaagatactagttttgctgaaaatgacattaaggaaagttctgctgtttttagcaaaagcgtccagaaaggagagcttagcaggagtcctagccctttcacccatacacatttggctcagggttaccgaagaggggccaagaaattagagtcctcagaagagaacttatctagtgaggatgaagagcttccctgcttccaacacttgttatttggtaaagtaaacaatataccttctcagtctactaggcatagcaccgttgctaccgagtgtctgtctaagaacacagaggagaatttattatcattgaagaatagcttaaatgactgcagtaaccaggtaatattggcaaaggcatctcaggaacatcaccttagtgaggaaacaaaatgttctgctagcttgttttcttcacagtgcagtgaattggaagacttgactgcaaatacaaacacccaggatcctttcttgattggttcttccaaacaaatgaggcatcagtctgaaagccagggagttggtctgagtgacaaggaattggtttcagatgatgaagaaagaggaacgggcttggaagaaaataatcaagaagagcaaagcatggattcaaacttaggtgaagcagcatctgggtgtgagagtgaaacaagcgtctctgaagactgctcagggctatcctctcagagtgacattttaaccactcagcagagggataccatgcaacataacctgataaagctccagcaggaaatggctgaactagaagctgtgttagaacagcatgggagccagccttctaacagctacccttccatcataagtgactcttctgcccttgaggacctgcgaaatccagaacaaagcacatcagaaaaaggggtgacccagtctattaaagaaagaaaaatgctgaatgagcatgattttgaagtcagaggagatgtggtcaatggaagaaaccaccaaggtccaaagcgagcaagagaatcccaggacagaaagatcttcagggggctagaaatctgttgctatgggcccttcaccaacatgcccacagatcaactggaatggatggtacagctgtgtggtgcttctgtggtgaaggagctttcatcattcacccttggcacaggtgtccacccaattgtggttgtgcagccagatgcctggacagaggacaatggcttccatgcaattgggcagatgtgtgaggcacctgtggtgacccgagagtgggtgttggacagtgtagcactctaccagtgccaggagctggacacctacctgataccccagatcccccacagccactactgactgcagccagccacaggtacagagccacaggaccccaagaatgagcttacaaagtggcctttccaggccctgggagctcctctcactcttcagtccttctactgtcctggctactaaatattttatgtacatcagcctgaaaaggacttctggctatgcaagggtcccttaaagattttctgcttgaagtctcccttggaaatctgccatgagcacaaaattatggtaatttttcacctgagaagattttaaaaccatttaaacgccaccaattgagcaagatgctgattcattatttatcagccctattctttctattcaggctgttgttggcttagggctggaagcacagagtggcttggcctcaagagaatagctggtttccctaagtttacttctctaaaaccctgtgttcacaaaggcagagagtcagacccttcaatggaaggagagtgcttgggatcgattatgtgacttaaagtcagaatagtccttgggcagttctcaaatgttggagtggaacattggggaggaaattctgaggcaggtattagaaatgaaaaggaaacttgaaacctgggcatggtggctcacgcctgtaatcccagcactttgggaggccaaggtgggcagatcactggaggtcaggagttcgaaaccagcctggccaacatggtgaaaccccatctctactaaaaatacagaaattagccggtcatggtggtggacacctgtaatcccagctactcaggtggctaaggcaggagaatcacttcagcccgggaggtggaggttgcagtgagccaagatcataccacggcactccagcctgggtgacagtgagactgtggctcaaaaaaaaaaaaaaaaaaaggaaaatgaaactaggaaaggtttcttaaagtctgagatatatttgctagatttctaaagaatgtgttctaaaacagcagaagattttcaagaaccggtttccaaagacagtcttctaattcctcattagtaataagtaaaatgtttattgttgtagctctggtatataatccattcctcttaaaatataagacctctggcatgaatatttcatatctataaaatgacagatcccaccaggaaggaagctgttgctttctttgaggtgatttttttcctttgctccctgttgctgaaaccatacagcttcataaataattttgcttgctgaaggaagaaaaagtgtttttcataaacccattatccaggactgtttatagctgttggaaggactaggtcttccctagcccccccagtgtgcaagggcagtgaagacttgattgtacaaaatacgttttgtaaatgttgtgctgttaacactgcaaataaacttggtagcaaacacttccaacatgaatga

SEQ ID NO: 388534 - DNA, 6437 bp, Homo sapiens
aaaactgcgactgcgcggcgtgagctcgctgagacttcctggaccccgcaccaggctgtggggtttctcagataactgggcccctgcgctcaggaggccttcaccctctgctctgggtaaagctgcttgtgaattttctgagacggatgtaacaaatactgaacatcatcaacccagtaataatgatttgaacaccactgagaagcgtgcagctgagaggcatccagaaaagtatcagggtagttctgtttcaaacttgcatgtggagccatgtggcacaaatactcatgccagctcattacagcatgagaacagcagtttattactcactaaagacagaatgaatgtagaaaaggctgaattctgtaataaaagcaaacagcctggcttagcaaggagccaacataacagatgggctggaagtaaggaaacatgtaatgataggcggactcccagcacagaaaaaaaggtagatctgaatgctgatcccctgtgtgagagaaaagaatggaataagcagaaactgccatgctcagagaatcctagagatactgaagatgttccttggataacactaaatagcagcattcagaaagttaatgagtggttttccagaagtgatgaactgttaggttctgatgactcacatgatggggagtctgaatcaaatgccaaagtagctgatgtattggacgttctaaatgaggtagatgaatattctggttcttcagagaaaatagacttactggccagtgatcctcatgaggctttaatatgtaaaagtgaaagagttcactccaaatcagtagagagtaatattgaagacaaaatatttgggaaaacctatcggaagaaggcaagcctccccaacttaagccatgtaactgaaaatctaattataggagcatttgttactgagccacagataatacaagagcgtcccctcacaaataaattaaagcgtaaaaggagacctacatcaggccttcatcctgaggattttatcaagaaagcagatttggcagttcaaaagactcctgaaatgataaatcagggaactaaccaaacggagcagaatggtcaagtgatgaatattactaatagtggtcatgagaataaaacaaaaggtgattctattcagaatgagaaaaatcctaacccaatagaatcactcgaaaaagaatctgctttcaaaacgaaagctgaacctataagcagcagtataagcaatatggaactcgaattaaatatccacaattcaaaagcacctaaaaagaataggctgaggaggaagtcttctaccaggcatattcatgcgcttgaactagtagtcagtagaaatctaagcccacctaattgtactgaattgcaaattgatagttgttctagcagtgaagagataaagaaaaaaaagtacaaccaaatgccagtcaggcacagcagaaacctacaactcatggaaggtaaagaacctgcaactggagccaagaagagtaacaagccaaatgaacagacaagtaaaagacatgacagcgatactttcccagagctgaagttaacaaatgcacctggttcttttactaagtgttcaaataccagtgaacttaaagaatttgtcaatcctagccttccaagagaagaaaaagaagagaaactagaaacagttaaagtgtctaataatgctgaagaccccaaagatctcatgttaagtggagaaagggttttgcaaactgaaagatctgtagagagtagcagtatttcattggtacctggtactgattatggcactcaggaaagtatctcgttactggaagttagcactctagggaaggcaaaaacagaaccaaataaatgtgtgagtcagtgtgcagcatttgaaaaccccaagggactaattcatggttgttccaaagataatagaaatgacacagaaggctttaagtatccattgggacatgaagttaaccacagtcgggaaacaagcatagaaatggaagaaagtgaacttgatgctcagtatttgcagaatacattcaaggtttcaaagcgccagtcatttgctccgttttcaaatccaggaaatgcagaagaggaatgtgcaacattctctgcccactctgggtccttaaagaaacaaagtccaaaagtcacttttgaatgtgaacaaaaggaagaaaatcaaggaaagaatgagtctaatatcaagcctgtacagacagttaatatcactgcaggctttcctgtggttggtcagaaagataagccagttgataatgccaaatgtagtatcaaaggaggctctaggttttgtctatcatctcagttcagaggcaacgaaactggactcattactccaaataaacatggacttttacaaaacccatatcgtataccaccactttttcccatcaagtcatttgttaaaactaaatgtaagaaaaatctgctagaggaaaactttgaggaacattcaatgtcacctgaaagagaaatgggaaatgagaacattccaagtacagtgagcacaattagccgtaataacattagagaaaatgtttttaaagaagccagctcaagcaatattaatgaagtaggttccagtactaatgaagtgggctccagtattaatgaaataggttccagtgatgaaaacattcaagcagaactaggtagaaacagagggccaaaattgaatgctatgcttagattaggggttttgcaacctgaggtctataaacaaagtcttcctggaagtaattgtaagcatcctgaaataaaaaagcaagaatatgaagaagtagttcagactgttaatacagatttctctccatatctgatttcagataacttagaacagcctatgggaagtagtcatgcatctcaggtttgttctgagacacctgatgacctgttagatgatggtgaaataaaggaagatactagttttgctgaaaatgacattaaggaaagttctgctgtttttagcaaaagcgtccagaaaggagagcttagcaggagtcctagccctttcacccatacacatttggctcagggttaccgaagaggggccaagaaattagagtcctcagaagagaacttatctagtgaggatgaagagcttccctgcttccaacacttgttatttggtaaagtaaacaatataccttctcagtctactaggcatagcaccgttgctaccgagtgtctgtctaagaacacagaggagaatttattatcattgaagaatagcttaaatgactgcagtaaccaggtaatattggcaaaggcatctcaggaacatcaccttagtgaggaaacaaaatgttctgctagcttgttttcttcacagtgcagtgaattggaagacttgactgcaaatacaaacacccaggatcctttcttgattggttcttccaaacaaatgaggcatcagtctgaaagccagggagttggtctgagtgacaaggaattggtttcagatgatgaagaaagaggaacgggcttggaagaaaataatcaagaagagcaaagcatggattcaaacttaggtgaagcagcatctgggtgtgagagtgaaacaagcgtctctgaagactgctcagggctatcctctcagagtgacattttaaccactcagcagagggataccatgcaacataacctgataaagctccagcaggaaatggctgaactagaagctgtgttagaacagcatgggagccagccttctaacagctacccttccatcataagtgactcttctgcccttgaggacctgcgaaatccagaacaaagcacatcagaaaaagcagtattaacttcacagaaaagtagtgaataccctataagccagaatccagaaggcctttctgctgacaagtttgaggtgtctgcagatagttctaccagtaaaaataaagaaccaggagtggaaaggtcatccccttctaaatgcccatcattagatgataggtggtacatgcacagttgctctgggagtcttcagaatagaaactacccatctcaagaggagctcattaaggttgttgatgtggaggagcaacagctggaagagtctgggccacacgatttgacggaaacatcttacttgccaaggcaagatctagagggaaccccttacctggaatctggaatcagcctcttctctgatgaccctgaatctgatccttctgaagacagagccccagagtcagctcgtgttggcaacataccatcttcaacctctgcattgaaagttccccaattgaaagttgcagaatctgcccagagtccagctgctgctcatactactgatactgctgggtataatgcaatggaagaaagtgtgagcagggagaagccagaattgacagcttcaacagaaagggtcaacaaaagaatgtccatggtggtgtctggcctgaccccagaagaatttatgctcgtgtacaagtttgccagaaaacaccacatcactttaactaatctaattactgaagagactactcatgttgttatgaaaacagatgctgagtttgtgtgtgaacggacactgaaatattttctaggaattgcgggaggaaaatgggtagttagctatttctgggtgacccagtctattaaagaaagaaaaatgctgaatgagcatgattttgaagtcagaggagatgtggtcaatggaagaaaccaccaaggtccaaagcgagcaagagaatcccaggacagaaagatcttcagggggctagaaatctgttgctatgggcccttcaccaacatgcccacagatcaactggaatggatggtacagctgtgtggtgcttctgtggtgaaggagctttcatcattcacccttggcacaggtgtccacccaattgtggttgtgcagccagatgcctggacagaggacaatggcttccatgcaattgggcagatgtgtgaggcacctgtggtgacccgagagtgggtgttggacagtgtagcactctaccagtgccaggagctggacacctacctgataccccagatcccccacagccactactgactgcagccagccacaggtacagagccacaggaccccaagaatgagcttacaaagtggcctttccaggccctgggagctcctctcactcttcagtccttctactgtcctggctactaaatattttatgtacatcagcctgaaaaggacttctggctatgcaagggtcccttaaagattttctgcttgaagtctcccttggaaatctgccatgagcacaaaattatggtaatttttcacctgagaagattttaaaaccatttaaacgccaccaattgagcaagatgctgattcattatttatcagccctattctttctattcaggctgttgttggcttagggctggaagcacagagtggcttggcctcaagagaatagctggtttccctaagtttacttctctaaaaccctgtgttcacaaaggcagagagtcagacccttcaatggaaggagagtgcttgggatcgattatgtgacttaaagtcagaatagtccttgggcagttctcaaatgttggagtggaacattggggaggaaattctgaggcaggtattagaaatgaaaaggaaacttgaaacctgggcatggtggctcacgcctgtaatcccagcactttgggaggccaaggtgggcagatcactggaggtcaggagttcgaaaccagcctggccaacatggtgaaaccccatctctactaaaaatacagaaattagccggtcatggtggtggacacctgtaatcccagctactcaggtggctaaggcaggagaatcacttcagcccgggaggtggaggttgcagtgagccaagatcataccacggcactccagcctgggtgacagtgagactgtggctcaaaaaaaaaaaaaaaaaaaggaaaatgaaactaggaaaggtttcttaaagtctgagatatatttgctagatttctaaagaatgtgttctaaaacagcagaagattttcaagaaccggtttccaaagacagtcttctaattcctcattagtaataagtaaaatgtttattgttgtagctctggtatataatccattcctcttaaaatataagacctctggcatgaatatttcatatctataaaatgacagatcccaccaggaaggaagctgttgctttctttgaggtgatttttttcctttgctccctgttgctgaaaccatacagcttcataaataattttgcttgctgaaggaagaaaaagtgtttttcataaacccattatccaggactgtttatagctgttggaaggactaggtcttccctagcccccccagtgtgcaagggcagtgaagacttgattgtacaaaatacgttttgtaaatgttgtgctgttaacactgcaaataaacttggtagcaaacacttccaacatgaatga

SEQ ID NO: 388535 - DNA, 3700 bp, Homo sapiens
aaaactgcgactgcgcggcgtgagctcgctgagacttcctggaccccgcaccaggctgtggggtttctcagataactgggcccctgcgctcaggaggccttcaccctctgctctgggtaaagttcattggaacagaaagaaatggatttatctgctcttcgcgttgaagaagtacaaaatgtcattaatgctatgcagaaaatcttagagtgtcccatctgtctggagttgatcaaggaacctgtctccacaaagtgtgaccacatattttgcaaattttgcatgctgaaacttctcaaccagaagaaagggccttcacagtgtcctttatgtaagaatgatataaccaaaaggagcctacaagaaagtacgagatttagtcaacttgttgaagagctattgaaaatcatttgtgcttttcagcttgacacaggtttggagtatgcaaacagctataattttgcaaaaaaggaaaataactctcctgaacatctaaaagatgaagtttctatcatccaaagtatgggctacagaaaccgtgccaaaagacttctacagagtgaacccgaaaatccttccttgcaggaaaccagtctcagtgtccaactctctaaccttggaactgtgagaactctgaggacaaagcagcggatacaacctcaaaagacgtctgtctacattgaattgggatctgattcttctgaagataccgttaataaggcaacttattgcagtgtgggagatcaagaattgttacaaatcacccctcaaggaaccagggatgaaatcagtttggattctgcaaaaaagggtgaagcagcatctgggtgtgagagtgaaacaagcgtctctgaagactgctcagggctatcctctcagagtgacattttaaccactcagcagagggataccatgcaacataacctgataaagctccagcaggaaatggctgaactagaagctgtgttagaacagcatgggagccagccttctaacagctacccttccatcataagtgactcttctgcccttgaggacctgcgaaatccagaacaaagcacatcagaaaaagcagtattaacttcacagaaaagtagtgaataccctataagccagaatccagaaggcctttctgctgacaagtttgaggtgtctgcagatagttctaccagtaaaaataaagaaccaggagtggaaaggtcatccccttctaaatgcccatcattagatgataggtggtacatgcacagttgctctgggagtcttcagaatagaaactacccatctcaagaggagctcattaaggttgttgatgtggaggagcaacagctggaagagtctgggccacacgatttgacggaaacatcttacttgccaaggcaagatctagagggaaccccttacctggaatctggaatcagcctcttctctgatgaccctgaatctgatccttctgaagacagagccccagagtcagctcgtgttggcaacataccatcttcaacctctgcattgaaagttccccaattgaaagttgcagaatctgcccagagtccagctgctgctcatactactgatactgctgggtataatgcaatggaagaaagtgtgagcagggagaagccagaattgacagcttcaacagaaagggtcaacaaaagaatgtccatggtggtgtctggcctgaccccagaagaatttatgctcgtgtacaagtttgccagaaaacaccacatcactttaactaatctaattactgaagagactactcatgttgttatgaaaacagatgctgagtttgtgtgtgaacggacactgaaatattttctaggaattgcgggaggaaaatgggtagttagctatttctgggtgacccagtctattaaagaaagaaaaatgctgaatgagcatgattttgaagtcagaggagatgtggtcaatggaagaaaccaccaaggtccaaagcgagcaagagaatcccaggacagaaagatcttcagggggctagaaatctgttgctatgggcccttcaccaacatgcccacagatcaactggaatggatggtacagctgtgtggtgcttctgtggtgaaggagctttcatcattcacccttggcacaggtgtccacccaattgtggttgtgcagccagatgcctggacagaggacaatggcttccatgcaattgggcagatgtgtgaggcacctgtggtgacccgagagtgggtgttggacagtgtagcactctaccagtgccaggagctggacacctacctgataccccagatcccccacagccactactgactgcagccagccacaggtacagagccacaggaccccaagaatgagcttacaaagtggcctttccaggccctgggagctcctctcactcttcagtccttctactgtcctggctactaaatattttatgtacatcagcctgaaaaggacttctggctatgcaagggtcccttaaagattttctgcttgaagtctcccttggaaatctgccatgagcacaaaattatggtaatttttcacctgagaagattttaaaaccatttaaacgccaccaattgagcaagatgctgattcattatttatcagccctattctttctattcaggctgttgttggcttagggctggaagcacagagtggcttggcctcaagagaatagctggtttccctaagtttacttctctaaaaccctgtgttcacaaaggcagagagtcagacccttcaatggaaggagagtgcttgggatcgattatgtgacttaaagtcagaatagtccttgggcagttctcaaatgttggagtggaacattggggaggaaattctgaggcaggtattagaaatgaaaaggaaacttgaaacctgggcatggtggctcacgcctgtaatcccagcactttgggaggccaaggtgggcagatcactggaggtcaggagttcgaaaccagcctggccaacatggtgaaaccccatctctactaaaaatacagaaattagccggtcatggtggtggacacctgtaatcccagctactcaggtggctaaggcaggagaatcacttcagcccgggaggtggaggttgcagtgagccaagatcataccacggcactccagcctgggtgacagtgagactgtggctcaaaaaaaaaaaaaaaaaaaggaaaatgaaactaggaaaggtttcttaaagtctgagatatatttgctagatttctaaagaatgtgttctaaaacagcagaagattttcaagaaccggtttccaaagacagtcttctaattcctcattagtaataagtaaaatgtttattgttgtagctctggtatataatccattcctcttaaaatataagacctctggcatgaatatttcatatctataaaatgacagatcccaccaggaaggaagctgttgctttctttgaggtgatttttttcctttgctccctgttgctgaaaccatacagcttcataaataattttgcttgctgaaggaagaaaaagtgtttttcataaacccattatccaggactgtttatagctgttggaaggactaggtcttccctagcccccccagtgtgcaagggcagtgaagacttgattgtacaaaatacgttttgtaaatgttgtgctgttaacactgcaaataaacttggtagcaaacacttccaacatgaatga

SEQ ID NO: 388536 - DNA, 3577 bp, Homo sapiens
aaaactgcgactgcgcggcgtgagctcgctgagacttcctggaccccgcaccaggctgtggggtttctcagataactgggcccctgcgctcaggaggccttcaccctctgctctgggtaaagttcattggaacagaaagaaatggatttatctgctcttcgcgttgaagaagtacaaaatgtcattaatgctatgcagaaaatcttagagtgtcccatctgtctggagttgatcaaggaacctgtctccacaaagtgtgaccacatattttgcaaattttgcatgctgaaacttctcaaccagaagaaagggccttcacagtgtcctttatgtaagaatgatataaccaaaaggagcctacaagaaagtacgagatttagtcaacttgttgaagagctattgaaaatcatttgtgcttttcagcttgacacaggtttggagtatgcaaacagctataattttgcaaaaaaggaaaataactctcctgaacatctaaaagatgaagtttctatcatccaaagtatgggctacagaaaccgtgccaaaagacttctacagagtgaacccgaaaatccttccttgcaggaaaccagtctcagtgtccaactctctaaccttggaactgtgagaactctgaggacaaagcagcggatacaacctcaaaagacgtctgtctacattgaattgggtgaagcagcatctgggtgtgagagtgaaacaagcgtctctgaagactgctcagggctatcctctcagagtgacattttaaccactcagcagagggataccatgcaacataacctgataaagctccagcaggaaatggctgaactagaagctgtgttagaacagcatgggagccagccttctaacagctacccttccatcataagtgactcttctgcccttgaggacctgcgaaatccagaacaaagcacatcagaaaaagcagtattaacttcacagaaaagtagtgaataccctataagccagaatccagaaggcctttctgctgacaagtttgaggtgtctgcagatagttctaccagtaaaaataaagaaccaggagtggaaaggtcatccccttctaaatgcccatcattagatgataggtggtacatgcacagttgctctgggagtcttcagaatagaaactacccatctcaagaggagctcattaaggttgttgatgtggaggagcaacagctggaagagtctgggccacacgatttgacggaaacatcttacttgccaaggcaagatctagagggaaccccttacctggaatctggaatcagcctcttctctgatgaccctgaatctgatccttctgaagacagagccccagagtcagctcgtgttggcaacataccatcttcaacctctgcattgaaagttccccaattgaaagttgcagaatctgcccagagtccagctgctgctcatactactgatactgctgggtataatgcaatggaagaaagtgtgagcagggagaagccagaattgacagcttcaacagaaagggtcaacaaaagaatgtccatggtggtgtctggcctgaccccagaagaatttatgctcgtgtacaagtttgccagaaaacaccacatcactttaactaatctaattactgaagagactactcatgttgttatgaaaacagatgctgagtttgtgtgtgaacggacactgaaatattttctaggaattgcgggaggaaaatgggtagttagctatttctgggtgacccagtctattaaagaaagaaaaatgctgaatgagcatgattttgaagtcagaggagatgtggtcaatggaagaaaccaccaaggtccaaagcgagcaagagaatcccaggacagaaagatcttcagggggctagaaatctgttgctatgggcccttcaccaacatgcccacagatcaactggaatggatggtacagctgtgtggtgcttctgtggtgaaggagctttcatcattcacccttggcacaggtgtccacccaattgtggttgtgcagccagatgcctggacagaggacaatggcttccatgcaattgggcagatgtgtgaggcacctgtggtgacccgagagtgggtgttggacagtgtagcactctaccagtgccaggagctggacacctacctgataccccagatcccccacagccactactgactgcagccagccacaggtacagagccacaggaccccaagaatgagcttacaaagtggcctttccaggccctgggagctcctctcactcttcagtccttctactgtcctggctactaaatattttatgtacatcagcctgaaaaggacttctggctatgcaagggtcccttaaagattttctgcttgaagtctcccttggaaatctgccatgagcacaaaattatggtaatttttcacctgagaagattttaaaaccatttaaacgccaccaattgagcaagatgctgattcattatttatcagccctattctttctattcaggctgttgttggcttagggctggaagcacagagtggcttggcctcaagagaatagctggtttccctaagtttacttctctaaaaccctgtgttcacaaaggcagagagtcagacccttcaatggaaggagagtgcttgggatcgattatgtgacttaaagtcagaatagtccttgggcagttctcaaatgttggagtggaacattggggaggaaattctgaggcaggtattagaaatgaaaaggaaacttgaaacctgggcatggtggctcacgcctgtaatcccagcactttgggaggccaaggtgggcagatcactggaggtcaggagttcgaaaccagcctggccaacatggtgaaaccccatctctactaaaaatacagaaattagccggtcatggtggtggacacctgtaatcccagctactcaggtggctaaggcaggagaatcacttcagcccgggaggtggaggttgcagtgagccaagatcataccacggcactccagcctgggtgacagtgagactgtggctcaaaaaaaaaaaaaaaaaaaggaaaatgaaactaggaaaggtttcttaaagtctgagatatatttgctagatttctaaagaatgtgttctaaaacagcagaagattttcaagaaccggtttccaaagacagtcttctaattcctcattagtaataagtaaaatgtttattgttgtagctctggtatataatccattcctcttaaaatataagacctctggcatgaatatttcatatctataaaatgacagatcccaccaggaaggaagctgttgctttctttgaggtgatttttttcctttgctccctgttgctgaaaccatacagcttcataaataattttgcttgctgaaggaagaaaaagtgtttttcataaacccattatccaggactgtttatagctgttggaaggactaggtcttccctagcccccccagtgtgcaagggcagtgaagacttgattgtacaaaatacgttttgtaaatgttgtgctgttaacactgcaaataaacttggtagcaaacacttccaacatgaatga

SEQ ID NO: 388537 - DNA, 7088 bp, Homo sapiens
aaaactgcgactgcgcggcgtgagctcgctgagacttcctggaccccgcaccaggctgtggggtttctcagataactgggcccctgcgctcaggaggccttcaccctctgctctgggtaaagttcattggaacagaaagaaatggatttatctgctcttcgcgttgaagaagtacaaaatgtcattaatgctatgcagaaaatcttagagtgtcccatctgtctggagttgatcaaggaacctgtctccacaaagtgtgaccacatattttgcaaattttgcatgctgaaacttctcaaccagaagaaagggccttcacagtgtcctttatgtaagaatgatataaccaaaaggagcctacaagaaagtacgagatttagtcaacttgttgaagagctattgaaaatcatttgtgcttttcagcttgacacaggtttggagtatgcaaacagctataattttgcaaaaaaggaaaataactctcctgaacatctaaaagatgaagtttctatcatccaaagtatgggctacagaaaccgtgccaaaagacttctacagagtgaacccgaaaatccttccttgcaggaaaccagtctcagtgtccaactctctaaccttggaactgtgagaactctgaggacaaagcagcggatacaacctcaaaagacgtctgtctacattgaattgggatctgattcttctgaagataccgttaataaggcaacttattgcagtgtgggagatcaagaattgttacaaatcacccctcaaggaaccagggatgaaatcagtttggattctgcaaaaaaggctgcttgtgaattttctgagacggatgtaacaaatactgaacatcatcaacccagtaataatgatttgaacaccactgagaagcgtgcagctgagaggcatccagaaaagtatcagggtagttctgtttcaaacttgcatgtggagccatgtggcacaaatactcatgccagctcattacagcatgagaacagcagtttattactcactaaagacagaatgaatgtagaaaaggctgaattctgtaataaaagcaaacagcctggcttagcaaggagccaacataacagatgggctggaagtaaggaaacatgtaatgataggcggactcccagcacagaaaaaaaggtagatctgaatgctgatcccctgtgtgagagaaaagaatggaataagcagaaactgccatgctcagagaatcctagagatactgaagatgttccttggataacactaaatagcagcattcagaaagttaatgagtggttttccagaagtgatgaactgttaggttctgatgactcacatgatggggagtctgaatcaaatgccaaagtagctgatgtattggacgttctaaatgaggtagatgaatattctggttcttcagagaaaatagacttactggccagtgatcctcatgaggctttaatatgtaaaagtgaaagagttcactccaaatcagtagagagtaatattgaagacaaaatatttgggaaaacctatcggaagaaggcaagcctccccaacttaagccatgtaactgaaaatctaattataggagcatttgttactgagccacagataatacaagagcgtcccctcacaaataaattaaagcgtaaaaggagacctacatcaggccttcatcctgaggattttatcaagaaagcagatttggcagttcaaaagactcctgaaatgataaatcagggaactaaccaaacggagcagaatggtcaagtgatgaatattactaatagtggtcatgagaataaaacaaaaggtgattctattcagaatgagaaaaatcctaacccaatagaatcactcgaaaaagaatctgctttcaaaacgaaagctgaacctataagcagcagtataagcaatatggaactcgaattaaatatccacaattcaaaagcacctaaaaagaataggctgaggaggaagtcttctaccaggcatattcatgcgcttgaactagtagtcagtagaaatctaagcccacctaattgtactgaattgcaaattgatagttgttctagcagtgaagagataaagaaaaaaaagtacaaccaaatgccagtcaggcacagcagaaacctacaactcatggaaggtaaagaacctgcaactggagccaagaagagtaacaagccaaatgaacagacaagtaaaagacatgacagcgatactttcccagagctgaagttaacaaatgcacctggttcttttactaagtgttcaaataccagtgaacttaaagaatttgtcaatcctagccttccaagagaagaaaaagaagagaaactagaaacagttaaagtgtctaataatgctgaagaccccaaagatctcatgttaagtggagaaagggttttgcaaactgaaagatctgtagagagtagcagtatttcattggtacctggtactgattatggcactcaggaaagtatctcgttactggaagttagcactctagggaaggcaaaaacagaaccaaataaatgtgtgagtcagtgtgcagcatttgaaaaccccaagggactaattcatggttgttccaaagataatagaaatgacacagaaggctttaagtatccattgggacatgaagttaaccacagtcgggaaacaagcatagaaatggaagaaagtgaacttgatgctcagtatttgcagaatacattcaaggtttcaaagcgccagtcatttgctccgttttcaaatccaggaaatgcagaagaggaatgtgcaacattctctgcccactctgggtccttaaagaaacaaagtccaaaagtcacttttgaatgtgaacaaaaggaagaaaatcaaggaaagaatgagtctaatatcaagcctgtacagacagttaatatcactgcaggctttcctgtggttggtcagaaagataagccagttgataatgccaaatgtagtatcaaaggaggctctaggttttgtctatcatctcagttcagaggcaacgaaactggactcattactccaaataaacatggacttttacaaaacccatatcgtataccaccactttttcccatcaagtcatttgttaaaactaaatgtaagaaaaatctgctagaggaaaactttgaggaacattcaatgtcacctgaaagagaaatgggaaatgagaacattccaagtacagtgagcacaattagccgtaataacattagagaaaatgtttttaaagaagccagctcaagcaatattaatgaagtaggttccagtactaatgaagtgggctccagtattaatgaaataggttccagtgatgaaaacattcaagcagaactaggtagaaacagagggccaaaattgaatgctatgcttagattaggggttttgcaacctgaggtctataaacaaagtcttcctggaagtaattgtaagcatcctgaaataaaaaagcaagaatatgaagaagtagttcagactgttaatacagatttctctccatatctgatttcagataacttagaacagcctatgggaagtagtcatgcatctcaggtttgttctgagacacctgatgacctgttagatgatggtgaaataaaggaagatactagttttgctgaaaatgacattaaggaaagttctgctgtttttagcaaaagcgtccagaaaggagagcttagcaggagtcctagccctttcacccatacacatttggctcagggttaccgaagaggggccaagaaattagagtcctcagaagagaacttatctagtgaggatgaagagcttccctgcttccaacacttgttatttggtaaagtaaacaatataccttctcagtctactaggcatagcaccgttgctaccgagtgtctgtctaagaacacagaggagaatttattatcattgaagaatagcttaaatgactgcagtaaccaggtaatattggcaaaggcatctcaggaacatcaccttagtgaggaaacaaaatgttctgctagcttgttttcttcacagtgcagtgaattggaagacttgactgcaaatacaaacacccaggatcctttcttgattggttcttccaaacaaatgaggcatcagtctgaaagccagggagttggtctgagtgacaaggaattggtttcagatgatgaagaaagaggaacgggcttggaagaaaataatcaagaagagcaaagcatggattcaaacttaggtgaagcagcatctgggtgtgagagtgaaacaagcgtctctgaagactgctcagggctatcctctcagagtgacattttaaccactcagcagagggataccatgcaacataacctgataaagctccagcaggaaatggctgaactagaagctgtgttagaacagcatgggagccagccttctaacagctacccttccatcataagtgactcttctgcccttgaggacctgcgaaatccagaacaaagcacatcagaaaaagcagtattaacttcacagaaaagtagtgaataccctataagccagaatccagaaggcctttctgctgacaagtttgaggtgtctgcagatagttctaccagtaaaaataaagaaccaggagtggaaaggtcatccccttctaaatgcccatcattagatgataggtggtacatgcacagttgctctgggagtcttcagaatagaaactacccatctcaagaggagctcattaaggttgttgatgtggaggagcaacagctggaagagtctgggccacacgatttgacggaaacatcttacttgccaaggcaagatctagagggaaccccttacctggaatctggaatcagcctcttctctgatgaccctgaatctgatccttctgaagacagagccccagagtcagctcgtgttggcaacataccatcttcaacctctgcattgaaagttccccaattgaaagttgcagaatctgcccagagtccagctgctgctcatactactgatactgctgggtataatgcaatggaagaaagtgtgagcagggagaagccagaattgacagcttcaacagaaagggtcaacaaaagaatgtccatggtggtgtctggcctgaccccagaagaatttatgctcgtgtacaagtttgccagaaaacaccacatcactttaactaatctaattactgaagagactactcatgttgttatgaaaacagatgctgagtttgtgtgtgaacggacactgaaatattttctaggaattgcgggaggaaaatgggtagttagctatttctgggtgacccagtctattaaagaaagaaaaatgctgaatgagaaaccaccaaggtccaaagcgagcaagagaatcccaggacagaaagatcttcagggggctagaaatctgttgctatgggcccttcaccaacatgcccacagatcaactggaatggatggtacagctgtgtggtgcttctgtggtgaaggagctttcatcattcacccttggcacaggtgtccacccaattgtggttgtgcagccagatgcctggacagaggacaatggcttccatgcaattgggcagatgtgtgaggcacctgtggtgacccgagagtgggtgttggacagtgtagcactctaccagtgccaggagctggacacctacctgataccccagatcccccacagccactactgactgcagccagccacaggtacagagccacaggaccccaagaatgagcttacaaagtggcctttccaggccctgggagctcctctcactcttcagtccttctactgtcctggctactaaatattttatgtacatcagcctgaaaaggacttctggctatgcaagggtcccttaaagattttctgcttgaagtctcccttggaaatctgccatgagcacaaaattatggtaatttttcacctgagaagattttaaaaccatttaaacgccaccaattgagcaagatgctgattcattatttatcagccctattctttctattcaggctgttgttggcttagggctggaagcacagagtggcttggcctcaagagaatagctggtttccctaagtttacttctctaaaaccctgtgttcacaaaggcagagagtcagacccttcaatggaaggagagtgcttgggatcgattatgtgacttaaagtcagaatagtccttgggcagttctcaaatgttggagtggaacattggggaggaaattctgaggcaggtattagaaatgaaaaggaaacttgaaacctgggcatggtggctcacgcctgtaatcccagcactttgggaggccaaggtgggcagatcactggaggtcaggagttcgaaaccagcctggccaacatggtgaaaccccatctctactaaaaatacagaaattagccggtcatggtggtggacacctgtaatcccagctactcaggtggctaaggcaggagaatcacttcagcccgggaggtggaggttgcagtgagccaagatcataccacggcactccagcctgggtgacagtgagactgtggctcaaaaaaaaaaaaaaaaaaaggaaaatgaaactaggaaaggtttcttaaagtctgagatatatttgctagatttctaaagaatgtgttctaaaacagcagaagattttcaagaaccggtttccaaagacagtcttctaattcctcattagtaataagtaaaatgtttattgttgtagctctggtatataatccattcctcttaaaatataagacctctggcatgaatatttcatatctataaaatgacagatcccaccaggaaggaagctgttgctttctttgaggtgatttttttcctttgctccctgttgctgaaaccatacagcttcataaataattttgcttgctgaaggaagaaaaagtgtttttcataaacccattatccaggactgtttatagctgttggaaggactaggtcttccctagcccccccagtgtgcaagggcagtgaagacttgattgtacaaaatacgttttgtaaatgttgtgctgttaacactgcaaataaacttggtagcaaacacttccaacatgaatga

SEQ ID NO: 388538 - DNA, 5077 bp, Homo sapiens
aaaactgcgactgcgcggcgtgagctcgctgagacttcctggaccccgcaccaggctgtggggtttctcagataactgggcccctgcgctcaggaggccttcaccctctgctctgggtaaagttcattggaacagaaagaaatggatttatctgctcttcgcgttgaagaagtacaaaatgtcattaatgctatgcagaaaatcttagagtgtcccatctgtctggagttgatcaaggaacctgtctccacaaagtgtgaccacatattttgcaaattttgcatgctgaaacttctcaaccagaagaaagggccttcacagtgtcctttatgtaagaatgatataaccaaaaggagcctacaagaaagtacgagatttagtcaacttgttgaagagctattgaaaatcatttgtgcttttcagcttgacacaggtttggagtatgcaaacagctataattttgcaaaaaaggaaaataactctcctgaacatctaaaagatgaagtttctatcatccaaagtatgggctacagaaaccgtgccaaaagacttctacagagtgaacccgaaaatccttccttgcaggaaaccagtctcagtgtccaactctctaaccttggaactgtgagaactctgaggacaaagcagcggatacaacctcaaaagacgtctgtctacattgaattgggatctgattcttctgaagataccgttaataaggcaacttattgcagtgtgggagatcaagaattgttacaaatcacccctcaaggaaccagggatgaaatcagtttggattctgcaaaaaaggctgcttgtgaattttctgagacggatgtaacaaatactgaacatcatcaacccagtaataatgatttgaacaccactgagaagcgtgcagctgagaggcatccagaaaagtatcagggtagttctgtttcaaacttgcatgtggagccatgtggcacaaatactcatgccagctcattacagcatgagaacagcagtttattactcactaaagacagaatgaatgtagaaaaggctgaattctgtaataaaagcaaacagcctggcttagcaaggagccaacataacagatgggctggaagtaaggaaacatgtaatgataggcggactcccagcacagaaaaaaaggtagatctgaatgctgatcccctgtgtgagagaaaagaatggaataagcagaaactgccatgctcagagaatcctagagatactgaagatgttccttggataacactaaatagcagcattcagaaagttaatgagtggttttccagaagtgatgaactgttaggttctgatgactcacatgatggggagtctgaatcaaatgccaaagtagctgatgtattggacgttctaaatgaggtagatgaatattctggttcttcagagaaaatagacttactggccagtgatcctcatgaggctttaatatgtaaaagtgaaagagttcactccaaatcagtagagagtaatattgaagacaaaatatttgggaaaacctatcggaagaaggcaagcctccccaacttaagccatgtaactgaaaatctaattataggagcatttgttactgagccacagataatacaagagcgtcccctcacaaataaattaaagcgtaaaaggagacctacatcaggccttcatcctgaggattttatcaagaaagcagatttggcagttcaaaagactcctgaaatgataaatcagggaactaaccaaacggagcagaatggtcaagtgatgaatattactaatagtggtcatgagaataaaacaaaaggtgattctattcagaatgagaaaaatcctaacccaatagaatcactcgaaaaagaatctgctttcaaaacgaaagctgaacctataagcagcagtataagcaatatggaactcgaattaaatatccacaattcaaaagcacctaaaaagaataggctgaggaggaagtcttctaccaggcatattcatgcgcttgaactagtagtcagtagaaatctaagcccacctaattgtactgaattgcaaattgatagttgttctagcagtgaagagataaagaaaaaaaagtacaaccaaatgccagtcaggcacagcagaaacctacaactcatggaaggtaaagaacctgcaactggagccaagaagagtaacaagccaaatgaacagacaagtaaaagacatgacagcgatactttcccagagctgaagttaacaaatgcacctggttcttttactaagtgttcaaataccagtgaacttaaagaatttgtcaatcctagccttccaagagaagaaaaagaagagaaactagaaacagttaaagtgtctaataatgctgaagaccccaaagatctcatgttaagtggagaaagggttttgcaaactgaaagatctgtagagagtagcagtatttcattggtacctggtactgattatggcactcaggaaagtatctcgttactggaagttagcactctagggaaggcaaaaacagaaccaaataaatgtgtgagtcagtgtgcagcatttgaaaaccccaagggactaattcatggttgttccaaagataatagaaatgacacagaaggctttaagtatccattgggacatgaagttaaccacagtcgggaaacaagcatagaaatggaagaaagtgaacttgatgctcagtatttgcagaatacattcaaggtttcaaagcgccagtcatttgctccgttttcaaatccaggaaatgcagaagaggaatgtgcaacattctctgcccactctgggtccttaaagaaacaaagtccaaaagtcacttttgaatgtgaacaaaaggaagaaaatcaaggaaagaatgagtctaatatcaagcctgtacagacagttaatatcactgcaggctttcctgtggttggtcagaaagataagccagttgataatgccaaatgtagtatcaaaggaggctctaggttttgtctatcatctcagttcagaggcaacgaaactggactcattactccaaataaacatggacttttacaaaacccatatcgtataccaccactttttcccatcaagtcatttgttaaaactaaatgtaagaaaaatctgctagaggaaaactttgaggaacattcaatgtcacctgaaagagaaatgggaaatgagaacattccaagtacagtgagcacaattagccgtaataacattagagaaaatgtttttaaagaagccagctcaagcaatattaatgaagtaggttccagtactaatgaagtgggctccagtattaatgaaataggttccagtgatgaaaacattcaagcagaactaggtagaaacagagggccaaaattgaatgctatgcttagattaggggttttgcaacctgaggtctataaacaaagtcttcctggaagtaattgtaagcatcctgaaataaaaaagcaagaatatgaagaagtagttcagactgttaatacagatttctctccatatctgatttcagataacttagaacagcctatgggaagtagtcatgcatctcaggtttgttctgagacacctgatgacctgttagatgatggtgaaataaaggaagatactagttttgctgaaaatgacattaaggaaagttctgctgtttttagcaaaagcgtccagaaaggagagcttagcaggagtcctagccctttcacccatacacatttggctcagggttaccgaagaggggccaagaaattagagtcctcagaagagaacttatctagtgaggatgaagagcttccctgcttccaacacttgttatttggtaaagtaaacaatataccttctcagtctactaggcatagcaccgttgctaccgagtgtctgtctaagaacacagaggagaatttattatcattgaagaatagcttaaatgactgcagtaaccaggtaatattggcaaaggcatctcaggaacatcaccttagtgaggaaacaaaatgttctgctagcttgttttcttcacagtgcagtgaattggaagacttgactgcaaatacaaacacccaggatcctttcttgattggttcttccaaacaaatgaggcatcagtctgaaagccagggagttggtctgagtgacaaggaattggtttcagatgatgaagaaagaggaacgggcttggaagaaaataatcaagaagagcaaagcatggattcaaacttaggtgaagcagcatctgggtgtgagagtgaaacaagcgtctctgaagactgctcagggctatcctctcagagtgacattttaaccactcagcagagggataccatgcaacataacctgataaagctccagcaggaaatggctgaactagaagctgtgttagaacagcatgggagccagccttctaacagctacccttccatcataagtgactcttctgcccttgaggacctgcgaaatccagaacaaagcacatcagaaaaaggtgtgtattgttggccaaacactgatatcttaagcaaaattctttccttcccctttatctccttctgaagagtaaggacctagctccaacattttatgatccttgctcagcacatgggtaattatggagccttggttcttgtccctgctcacaactaatataccagtcagagggacccaaggcagtcattcatgttgtcatctgagtacctacaacaagtagatgctatggggagcccatggaagatacatggtatacaacatagctcttgctctattggaagctaagtggaatgggagaaattggtgacaggcaaccccataatttcagaaagctatgaaaaagtactcagacatattccttataacactggtgtcacatcacaaagacctatttaatgtgcttctgatttatagggagagacatcctatacttcaggaactgcactttgatccacagaaagcctagtgatgtagagctcctgttagttcaaaaggaaaagaaaagaacaacacagaaagcctaattatgcaatagagtcaagtgctttatagcaatgttacagttatcaaaaaaaaa

SEQ ID NO: 388539 - DNA, 413 bp, Homo sapiens
tgatgctgagtctgagttaccaaaaggtctttaattgtaatactaaactacttttatctttaatatcactttgttcagataagctggtgatgctgggaaaatgggtctcttttataactaataggacctaatctgctcctagcaatgttagcatatgagctagggatttatttaatagtcggcaggaatccatgtgcagcaggcaaacttataatgtttaaattaaacatcaactctgtctccagaaggaaactgctgctacaagccttattaaagggctgtggctttagagggaaggacctctcctctgtcattcttcctgtgctcttttgtgaatcgctgacctctctatctccgtgaaaagagcacgttcttctgctgtatgtaacctgtcttttctatgatctctttag

SEQ ID NO: 388540 - DNA, 346 bp, Homo sapiens
gcgtgagccaccgcgcccagccgagacttcaggtgtcttagaattttttaaatgtaccctttctgagaaaaacagagacttaaagctaggataactggtattctattttttttttttttttttttttttacctccagcctgggtgacagagcaagactctgtctaaaaaaaaaaaaaaaaaaattcactttaaatagttccaggacacgtgtagaacgtgcaggattgctacataggtaaacatatgccatggtggaataactagtattctgagctgtgtgctagaggtaactcatgataatggaatatttgatttaatttcagatgctcgtgtacaagtttgcca

SEQ ID NO: 388541 - DNA, 7126 bp, Homo sapiens
aaaactgcgactgcgcggcgtgagctcgctgagacttcctggaccccgcaccaggctgtggggtttctcagataactgggcccctgcgctcaggaggccttcaccctctgctctgggtaaagttcattggaacagaaagaaatggatttatctgctcttcgcgttgaagaagtacaaaatgtcattaatgctatgcagaaaatcttagagtgtcccatctgtctggagttgatcaaggaacctgtctccacaaagtgtgaccacatattttgcaaattttgcatgctgaaacttctcaaccagaagaaagggccttcacagtgtcctttatgtaagaatgatataaccaaaaggagcctacaagaaagtacgagatttagtcaacttgttgaagagctattgaaaatcatttgtgcttttcagcttgacacaggtttggagtatgcaaacagctataattttgcaaaaaaggaaaataactctcctgaacatctaaaagatgaagtttctatcatccaaagtatgggctacagaaaccgtgccaaaagacttctacagagtgaacccgaaaatccttccttgcaggaaaccagtctcagtgtccaactctctaaccttggaactgtgagaactctgaggacaaagcagcggatacaacctcaaaagacgtctgtctacattgaattgggatctgattcttctgaagataccgttaataaggcaacttattgcagtgtgggagatcaagaattgttacaaatcacccctcaaggaaccagggatgaaatcagtttggattctgcaaaaaaggctgcttgtgaattttctgagacggatgtaacaaatactgaacatcatcaacccagtaataatgatttgaacaccactgagaagcgtgcagctgagaggcatccagaaaagtatcagggtagttctgtttcaaacttgcatgtggagccatgtggcacaaatactcatgccagctcattacagcatgagaacagcagtttattactcactaaagacagaatgaatgtagaaaaggctgaattctgtaataaaagcaaacagcctggcttagcaaggagccaacataacagatgggctggaagtaaggaaacatgtaatgataggcggactcccagcacagaaaaaaaggtagatctgaatgctgatcccctgtgtgagagaaaagaatggaataagcagaaactgccatgctcagagaatcctagagatactgaagatgttccttggataacactaaatagcagcattcagaaagttaatgagtggttttccagaagtgatgaactgttaggttctgatgactcacatgatggggagtctgaatcaaatgccaaagtagctgatgtattggacgttctaaatgaggtagatgaatattctggttcttcagagaaaatagacttactggccagtgatcctcatgaggctttaatatgtaaaagtgaaagagttcactccaaatcagtagagagtaatattgaagacaaaatatttgggaaaacctatcggaagaaggcaagcctccccaacttaagccatgtaactgaaaatctaattataggagcatttgttactgagccacagataatacaagagcgtcccctcacaaataaattaaagcgtaaaaggagacctacatcaggccttcatcctgaggattttatcaagaaagcagatttggcagttcaaaagactcctgaaatgataaatcagggaactaaccaaacggagcagaatggtcaagtgatgaatattactaatagtggtcatgagaataaaacaaaaggtgattctattcagaatgagaaaaatcctaacccaatagaatcactcgaaaaagaatctgctttcaaaacgaaagctgaacctataagcagcagtataagcaatatggaactcgaattaaatatccacaattcaaaagcacctaaaaagaataggctgaggaggaagtcttctaccaggcatattcatgcgcttgaactagtagtcagtagaaatctaagcccacctaattgtactgaattgcaaattgatagttgttctagcagtgaagagataaagaaaaaaaagtacaaccaaatgccagtcaggcacagcagaaacctacaactcatggaaggtaaagaacctgcaactggagccaagaagagtaacaagccaaatgaacagacaagtaaaagacatgacagcgatactttcccagagctgaagttaacaaatgcacctggttcttttactaagtgttcaaataccagtgaacttaaagaatttgtcaatcctagccttccaagagaagaaaaagaagagaaactagaaacagttaaagtgtctaataatgctgaagaccccaaagatctcatgttaagtggagaaagggttttgcaaactgaaagatctgtagagagtagcagtatttcattggtacctggtactgattatggcactcaggaaagtatctcgttactggaagttagcactctagggaaggcaaaaacagaaccaaataaatgtgtgagtcagtgtgcagcatttgaaaaccccaagggactaattcatggttgttccaaagataatagaaatgacacagaaggctttaagtatccattgggacatgaagttaaccacagtcgggaaacaagcatagaaatggaagaaagtgaacttgatgctcagtatttgcagaatacattcaaggtttcaaagcgccagtcatttgctccgttttcaaatccaggaaatgcagaagaggaatgtgcaacattctctgcccactctgggtccttaaagaaacaaagtccaaaagtcacttttgaatgtgaacaaaaggaagaaaatcaaggaaagaatgagtctaatatcaagcctgtacagacagttaatatcactgcaggctttcctgtggttggtcagaaagataagccagttgataatgccaaatgtagtatcaaaggaggctctaggttttgtctatcatctcagttcagaggcaacgaaactggactcattactccaaataaacatggacttttacaaaacccatatcgtataccaccactttttcccatcaagtcatttgttaaaactaaatgtaagaaaaatctgctagaggaaaactttgaggaacattcaatgtcacctgaaagagaaatgggaaatgagaacattccaagtacagtgagcacaattagccgtaataacattagagaaaatgtttttaaagaagccagctcaagcaatattaatgaagtaggttccagtactaatgaagtgggctccagtattaatgaaataggttccagtgatgaaaacattcaagcagaactaggtagaaacagagggccaaaattgaatgctatgcttagattaggggttttgcaacctgaggtctataaacaaagtcttcctggaagtaattgtaagcatcctgaaataaaaaagcaagaatatgaagaagtagttcagactgttaatacagatttctctccatatctgatttcagataacttagaacagcctatgggaagtagtcatgcatctcaggtttgttctgagacacctgatgacctgttagatgatggtgaaataaaggaagatactagttttgctgaaaatgacattaaggaaagttctgctgtttttagcaaaagcgtccagaaaggagagcttagcaggagtcctagccctttcacccatacacatttggctcagggttaccgaagaggggccaagaaattagagtcctcagaagagaacttatctagtgaggatgaagagcttccctgcttccaacacttgttatttggtaaagtaaacaatataccttctcagtctactaggcatagcaccgttgctaccgagtgtctgtctaagaacacagaggagaatttattatcattgaagaatagcttaaatgactgcagtaaccaggtaatattggcaaaggcatctcaggaacatcaccttagtgaggaaacaaaatgttctgctagcttgttttcttcacagtgcagtgaattggaagacttgactgcaaatacaaacacccaggatcctttcttgattggttcttccaaacaaatgaggcatcagtctgaaagccagggagttggtctgagtgacaaggaattggtttcagatgatgaagaaagaggaacgggcttggaagaaaataatcaagaagagcaaagcatggattcaaacttaggtgaagcagcatctgggtgtgagagtgaaacaagcgtctctgaagactgctcagggctatcctctcagagtgacattttaaccactcagcagagggataccatgcaacataacctgataaagctccagcaggaaatggctgaactagaagctgtgttagaacagcatgggagccagccttctaacagctacccttccatcataagtgactcttctgcccttgaggacctgcgaaatccagaacaaagcacatcagaaaaagcagtattaacttcacagaaaagtagtgaataccctataagccagaatccagaaggcctttctgctgacaagtttgaggtgtctgcagatagttctaccagtaaaaataaagaaccaggagtggaaaggtcatccccttctaaatgcccatcattagatgataggtggtacatgcacagttgctctgggagtcttcagaatagaaactacccatctcaagaggagctcattaaggttgttgatgtggaggagcaacagctggaagagtctgggccacacgatttgacggaaacatcttacttgccaaggcaagatctagagggaaccccttacctggaatctggaatcagcctcttctctgatgaccctgaatctgatccttctgaagacagagccccagagtcagctcgtgttggcaacataccatcttcaacctctgcattgaaagttccccaattgaaagttgcagaatctgcccagagtccagctgctgctcatactactgatactgctgggtataatgcaatggaagaaagtgtgagcagggagaagccagaattgacagcttcaacagaaagggtcaacaaaagaatgtccatggtggtgtctggcctgaccccagaagaatttatgctcgtgtacaagtttgccagaaaacaccacatcactttaactaatctaattactgaagagactactcatgttgttatgaaaacagatgctgagtttgtgtgtgaacggacactgaaatattttctaggaattgcgggaggaaaatgggtagttagctatttctgggtgacccagtctattaaagaaagaaaaatgctgaatgagcatgattttgaagtcagaggagatgtggtcaatggaagaaaccaccaaggtccaaagcgagcaagagaatcccaggacagaaagatcttcagggggctagaaatctgttgctatgggcccttcaccaacatgcccacagatcaactggaatggatggtacagctgtgtggtgcttctgtggtgaaggagctttcatcattcacccttggcacaggtgtccacccaattgtggttgtgcagccagatgcctggacagaggacaatggcttccatgcaattgggcagatgtgtgaggcacctgtggtgacccgagagtgggtgttggacagtgtagcactctaccagtgccaggagctggacacctacctgataccccagatcccccacagccactactgactgcagccagccacaggtacagagccacaggaccccaagaatgagcttacaaagtggcctttccaggccctgggagctcctctcactcttcagtccttctactgtcctggctactaaatattttatgtacatcagcctgaaaaggacttctggctatgcaagggtcccttaaagattttctgcttgaagtctcccttggaaatctgccatgagcacaaaattatggtaatttttcacctgagaagattttaaaaccatttaaacgccaccaattgagcaagatgctgattcattatttatcagccctattctttctattcaggctgttgttggcttagggctggaagcacagagtggcttggcctcaagagaatagctggtttccctaagtttacttctctaaaaccctgtgttcacaaaggcagagagtcagacccttcaatggaaggagagtgcttgggatcgattatgtgacttaaagtcagaatagtccttgggcagttctcaaatgttggagtggaacattggggaggaaattctgaggcaggtattagaaatgaaaaggaaacttgaaacctgggcatggtggctcacgcctgtaatcccagcactttgggaggccaaggtgggcagatcactggaggtcaggagttcgaaaccagcctggccaacatggtgaaaccccatctctactaaaaatacagaaattagccggtcatggtggtggacacctgtaatcccagctactcaggtggctaaggcaggagaatcacttcagcccgggaggtggaggttgcagtgagccaagatcataccacggcactccagcctgggtgacagtgagactgtggctcaaaaaaaaaaaaaaaaaaaggaaaatgaaactaggaaaggtttcttaaagtctgagatatatttgctagatttctaaagaatgtgttctaaaacagcagaagattttcaagaaccggtttccaaagacagtcttctaattcctcattagtaataagtaaaatgtttattgttgtagctctggtatataatccattcctcttaaaatataagacctctggcatgaatatttcatatctataaaatgacagatcccaccaggaaggaagctgttgctttctttgaggtgatttttttcctttgctccctgttgctgaaaccatacagcttcataaataattttgcttgctgaaggaagaaaaagtgtttttcataaacccattatccaggactgtttatagctgttggaaggactaggtcttccctagcccccccagtgtgcaagggcagtgaagacttgattgtacaaaatacgttttgtaaatgttgtgctgttaacactgcaaataaacttggtagcaaacacttccaacatgaatga

SEQ ID NO: 388542 - DNA, 7003 bp, Homo sapiens
aaaactgcgactgcgcggcgtgagctcgctgagacttcctggaccccgcaccaggctgtggggtttctcagataactgggcccctgcgctcaggaggccttcaccctctgctctgggtaaagttcattggaacagaaagaaatggatttatctgctcttcgcgttgaagaagtacaaaatgtcattaatgctatgcagaaaatcttagagtgtcccatctgtctggagttgatcaaggaacctgtctccacaaagtgtgaccacatattttgcaaattttgcatgctgaaacttctcaaccagaagaaagggccttcacagtgtcctttatgtaagaatgatataaccaaaaggagcctacaagaaagtacgagatttagtcaacttgttgaagagctattgaaaatcatttgtgcttttcagcttgacacaggtttggagtatgcaaacagctataattttgcaaaaaaggaaaataactctcctgaacatctaaaagatgaagtttctatcatccaaagtatgggctacagaaaccgtgccaaaagacttctacagagtgaacccgaaaatccttccttgcaggaaaccagtctcagtgtccaactctctaaccttggaactgtgagaactctgaggacaaagcagcggatacaacctcaaaagacgtctgtctacattgaattggctgcttgtgaattttctgagacggatgtaacaaatactgaacatcatcaacccagtaataatgatttgaacaccactgagaagcgtgcagctgagaggcatccagaaaagtatcagggtagttctgtttcaaacttgcatgtggagccatgtggcacaaatactcatgccagctcattacagcatgagaacagcagtttattactcactaaagacagaatgaatgtagaaaaggctgaattctgtaataaaagcaaacagcctggcttagcaaggagccaacataacagatgggctggaagtaaggaaacatgtaatgataggcggactcccagcacagaaaaaaaggtagatctgaatgctgatcccctgtgtgagagaaaagaatggaataagcagaaactgccatgctcagagaatcctagagatactgaagatgttccttggataacactaaatagcagcattcagaaagttaatgagtggttttccagaagtgatgaactgttaggttctgatgactcacatgatggggagtctgaatcaaatgccaaagtagctgatgtattggacgttctaaatgaggtagatgaatattctggttcttcagagaaaatagacttactggccagtgatcctcatgaggctttaatatgtaaaagtgaaagagttcactccaaatcagtagagagtaatattgaagacaaaatatttgggaaaacctatcggaagaaggcaagcctccccaacttaagccatgtaactgaaaatctaattataggagcatttgttactgagccacagataatacaagagcgtcccctcacaaataaattaaagcgtaaaaggagacctacatcaggccttcatcctgaggattttatcaagaaagcagatttggcagttcaaaagactcctgaaatgataaatcagggaactaaccaaacggagcagaatggtcaagtgatgaatattactaatagtggtcatgagaataaaacaaaaggtgattctattcagaatgagaaaaatcctaacccaatagaatcactcgaaaaagaatctgctttcaaaacgaaagctgaacctataagcagcagtataagcaatatggaactcgaattaaatatccacaattcaaaagcacctaaaaagaataggctgaggaggaagtcttctaccaggcatattcatgcgcttgaactagtagtcagtagaaatctaagcccacctaattgtactgaattgcaaattgatagttgttctagcagtgaagagataaagaaaaaaaagtacaaccaaatgccagtcaggcacagcagaaacctacaactcatggaaggtaaagaacctgcaactggagccaagaagagtaacaagccaaatgaacagacaagtaaaagacatgacagcgatactttcccagagctgaagttaacaaatgcacctggttcttttactaagtgttcaaataccagtgaacttaaagaatttgtcaatcctagccttccaagagaagaaaaagaagagaaactagaaacagttaaagtgtctaataatgctgaagaccccaaagatctcatgttaagtggagaaagggttttgcaaactgaaagatctgtagagagtagcagtatttcattggtacctggtactgattatggcactcaggaaagtatctcgttactggaagttagcactctagggaaggcaaaaacagaaccaaataaatgtgtgagtcagtgtgcagcatttgaaaaccccaagggactaattcatggttgttccaaagataatagaaatgacacagaaggctttaagtatccattgggacatgaagttaaccacagtcgggaaacaagcatagaaatggaagaaagtgaacttgatgctcagtatttgcagaatacattcaaggtttcaaagcgccagtcatttgctccgttttcaaatccaggaaatgcagaagaggaatgtgcaacattctctgcccactctgggtccttaaagaaacaaagtccaaaagtcacttttgaatgtgaacaaaaggaagaaaatcaaggaaagaatgagtctaatatcaagcctgtacagacagttaatatcactgcaggctttcctgtggttggtcagaaagataagccagttgataatgccaaatgtagtatcaaaggaggctctaggttttgtctatcatctcagttcagaggcaacgaaactggactcattactccaaataaacatggacttttacaaaacccatatcgtataccaccactttttcccatcaagtcatttgttaaaactaaatgtaagaaaaatctgctagaggaaaactttgaggaacattcaatgtcacctgaaagagaaatgggaaatgagaacattccaagtacagtgagcacaattagccgtaataacattagagaaaatgtttttaaagaagccagctcaagcaatattaatgaagtaggttccagtactaatgaagtgggctccagtattaatgaaataggttccagtgatgaaaacattcaagcagaactaggtagaaacagagggccaaaattgaatgctatgcttagattaggggttttgcaacctgaggtctataaacaaagtcttcctggaagtaattgtaagcatcctgaaataaaaaagcaagaatatgaagaagtagttcagactgttaatacagatttctctccatatctgatttcagataacttagaacagcctatgggaagtagtcatgcatctcaggtttgttctgagacacctgatgacctgttagatgatggtgaaataaaggaagatactagttttgctgaaaatgacattaaggaaagttctgctgtttttagcaaaagcgtccagaaaggagagcttagcaggagtcctagccctttcacccatacacatttggctcagggttaccgaagaggggccaagaaattagagtcctcagaagagaacttatctagtgaggatgaagagcttccctgcttccaacacttgttatttggtaaagtaaacaatataccttctcagtctactaggcatagcaccgttgctaccgagtgtctgtctaagaacacagaggagaatttattatcattgaagaatagcttaaatgactgcagtaaccaggtaatattggcaaaggcatctcaggaacatcaccttagtgaggaaacaaaatgttctgctagcttgttttcttcacagtgcagtgaattggaagacttgactgcaaatacaaacacccaggatcctttcttgattggttcttccaaacaaatgaggcatcagtctgaaagccagggagttggtctgagtgacaaggaattggtttcagatgatgaagaaagaggaacgggcttggaagaaaataatcaagaagagcaaagcatggattcaaacttaggtgaagcagcatctgggtgtgagagtgaaacaagcgtctctgaagactgctcagggctatcctctcagagtgacattttaaccactcagcagagggataccatgcaacataacctgataaagctccagcaggaaatggctgaactagaagctgtgttagaacagcatgggagccagccttctaacagctacccttccatcataagtgactcttctgcccttgaggacctgcgaaatccagaacaaagcacatcagaaaaagcagtattaacttcacagaaaagtagtgaataccctataagccagaatccagaaggcctttctgctgacaagtttgaggtgtctgcagatagttctaccagtaaaaataaagaaccaggagtggaaaggtcatccccttctaaatgcccatcattagatgataggtggtacatgcacagttgctctgggagtcttcagaatagaaactacccatctcaagaggagctcattaaggttgttgatgtggaggagcaacagctggaagagtctgggccacacgatttgacggaaacatcttacttgccaaggcaagatctagagggaaccccttacctggaatctggaatcagcctcttctctgatgaccctgaatctgatccttctgaagacagagccccagagtcagctcgtgttggcaacataccatcttcaacctctgcattgaaagttccccaattgaaagttgcagaatctgcccagagtccagctgctgctcatactactgatactgctgggtataatgcaatggaagaaagtgtgagcagggagaagccagaattgacagcttcaacagaaagggtcaacaaaagaatgtccatggtggtgtctggcctgaccccagaagaatttatgctcgtgtacaagtttgccagaaaacaccacatcactttaactaatctaattactgaagagactactcatgttgttatgaaaacagatgctgagtttgtgtgtgaacggacactgaaatattttctaggaattgcgggaggaaaatgggtagttagctatttctgggtgacccagtctattaaagaaagaaaaatgctgaatgagcatgattttgaagtcagaggagatgtggtcaatggaagaaaccaccaaggtccaaagcgagcaagagaatcccaggacagaaagatcttcagggggctagaaatctgttgctatgggcccttcaccaacatgcccacagatcaactggaatggatggtacagctgtgtggtgcttctgtggtgaaggagctttcatcattcacccttggcacaggtgtccacccaattgtggttgtgcagccagatgcctggacagaggacaatggcttccatgcaattgggcagatgtgtgaggcacctgtggtgacccgagagtgggtgttggacagtgtagcactctaccagtgccaggagctggacacctacctgataccccagatcccccacagccactactgactgcagccagccacaggtacagagccacaggaccccaagaatgagcttacaaagtggcctttccaggccctgggagctcctctcactcttcagtccttctactgtcctggctactaaatattttatgtacatcagcctgaaaaggacttctggctatgcaagggtcccttaaagattttctgcttgaagtctcccttggaaatctgccatgagcacaaaattatggtaatttttcacctgagaagattttaaaaccatttaaacgccaccaattgagcaagatgctgattcattatttatcagccctattctttctattcaggctgttgttggcttagggctggaagcacagagtggcttggcctcaagagaatagctggtttccctaagtttacttctctaaaaccctgtgttcacaaaggcagagagtcagacccttcaatggaaggagagtgcttgggatcgattatgtgacttaaagtcagaatagtccttgggcagttctcaaatgttggagtggaacattggggaggaaattctgaggcaggtattagaaatgaaaaggaaacttgaaacctgggcatggtggctcacgcctgtaatcccagcactttgggaggccaaggtgggcagatcactggaggtcaggagttcgaaaccagcctggccaacatggtgaaaccccatctctactaaaaatacagaaattagccggtcatggtggtggacacctgtaatcccagctactcaggtggctaaggcaggagaatcacttcagcccgggaggtggaggttgcagtgagccaagatcataccacggcactccagcctgggtgacagtgagactgtggctcaaaaaaaaaaaaaaaaaaaggaaaatgaaactaggaaaggtttcttaaagtctgagatatatttgctagatttctaaagaatgtgttctaaaacagcagaagattttcaagaaccggtttccaaagacagtcttctaattcctcattagtaataagtaaaatgtttattgttgtagctctggtatataatccattcctcttaaaatataagacctctggcatgaatatttcatatctataaaatgacagatcccaccaggaaggaagctgttgctttctttgaggtgatttttttcctttgctccctgttgctgaaaccatacagcttcataaataattttgcttgctgaaggaagaaaaagtgtttttcataaacccattatccaggactgtttatagctgttggaaggactaggtcttccctagcccccccagtgtgcaagggcagtgaagacttgattgtacaaaatacgttttgtaaatgttgtgctgttaacactgcaaataaacttggtagcaaacacttccaacatgaatga

SEQ ID NO: 388543 - DNA, 6409 bp, Homo sapiens
aaaactgcgactgcgcggcgtgagctcgctgagacttcctggaccccgcaccaggctgtggggtttctcagataactgggcccctgcgctcaggaggccttcaccctctgctctgggtaaagttcattggaacagaaagaaatggatttatctgctcttcgcgttgaagaagtacaaaatgtcattaatgctatgcagaaaatcttagagtgtcccatctgtctggagttgatcaaggaacctgtctccacaaagtgtgaccacatattttgcaaattttgcatgctgaaacttctcaaccagaagaaagggccttcacagtgtcctttatgtaagaatgatataaccaaaaggagcctacaagaaagtacgagatttagtcaacttgttgaagagctattgaaaatcatttgtgcttttcagcttgacacaggtttggagtatgcaaacagctataattttgcaaaaaaggaaaataactctcctgaacatctaaaagatgaagtttctatcatccaaagtatgggctacagaaaccgtgccaaaagacttctacagagtgaacccgaaaatccttccttgcaggaaaccagtctcagtgtccaactctctaaccttggaactgtgagaactctgaggacaaagcagcggatacaacctcaaaagacgtctgtctacattgaattgggatctgattcttctgaagataccgttaataaggcaacttattgcagtgtgggagatcaagaattgttacaaatcacccctcaaggaaccagggatgaaatcagtttggattctgcaaaaaaggctgcttgtgaattttctgagacggatgtaacaaatactgaacatcatcaacccagtaataatgatttgaacaccactgagaagcgtgcagctgagaggcatccagaaaagtatcagggtagttctgtttcaaacttgcatgtggagccatgtggcacaaatactcatgccagctcattacagcatgagaacagcagtttattactcactaaagacagaatgaatgtagaaaaggctgaattctgtaataaaagcaaacagcctggcttagcaaggagccaacataacagatgggctggaagtaaggaaacatgtaatgataggcggactcccagcacagaaaaaaaggtagatctgaatgctgatcccctgtgtgagagaaaagaatggaataagcagaaactgccatgctcagagaatcctagagatactgaagatgttccttggataacactaaatagcagcattcagaaagttaatgagtggttttccagaagtgatgaactgttaggttctgatgactcacatgatggggagtctgaatcaaatgccaaagtagctgatgtattggacgttctaaatgaggtagatgaatattctggttcttcagagaaaatagacttactggccagtgatcctcatgaggctttaatatgtaaaagtgaaagagttcactccaaatcagtagagagtaatattgaagacaaaatatttgggaaaacctatcggaagaaggcaagcctccccaacttaagccatgtaactgaaaatctaattataggagcatttgttactgagccacagataatacaagagcgtcccctcacaaataaattaaagcgtaaaaggagacctacatcaggccttcatcctgaggattttatcaagaaagcagatttggcagttcaaaagactcctgaaatgataaatcagggaactaaccaaacggagcagaatggtcaagtgatgaatattactaatagtggtcatgagaataaaacaaaaggtgattctattcagaatgagaaaaatcctaacccaatagaatcactcgaaaaagaatctgctttcaaaacgaaagctgaacctataagcagcagtataagcaatatggaactcgaattaaatatccacaattcaaaagcacctaaaaagaataggctgaggaggaagtcttctaccaggcatattcatgcgcttgaactagtagtcagtagaaatctaagcccacctaattgtactgaattgcaaattgatagttgttctagcagtgaagagataaagaaaaaaaagtacaaccaaatgccagtcaggcacagcagaaacctacaactcatggaaggtaaagaacctgcaactggagccaagaagagtaacaagccaaatgaacagacaagtaaaagacatgacagcgatactttcccagagctgaagttaacaaatgcacctggttcttttactaagtgttcaaataccagtgaacttaaagaatttgtcaatcctagccttccaagagaagaaaaagaagagaaactagaaacagttaaagtgtctaataatgctgaagaccccaaagatctcatgttaagtggagaaagggttttgcaaactgaaagatctgtagagagtagcagtatttcattggtacctggtactgattatggcactcaggaaagtatctcgttactggaagttagcactctagggaaggcaaaaacagaaccaaataaatgtgtgagtcagtgtgcagcatttgaaaaccccaagggactaattcatggttgttccaaagataatagaaatgacacagaaggctttaagtatccattgggacatgaagttaaccacagtcgggaaacaagcatagaaatggaagaaagtgaacttgatgctcagtatttgcagaatacattcaaggtttcaaagcgccagtcatttgctccgttttcaaatccaggaaatgcagaagaggaatgtgcaacattctctgcccactctgggtccttaaagaaacaaagtccaaaagtcacttttgaatgtgaacaaaaggaagaaaatcaaggaaagaatgagtctaatatcaagcctgtacagacagttaatatcactgcaggctttcctgtggttggtcagaaagataagccagttgataatgccaaatgtagtatcaaaggaggctctaggttttgtctatcatctcagttcagaggcaacgaaactggactcattactccaaataaacatggacttttacaaaacccatatcgtataccaccactttttcccatcaagtcatttgttaaaactaaatgtaagaaaaatctgctagaggaaaactttgaggaacattcaatgtcacctgaaagagaaatgggaaatgagaacattccaagtacagtgagcacaattagccgtaataacattagagaaaatgtttttaaagaagccagctcaagcaatattaatgaagtaggttccagtactaatgaagtgggctccagtattaatgaaataggttccagtgatgaaaacattcaagcagaactaggtagaaacagagggccaaaattgaatgctatgcttagattaggggttttgcaacctgaggtctataaacaaagtcttcctggaagtaattgtaagcatcctgaaataaaaaagcaagaatatgaagaagtagttcagactgttaatacagatttctctccatatctgatttcagataacttagaacagcctatgggaagtagtcatgcatctcaggtttgttctgagacacctgatgacctgttagatgatggtgaaataaaggaagatactagttttgctgaaaatgacattaaggaaagttctgctgtttttagcaaaagcgtccagaaaggagagcttagcaggagtcctagccctttcacccatacacatttggctcagggttaccgaagaggggccaagaaattagagtcctcagaagagaacttatctagtgaggatgaagagcttccctgcttccaacacttgttatttggtaaagtaaacaatataccttctcagtctactaggcatagcaccgttgctaccgagtgtctgtctaagaacacagaggagaatttattatcattgaagaatagcttaaatgactgcagtaaccaggtaatattggcaaaggcatctcaggaacatcaccttagtgaggaaacaaaatgttctgctagcttgttttcttcacagtgcagtgaattggaagacttgactgcaaatacaaacacccaggatcctttcttgattggttcttccaaacaaatgaggcatcagtctgaaagccagggagttggtctgagtgacaaggaattggtttcagatgatgaagaaagaggaacgggcttggaagaaaataatcaagaagagcaaagcatggattcaaacttaggtgaagcagcatctgggtgtgagagtgaaacaagcgtctctgaagactgctcagggctatcctctcagagtgacattttaaccactcagcagagggataccatgcaacataacctgataaagctccagcaggaaatggctgaactagaagctgtgttagaacagcatgggagccagccttctaacagctacccttccatcataagtgactcttctgcccttgaggacctgcgaaatccagaacaaagcacatcagaaaaagatgctgagtttgtgtgtgaacggacactgaaatattttctaggaattgcgggaggaaaatgggtagttagctatttctgggtgacccagtctattaaagaaagaaaaatgctgaatgagcatgattttgaagtcagaggagatgtggtcaatggaagaaaccaccaaggtccaaagcgagcaagagaatcccaggacagaaagatcttcagggggctagaaatctgttgctatgggcccttcaccaacatgcccacagatcaactggaatggatggtacagctgtgtggtgcttctgtggtgaaggagctttcatcattcacccttggcacaggtgtccacccaattgtggttgtgcagccagatgcctggacagaggacaatggcttccatgcaattgggcagatgtgtgaggcacctgtggtgacccgagagtgggtgttggacagtgtagcactctaccagtgccaggagctggacacctacctgataccccagatcccccacagccactactgactgcagccagccacaggtacagagccacaggaccccaagaatgagcttacaaagtggcctttccaggccctgggagctcctctcactcttcagtccttctactgtcctggctactaaatattttatgtacatcagcctgaaaaggacttctggctatgcaagggtcccttaaagattttctgcttgaagtctcccttggaaatctgccatgagcacaaaattatggtaatttttcacctgagaagattttaaaaccatttaaacgccaccaattgagcaagatgctgattcattatttatcagccctattctttctattcaggctgttgttggcttagggctggaagcacagagtggcttggcctcaagagaatagctggtttccctaagtttacttctctaaaaccctgtgttcacaaaggcagagagtcagacccttcaatggaaggagagtgcttgggatcgattatgtgacttaaagtcagaatagtccttgggcagttctcaaatgttggagtggaacattggggaggaaattctgaggcaggtattagaaatgaaaaggaaacttgaaacctgggcatggtggctcacgcctgtaatcccagcactttgggaggccaaggtgggcagatcactggaggtcaggagttcgaaaccagcctggccaacatggtgaaaccccatctctactaaaaatacagaaattagccggtcatggtggtggacacctgtaatcccagctactcaggtggctaaggcaggagaatcacttcagcccgggaggtggaggttgcagtgagccaagatcataccacggcactccagcctgggtgacagtgagactgtggctcaaaaaaaaaaaaaaaaaaaggaaaatgaaactaggaaaggtttcttaaagtctgagatatatttgctagatttctaaagaatgtgttctaaaacagcagaagattttcaagaaccggtttccaaagacagtcttctaattcctcattagtaataagtaaaatgtttattgttgtagctctggtatataatccattcctcttaaaatataagacctctggcatgaatatttcatatctataaaatgacagatcccaccaggaaggaagctgttgctttctttgaggtgatttttttcctttgctccctgttgctgaaaccatacagcttcataaataattttgcttgctgaaggaagaaaaagtgtttttcataaacccattatccaggactgtttatagctgttggaaggactaggtcttccctagcccccccagtgtgcaagggcagtgaagacttgattgtacaaaatacgttttgtaaatgttgtgctgttaacactgcaaataaacttggtagcaaacacttccaacatgaatga

SEQ ID NO: 388544 - DNA, 3817 bp, Homo sapiens
aaaactgcgactgcgcggcgtgagctcgctgagacttcctggaccccgcaccaggctgtggggtttctcagataactgggcccctgcgctcaggaggccttcaccctctgctctgggtaaagttcattggaacagaaagaaatggatttatctgctcttcgcgttgaagaagtacaaaatgtcattaatgctatgcagaaaatcttagagtgtcccatctgtctggagttgatcaaggaacctgtctccacaaagtgtgaccacatattttgcaaattttgcatgctgaaacttctcaaccagaagaaagggccttcacagtgtcctttatgtaagaatgatataaccaaaaggagcctacaagaaagtacgagatttagtcaacttgttgaagagctattgaaaatcatttgtgcttttcagcttgacacaggtttggagtatgcaaacagctataattttgcaaaaaaggaaaataactctcctgaacatctaaaagatgaagtttctatcatccaaagtatgggctacagaaaccgtgccaaaagacttctacagagtgaacccgaaaatccttccttgcaggaaaccagtctcagtgtccaactctctaaccttggaactgtgagaactctgaggacaaagcagcggatacaacctcaaaagacgtctgtctacattgaattgggatctgattcttctgaagataccgttaataaggcaacttattgcagtgtgggagatcaagaattgttacaaatcacccctcaaggaaccagggatgaaatcagtttggattctgcaaaaaaggctgcttgtgaattttctgagacggatgtaacaaatactgaacatcatcaacccagtaataatgatttgaacaccactgagaagcgtgcagctgagaggcatccagaaaagtatcagggtgaagcagcatctgggtgtgagagtgaaacaagcgtctctgaagactgctcagggctatcctctcagagtgacattttaaccactcagcagagggataccatgcaacataacctgataaagctccagcaggaaatggctgaactagaagctgtgttagaacagcatgggagccagccttctaacagctacccttccatcataagtgactcttctgcccttgaggacctgcgaaatccagaacaaagcacatcagaaaaagcagtattaacttcacagaaaagtagtgaataccctataagccagaatccagaaggcctttctgctgacaagtttgaggtgtctgcagatagttctaccagtaaaaataaagaaccaggagtggaaaggtcatccccttctaaatgcccatcattagatgataggtggtacatgcacagttgctctgggagtcttcagaatagaaactacccatctcaagaggagctcattaaggttgttgatgtggaggagcaacagctggaagagtctgggccacacgatttgacggaaacatcttacttgccaaggcaagatctagagggaaccccttacctggaatctggaatcagcctcttctctgatgaccctgaatctgatccttctgaagacagagccccagagtcagctcgtgttggcaacataccatcttcaacctctgcattgaaagttccccaattgaaagttgcagaatctgcccagagtccagctgctgctcatactactgatactgctgggtataatgcaatggaagaaagtgtgagcagggagaagccagaattgacagcttcaacagaaagggtcaacaaaagaatgtccatggtggtgtctggcctgaccccagaagaatttatgctcgtgtacaagtttgccagaaaacaccacatcactttaactaatctaattactgaagagactactcatgttgttatgaaaacagatgctgagtttgtgtgtgaacggacactgaaatattttctaggaattgcgggaggaaaatgggtagttagctatttctgggtgacccagtctattaaagaaagaaaaatgctgaatgagcatgattttgaagtcagaggagatgtggtcaatggaagaaaccaccaaggtccaaagcgagcaagagaatcccaggacagaaagatcttcagggggctagaaatctgttgctatgggcccttcaccaacatgcccacagatcaactggaatggatggtacagctgtgtggtgcttctgtggtgaaggagctttcatcattcacccttggcacaggtgtccacccaattgtggttgtgcagccagatgcctggacagaggacaatggcttccatgcaattgggcagatgtgtgaggcacctgtggtgacccgagagtgggtgttggacagtgtagcactctaccagtgccaggagctggacacctacctgataccccagatcccccacagccactactgactgcagccagccacaggtacagagccacaggaccccaagaatgagcttacaaagtggcctttccaggccctgggagctcctctcactcttcagtccttctactgtcctggctactaaatattttatgtacatcagcctgaaaaggacttctggctatgcaagggtcccttaaagattttctgcttgaagtctcccttggaaatctgccatgagcacaaaattatggtaatttttcacctgagaagattttaaaaccatttaaacgccaccaattgagcaagatgctgattcattatttatcagccctattctttctattcaggctgttgttggcttagggctggaagcacagagtggcttggcctcaagagaatagctggtttccctaagtttacttctctaaaaccctgtgttcacaaaggcagagagtcagacccttcaatggaaggagagtgcttgggatcgattatgtgacttaaagtcagaatagtccttgggcagttctcaaatgttggagtggaacattggggaggaaattctgaggcaggtattagaaatgaaaaggaaacttgaaacctgggcatggtggctcacgcctgtaatcccagcactttgggaggccaaggtgggcagatcactggaggtcaggagttcgaaaccagcctggccaacatggtgaaaccccatctctactaaaaatacagaaattagccggtcatggtggtggacacctgtaatcccagctactcaggtggctaaggcaggagaatcacttcagcccgggaggtggaggttgcagtgagccaagatcataccacggcactccagcctgggtgacagtgagactgtggctcaaaaaaaaaaaaaaaaaaaggaaaatgaaactaggaaaggtttcttaaagtctgagatatatttgctagatttctaaagaatgtgttctaaaacagcagaagattttcaagaaccggtttccaaagacagtcttctaattcctcattagtaataagtaaaatgtttattgttgtagctctggtatataatccattcctcttaaaatataagacctctggcatgaatatttcatatctataaaatgacagatcccaccaggaaggaagctgttgctttctttgaggtgatttttttcctttgctccctgttgctgaaaccatacagcttcataaataattttgcttgctgaaggaagaaaaagtgtttttcataaacccattatccaggactgtttatagctgttggaaggactaggtcttccctagcccccccagtgtgcaagggcagtgaagacttgattgtacaaaatacgttttgtaaatgttgtgctgttaacactgcaaataaacttggtagcaaacacttccaacatgaatga

SEQ ID NO: 388545 - DNA, 3694 bp, Homo sapiens
aaaactgcgactgcgcggcgtgagctcgctgagacttcctggaccccgcaccaggctgtggggtttctcagataactgggcccctgcgctcaggaggccttcaccctctgctctgggtaaagttcattggaacagaaagaaatggatttatctgctcttcgcgttgaagaagtacaaaatgtcattaatgctatgcagaaaatcttagagtgtcccatctgtctggagttgatcaaggaacctgtctccacaaagtgtgaccacatattttgcaaattttgcatgctgaaacttctcaaccagaagaaagggccttcacagtgtcctttatgtaagaatgatataaccaaaaggagcctacaagaaagtacgagatttagtcaacttgttgaagagctattgaaaatcatttgtgcttttcagcttgacacaggtttggagtatgcaaacagctataattttgcaaaaaaggaaaataactctcctgaacatctaaaagatgaagtttctatcatccaaagtatgggctacagaaaccgtgccaaaagacttctacagagtgaacccgaaaatccttccttgcaggaaaccagtctcagtgtccaactctctaaccttggaactgtgagaactctgaggacaaagcagcggatacaacctcaaaagacgtctgtctacattgaattggctgcttgtgaattttctgagacggatgtaacaaatactgaacatcatcaacccagtaataatgatttgaacaccactgagaagcgtgcagctgagaggcatccagaaaagtatcagggtgaagcagcatctgggtgtgagagtgaaacaagcgtctctgaagactgctcagggctatcctctcagagtgacattttaaccactcagcagagggataccatgcaacataacctgataaagctccagcaggaaatggctgaactagaagctgtgttagaacagcatgggagccagccttctaacagctacccttccatcataagtgactcttctgcccttgaggacctgcgaaatccagaacaaagcacatcagaaaaagcagtattaacttcacagaaaagtagtgaataccctataagccagaatccagaaggcctttctgctgacaagtttgaggtgtctgcagatagttctaccagtaaaaataaagaaccaggagtggaaaggtcatccccttctaaatgcccatcattagatgataggtggtacatgcacagttgctctgggagtcttcagaatagaaactacccatctcaagaggagctcattaaggttgttgatgtggaggagcaacagctggaagagtctgggccacacgatttgacggaaacatcttacttgccaaggcaagatctagagggaaccccttacctggaatctggaatcagcctcttctctgatgaccctgaatctgatccttctgaagacagagccccagagtcagctcgtgttggcaacataccatcttcaacctctgcattgaaagttccccaattgaaagttgcagaatctgcccagagtccagctgctgctcatactactgatactgctgggtataatgcaatggaagaaagtgtgagcagggagaagccagaattgacagcttcaacagaaagggtcaacaaaagaatgtccatggtggtgtctggcctgaccccagaagaatttatgctcgtgtacaagtttgccagaaaacaccacatcactttaactaatctaattactgaagagactactcatgttgttatgaaaacagatgctgagtttgtgtgtgaacggacactgaaatattttctaggaattgcgggaggaaaatgggtagttagctatttctgggtgacccagtctattaaagaaagaaaaatgctgaatgagcatgattttgaagtcagaggagatgtggtcaatggaagaaaccaccaaggtccaaagcgagcaagagaatcccaggacagaaagatcttcagggggctagaaatctgttgctatgggcccttcaccaacatgcccacagatcaactggaatggatggtacagctgtgtggtgcttctgtggtgaaggagctttcatcattcacccttggcacaggtgtccacccaattgtggttgtgcagccagatgcctggacagaggacaatggcttccatgcaattgggcagatgtgtgaggcacctgtggtgacccgagagtgggtgttggacagtgtagcactctaccagtgccaggagctggacacctacctgataccccagatcccccacagccactactgactgcagccagccacaggtacagagccacaggaccccaagaatgagcttacaaagtggcctttccaggccctgggagctcctctcactcttcagtccttctactgtcctggctactaaatattttatgtacatcagcctgaaaaggacttctggctatgcaagggtcccttaaagattttctgcttgaagtctcccttggaaatctgccatgagcacaaaattatggtaatttttcacctgagaagattttaaaaccatttaaacgccaccaattgagcaagatgctgattcattatttatcagccctattctttctattcaggctgttgttggcttagggctggaagcacagagtggcttggcctcaagagaatagctggtttccctaagtttacttctctaaaaccctgtgttcacaaaggcagagagtcagacccttcaatggaaggagagtgcttgggatcgattatgtgacttaaagtcagaatagtccttgggcagttctcaaatgttggagtggaacattggggaggaaattctgaggcaggtattagaaatgaaaaggaaacttgaaacctgggcatggtggctcacgcctgtaatcccagcactttgggaggccaaggtgggcagatcactggaggtcaggagttcgaaaccagcctggccaacatggtgaaaccccatctctactaaaaatacagaaattagccggtcatggtggtggacacctgtaatcccagctactcaggtggctaaggcaggagaatcacttcagcccgggaggtggaggttgcagtgagccaagatcataccacggcactccagcctgggtgacagtgagactgtggctcaaaaaaaaaaaaaaaaaaaggaaaatgaaactaggaaaggtttcttaaagtctgagatatatttgctagatttctaaagaatgtgttctaaaacagcagaagattttcaagaaccggtttccaaagacagtcttctaattcctcattagtaataagtaaaatgtttattgttgtagctctggtatataatccattcctcttaaaatataagacctctggcatgaatatttcatatctataaaatgacagatcccaccaggaaggaagctgttgctttctttgaggtgatttttttcctttgctccctgttgctgaaaccatacagcttcataaataattttgcttgctgaaggaagaaaaagtgtttttcataaacccattatccaggactgtttatagctgttggaaggactaggtcttccctagcccccccagtgtgcaagggcagtgaagacttgattgtacaaaatacgttttgtaaatgttgtgctgttaacactgcaaataaacttggtagcaaacacttccaacatgaatga

SEQ ID NO: 388546 - DNA, 7193 bp, Homo sapiens
  misc_feature (123)..(123): n is a, c, g, or t
  misc_feature (128)..(128): n is a, c, g, or t
aaaactgcgactgcgcggcgtgagctcgctgagacttcctggaccccgcaccaggctgtggggtttctcagataactgggcccctgcgctcaggaggccttcaccctctgctctgggtaaagntagtngagtcccgggaaagggacagggggcccaagtgatgctctggggtactggcgtgggagagtggatttccgaagctgacagatggttcattggaacagaaagaaatggatttatctgctcttcgcgttgaagaagtacaaaatgtcattaatgctatgcagaaaatcttagagtgtcccatctgtctggagttgatcaaggaacctgtctccacaaagtgtgaccacatattttgcaaattttgcatgctgaaacttctcaaccagaagaaagggccttcacagtgtcctttatgagcctacaagaaagtacgagatttagtcaacttgttgaagagctattgaaaatcatttgtgcttttcagcttgacacaggtttggagtatgcaaacagctataattttgcaaaaaaggaaaataactctcctgaacatctaaaagatgaagtttctatcatccaaagtatgggctacagaaaccgtgccaaaagacttctacagagtgaacccgaaaatccttccttgcaggaaaccagtctcagtgtccaactctctaaccttggaactgtgagaactctgaggacaaagcagcggatacaacctcaaaagacgtctgtctacattgaattgggatctgattcttctgaagataccgttaataaggcaacttattgcagtgtgggagatcaagaattgttacaaatcacccctcaaggaaccagggatgaaatcagtttggattctgcaaaaaaggctgcttgtgaattttctgagacggatgtaacaaatactgaacatcatcaacccagtaataatgatttgaacaccactgagaagcgtgcagctgagaggcatccagaaaagtatcagggtagttctgtttcaaacttgcatgtggagccatgtggcacaaatactcatgccagctcattacagcatgagaacagcagtttattactcactaaagacagaatgaatgtagaaaaggctgaattctgtaataaaagcaaacagcctggcttagcaaggagccaacataacagatgggctggaagtaaggaaacatgtaatgataggcggactcccagcacagaaaaaaaggtagatctgaatgctgatcccctgtgtgagagaaaagaatggaataagcagaaactgccatgctcagagaatcctagagatactgaagatgttccttggataacactaaatagcagcattcagaaagttaatgagtggttttccagaagtgatgaactgttaggttctgatgactcacatgatggggagtctgaatcaaatgccaaagtagctgatgtattggacgttctaaatgaggtagatgaatattctggttcttcagagaaaatagacttactggccagtgatcctcatgaggctttaatatgtaaaagtgaaagagttcactccaaatcagtagagagtaatattgaagacaaaatatttgggaaaacctatcggaagaaggcaagcctccccaacttaagccatgtaactgaaaatctaattataggagcatttgttactgagccacagataatacaagagcgtcccctcacaaataaattaaagcgtaaaaggagacctacatcaggccttcatcctgaggattttatcaagaaagcagatttggcagttcaaaagactcctgaaatgataaatcagggaactaaccaaacggagcagaatggtcaagtgatgaatattactaatagtggtcatgagaataaaacaaaaggtgattctattcagaatgagaaaaatcctaacccaatagaatcactcgaaaaagaatctgctttcaaaacgaaagctgaacctataagcagcagtataagcaatatggaactcgaattaaatatccacaattcaaaagcacctaaaaagaataggctgaggaggaagtcttctaccaggcatattcatgcgcttgaactagtagtcagtagaaatctaagcccacctaattgtactgaattgcaaattgatagttgttctagcagtgaagagataaagaaaaaaaagtacaaccaaatgccagtcaggcacagcagaaacctacaactcatggaaggtaaagaacctgcaactggagccaagaagagtaacaagccaaatgaacagacaagtaaaagacatgacagcgatactttcccagagctgaagttaacaaatgcacctggttcttttactaagtgttcaaataccagtgaacttaaagaatttgtcaatcctagccttccaagagaagaaaaagaagagaaactagaaacagttaaagtgtctaataatgctgaagaccccaaagatctcatgttaagtggagaaagggttttgcaaactgaaagatctgtagagagtagcagtatttcattggtacctggtactgattatggcactcaggaaagtatctcgttactggaagttagcactctagggaaggcaaaaacagaaccaaataaatgtgtgagtcagtgtgcagcatttgaaaaccccaagggactaattcatggttgttccaaagataatagaaatgacacagaaggctttaagtatccattgggacatgaagttaaccacagtcgggaaacaagcatagaaatggaagaaagtgaacttgatgctcagtatttgcagaatacattcaaggtttcaaagcgccagtcatttgctccgttttcaaatccaggaaatgcagaagaggaatgtgcaacattctctgcccactctgggtccttaaagaaacaaagtccaaaagtcacttttgaatgtgaacaaaaggaagaaaatcaaggaaagaatgagtctaatatcaagcctgtacagacagttaatatcactgcaggctttcctgtggttggtcagaaagataagccagttgataatgccaaatgtagtatcaaaggaggctctaggttttgtctatcatctcagttcagaggcaacgaaactggactcattactccaaataaacatggacttttacaaaacccatatcgtataccaccactttttcccatcaagtcatttgttaaaactaaatgtaagaaaaatctgctagaggaaaactttgaggaacattcaatgtcacctgaaagagaaatgggaaatgagaacattccaagtacagtgagcacaattagccgtaataacattagagaaaatgtttttaaagaagccagctcaagcaatattaatgaagtaggttccagtactaatgaagtgggctccagtattaatgaaataggttccagtgatgaaaacattcaagcagaactaggtagaaacagagggccaaaattgaatgctatgcttagattaggggttttgcaacctgaggtctataaacaaagtcttcctggaagtaattgtaagcatcctgaaataaaaaagcaagaatatgaagaagtagttcagactgttaatacagatttctctccatatctgatttcagataacttagaacagcctatgggaagtagtcatgcatctcaggtttgttctgagacacctgatgacctgttagatgatggtgaaataaaggaagatactagttttgctgaaaatgacattaaggaaagttctgctgtttttagcaaaagcgtccagaaaggagagcttagcaggagtcctagccctttcacccatacacatttggctcagggttaccgaagaggggccaagaaattagagtcctcagaagagaacttatctagtgaggatgaagagcttccctgcttccaacacttgttatttggtaaagtaaacaatataccttctcagtctactaggcatagcaccgttgctaccgagtgtctgtctaagaacacagaggagaatttattatcattgaagaatagcttaaatgactgcagtaaccaggtaatattggcaaaggcatctcaggaacatcaccttagtgaggaaacaaaatgttctgctagcttgttttcttcacagtgcagtgaattggaagacttgactgcaaatacaaacacccaggatcctttcttgattggttcttccaaacaaatgaggcatcagtctgaaagccagggagttggtctgagtgacaaggaattggtttcagatgatgaagaaagaggaacgggcttggaagaaaataatcaagaagagcaaagcatggattcaaacttaggtgaagcagcatctgggtgtgagagtgaaacaagcgtctctgaagactgctcagggctatcctctcagagtgacattttaaccactcagcagagggataccatgcaacataacctgataaagctccagcaggaaatggctgaactagaagctgtgttagaacagcatgggagccagccttctaacagctacccttccatcataagtgactcttctgcccttgaggacctgcgaaatccagaacaaagcacatcagaaaaagcagtattaacttcacagaaaagtagtgaataccctataagccagaatccagaaggcctttctgctgacaagtttgaggtgtctgcagatagttctaccagtaaaaataaagaaccaggagtggaaaggtcatccccttctaaatgcccatcattagatgataggtggtacatgcacagttgctctgggagtcttcagaatagaaactacccatctcaagaggagctcattaaggttgttgatgtggaggagcaacagctggaagagtctgggccacacgatttgacggaaacatcttacttgccaaggcaagatctagagggaaccccttacctggaatctggaatcagcctcttctctgatgaccctgaatctgatccttctgaagacagagccccagagtcagctcgtgttggcaacataccatcttcaacctctgcattgaaagttccccaattgaaagttgcagaatctgcccagagtccagctgctgctcatactactgatactgctgggtataatgcaatggaagaaagtgtgagcagggagaagccagaattgacagcttcaacagaaagggtcaacaaaagaatgtccatggtggtgtctggcctgaccccagaagaatttatgctcgtgtacaagtttgccagaaaacaccacatcactttaactaatctaattactgaagagactactcatgttgttatgaaaacagatgctgagtttgtgtgtgaacggacactgaaatattttctaggaattgcgggaggaaaatgggtagttagctatttctgggtgacccagtctattaaagaaagaaaaatgctgaatgagcatgattttgaagtcagaggagatgtggtcaatggaagaaaccaccaaggtccaaagcgagcaagagaatcccaggacagaaagatcttcagggggctagaaatctgttgctatgggcccttcaccaacatgcccacagatcaactggaatggatggtacagctgtgtggtgcttctgtggtgaaggagctttcatcattcacccttggcacaggtgtccacccaattgtggttgtgcagccagatgcctggacagaggacaatggcttccatgcaattgggcagatgtgtgaggcacctgtggtgacccgagagtgggtgttggacagtgtagcactctaccagtgccaggagctggacacctacctgataccccagatcccccacagccactactgactgcagccagccacaggtacagagccacaggaccccaagaatgagcttacaaagtggcctttccaggccctgggagctcctctcactcttcagtccttctactgtcctggctactaaatattttatgtacatcagcctgaaaaggacttctggctatgcaagggtcccttaaagattttctgcttgaagtctcccttggaaatctgccatgagcacaaaattatggtaatttttcacctgagaagattttaaaaccatttaaacgccaccaattgagcaagatgctgattcattatttatcagccctattctttctattcaggctgttgttggcttagggctggaagcacagagtggcttggcctcaagagaatagctggtttccctaagtttacttctctaaaaccctgtgttcacaaaggcagagagtcagacccttcaatggaaggagagtgcttgggatcgattatgtgacttaaagtcagaatagtccttgggcagttctcaaatgttggagtggaacattggggaggaaattctgaggcaggtattagaaatgaaaaggaaacttgaaacctgggcatggtggctcacgcctgtaatcccagcactttgggaggccaaggtgggcagatcactggaggtcaggagttcgaaaccagcctggccaacatggtgaaaccccatctctactaaaaatacagaaattagccggtcatggtggtggacacctgtaatcccagctactcaggtggctaaggcaggagaatcacttcagcccgggaggtggaggttgcagtgagccaagatcataccacggcactccagcctgggtgacagtgagactgtggctcaaaaaaaaaaaaaaaaaaaggaaaatgaaactaggaaaggtttcttaaagtctgagatatatttgctagatttctaaagaatgtgttctaaaacagcagaagattttcaagaaccggtttccaaagacagtcttctaattcctcattagtaataagtaaaatgtttattgttgtagctctggtatataatccattcctcttaaaatataagacctctggcatgaatatttcatatctataaaatgacagatcccaccaggaaggaagctgttgctttctttgaggtgatttttttcctttgctccctgttgctgaaaccatacagcttcataaataattttgcttgctgaaggaagaaaaagtgtttttcataaacccattatccaggactgtttatagctgttggaaggactaggtcttccctagcccccccagtgtgcaagggcagtgaagacttgattgtacaaaatacgttttgtaaatgttgtgctgttaacactgcaaataaacttggtagcaaacacttccaacatgaatga

SEQ ID NO: 388547 - DNA, 398 bp, Homo sapiens
tgagacagagtttcactctctcacccaggctggagtgcagtgacataagcttggctcacggcaacctctgtctcctgggctcaagcgattctcctgcctcagcctcctgagtagctgggattacaaaattagcctgccaccaccatgccagactaagttttttttaacttagtagagacagggttttgccatattggccaggtgggtctccagctcctcgagtgatctgcccacctcagcctcccaaagtgctgggagtacaggcatgagccaccgcacctggttcatttttgatgacagagcaaacaagcaaacaattgaaatgcaggctgagtattccttatccaaaattcttgggacaagatgcatattggatttttaaaaaatttttcaacatt

SEQ ID NO: 388548 - DNA, 374 bp, Homo sapiens
atcattcccaaagaataaatatttcctgtgtattttactatactactacttccttgacaacaaataaacataacaatgcattttcatgccttcaagtcaagtagacttttcaaatgtgaggcaatattacatagttgacatttattcatatcattccacatatgtacatcttaattcaaaaatccatgacaaaaactaatttatatgcttccttttacctcaatattaactaaggtaaaatgagaattatactcttgtgatgttacatgaaaaatattagacccaagtgccccagagaaattggtagaagaaatgcccacaggctacaattttcttatacttacatggactgagtctctagtgcctggtgtcaa

SEQ ID NO: 388549 - DNA, 1437 bp, Homo sapiens
agctcactgcaacctccgcctcccgggttcaagcgattctcctgcctcagcctcccgagtagctgggattacaggcgtccgccactactcccagctaattttttatatttttagtagagacggggtttcaccatgttggccaggctggtttcaaactcctgacctcgtgattcgcccgcctcggcctcccaaagtgctgggagtacaggcgtgaaccaccgcacccagccacagtatggccagttttttaagtgtttcacatgtgcttcctaattatgtttcctttttttttttggaaactggtctcactgtgtcccctaggcatgtacgatggcatgatcttggctcactgcagcctcaacatcctgggcttaagcagtcctcccacctcagcctcctgagtagctgggtatgttgcccaagctggtctggaactcctgggcttaaatgatcctccggccttggcctcccgaagtgttgggattacaggcgtaagccaaggcacctggcctctgattgttttctacatatgtggcactgcttgttaattgtgttgttcaaatctttcatatctttactaacttttgtctgacctattaataattgataaaggtattttgaattctcctactgtaatggtagatttgacaatttcccctcttttatcagttttaactttatacattctattgagtgaataaagtgtggaattcttgtgttgtcctggtgagttgaactcttcttgttatgtagtgacttccttattgctaatgctttttgccttagcaaataaaaatctgttttctgtgatctcaatatagctttggttggtatttagtgtatatctttaaatccttttacctcctacgtgttgatggtttagttttgtctcttgtaagtcaaataaacctggattttggcttttcatttggccatctctaccctttagtagacaactttattccatttacatttattataattcttaaaacatgaagacttctatcatgttattttgtactatttgtttctcttttatgcgttttttccattacttattgattggctgtttggttttattattgttattattccatttctccctctgtactaggtttaaagttttacattctatttatatttttcttgtgtttactcctgaactttttcaatgcatactcaatacaatctaaagttatctggtatcataacccgttctttacttataatggactttggaacatcataagtctgatcaaccccttccctacttacatgctattgtaggccaatattctaacctctgattttattattattattactattattattattattattattattattattattttgagatggagtctcgctctgtcaccgagattgtgccactgcacttcaacctaggcgacagagtgagacaccgtctca

SEQ ID NO: 388550 - DNA, 231 bp, Homo sapiens
cccacttcagcctcctgagcagctgggactacaggtgtgccccacaatgcctggctattttttgtatttttagtagagatggggtattgccatgttgcccggctagtcttgaaatcctggccttaagtgatctgtccgcctttgcctcctaaactgctgggcttacaggtgtgagccaccacacctgaccaagtagtaagtgttactcattctttgtaactatttttcttg

SEQ ID NO: 388551 - DNA, 1103 bp, Homo sapiens
agatatgaagtcattagggccaggcatggtggctcacacctgtaatcccagcactttgggaggccgaggtgggaggatcatgaggtcaagagtttgagaccagcctggccaacacggtgaaaccctgtctctactaagaatacaaaaattagccaggtgtggtgacgcgtgcctgtaatcccagctactggggaggctgaggcaggagaattgcttgaacccgggaggtggaggttgtagtgagccaagatagtgccactgcactccatcctgggcaacacagcaagtctccgtctcagaaaaaaacaaaacaaaacaaagatatgaagtcattggagggtaaggaaggatgaaagtttgtgctaaggcaaaagaccaaaataaaattttaatatataatagttcattttctcattcatacattctattcaataacaattgagtgcctaccatgactaggcaatggtgctgtcatggtaggcactagagaattaccttctatggaaggaggcagataaataagcagataatgaaacaaatatataacttcaaattgtgataaatacattgaagaaagcaaagagcaggaattggtagactttttctgtatagggccagatagtaaataagctttgcaggctgtaaagtttctgccattgttgcataaaaacagtcacacacaacacataagaatgaacatggctgtgttccaacaaaactgtatttgcacaaacaggtgggggctggatttggtccacagtccatagttttctgactcctcatataaagtattaggaggaaagggaggcactttaaacaaggggaagacaacagtcaggagatcagtctttcctacggtaattttgagatgtctatgacacatccacatgcagatatcaaataggtaaccaggtatttgagagtggcactcagatgagaattctacaataaaaacataaattggaagccactggtataaagatgggaaaggatgagatgacaccagaagagaatagagaggtgaaaagggtctaggactgagcaccaatgaacaaaagttcatagtgtatgactcttagttcataaatctaaggtagtcatca

SEQ ID NO: 388552 - DNA, 310 bp, Homo sapiens
gtgaagagacaatctacagaacaggagagaatatttgaaaaccatatatttgttaaggggttaatatcaaaaatacataaggagctcaactcaatagcaagaaaacaataaccttatttttaaaatggcaaaggacctcaatagacatttctcaaaagaagacatacaactggccaacagatatgtcaaaaaatgttctacatcactaatcatcggggaaatgcaagttaaaaccacagtgcagtatcactcaaacctgttagaatggctattattgaaaagatgatagataacaagtgtcgatgaggat

SEQ ID NO: 388553 - DNA, 166 bp, Homo sapiens
tagatcttgcttttatggcatggctgtaagtggtttccactgggatgcctttctagttcacctctgtgtcctcatcaattcggcgctgaattatatacctgtgattttttttcacttcctttcaatgtcattactttctaattgcaaagcagaaacattcctagta

SEQ ID NO: 388554 - DNA, 405 bp, Homo sapiens
tcttttaatttccctaagtgcatgtagcaaagagagtgcaatatttgctttttttctatatgctttaactcttgatatactttatttatgctataatagaaatgtgtgtcttcccaaaatttatatgttgaaatcttaaacctcaaggtgatggtattaaaaggttggggctttttggaaagtgattaacccataatggtgccatccttcatgaatgggattagtgttctcataaaagaaacagaaggaagtgtgttttcctcttctgccatgtgaggataccacgaaaagatactatctgggaagcaaataattctctccagacactgaatccgctggcaccttgatcttggacttcccgacctccagaattatgagaaataaatttctgttgtttataaatca

SEQ ID NO: 388555 - DNA, 521 bp, Homo sapiens
ggtacacctaacccagagtggcaaggcagtcagagatggcttcctggatgaagtgaacttaagctgagtttaaaggataagcaaacatctgttgaactttttgaaagagaatctcttaattccacagaaatactagtgtctttagcttcatattcagagggccagaaatttctattttttaatccctgtagtacatgtagagacttatcaaactaacttggtgctgagcttgaggtttttagagaagtattttctaatgtccagggtgatggtatgtgactttgagataggtcaccagtggggctgccacccagacactgttagtgttcttttcagtggcttagctgctgactcgtccctcagttatacctgaaccctacgtctataccctccccagctcacttgcccaggcaggggcagagatgactgcaaagctggaggggatgtcagctgggtgacaggtggcctgggctaggcctgtgggacagcttggcctctctggtgttcagggagtggcctct

SEQ ID NO: 388556 - DNA, 387 bp, Homo sapiens
tccccaaaaagaatttccatatgtaactttcacagcatagatttcttatcacgtgctacaaatacaaacaataaaaacatatgatggtattaatattaaaaacttataaagcaaattttattaatgaaattcagcaatacccctttgtttcaagtatctttggtgattgaataatatttgggtcaaaatctgttacatatatatgatcagttttagtatgtctgcagcaactgcatttttgcactaaaatcctttttacctaaatgtgtagttggaaatgctaccatagaaagaacaagtcagatgagtagatttttcagtgatttctaaataatttctttattccattaagctcccctctctaaaatcacctcccaaatcactggc

SEQ ID NO: 388557 - DNA, 495 bp, Homo sapiens
gtagatagtatacttttaagtgtactgattctaaatacatgtacttggtaaggtgtgggtgatgggtgggttgtgagataaatgacccagtaactaggaaagtagaaaacttaactgaatgtttatctgaccaaaggtgtgtcccagttaagtactgtcaaatctattaatatgaactctgatatggtttggctgtgtccccaaccaaaatctcatcttgacttgtaatctgaattataatcccaatatattggggagggacctcctggaacgtgattagctcatgggggcggttcccccatgctgttctagtgatagttctcagaggatctgatggttttataagcttttcctctgttcactctgcagttctcttgcctactgccatgtggaaaaggaaacgtttgcttcccctccaccatgattgtaagttcccgaggcctccccagccatgcaggactgtgagtcaattaaacatcttttccttataaatta

SEQ ID NO: 388558 - DNA, 3561 bp, Homo sapiens
  misc_feature (907)..(907): n is a, c, g, or t
  misc_feature (1325)..(1325): n is a, c, g, or t
  misc_feature (1627)..(1627): n is a, c, g, or t
  misc_feature (2117)..(2117): n is a, c, g, or t
  misc_feature (2850)..(2850): n is a, c, g, or t
tactaaaaatacaaaagttagccaggcatggtggtgcattcctgtagtcccagcttactcgggaggcagaggcacaagaattgcttgaacctgccaggaggcagaggttgtagtgagccgagatcgcaccactatactcccgcctgggtgacaaggcgagactctgtttcaaaaatagaattttttctaaggtaaaaggaggatgtaccttaatcaggtttgtcatcaaacatccaagcctttagcattggctttgccctttgcttttacacagctctgatcttgtgtcctccttctgttatgtgtaaatttgccttgtctccattcttgctttccagctattttagaattgattctcatatcctggcctgtcttttaaatgtctctcttctattttgaaacaatatacttctttcattcaatcgaaaacctttgctgaatgcctctatgtgttatgcccagggctacatgctaagaatagacagataagatgcagttccgtagtttctgttcccttgaaagagcagagaaataagtcacagcactgtgtagtaagcataacactgtattgtagaaaagtgtagactgaagtgtggacaaatgccagagaagcctagaatcctaagcagctactttatcctgggaaggatgggaaagacatcagcaaaaaaggtgaaacctcagccctcttctttgtcataatgctctgttttctctttccctagaagagctgcctccagaggtagggtatgttaaatgatatattgaagtacaggagtaactagactttctatttatatattttttaaaacatgaaaaaaaaacctaagctttactaatatataattctcaggtttatgttatacatacacacatatacgctatgtttttattaaactatatatgngtatatagggagaaagcgaggatatgtgcttaaatattttttactgatgcagtgtaagatcaaagtttggacaccactgctgtgatcatttgttcttttagctagccatcagttaggcacaaaataatttccaaatttcatcccaaactgtaccaaagtgctacttataagcattttcacaacttcattcaagtgtgctttcaagaacaaagctgtgagtcttcattcccactgcccccatttcctccccaaaccagttaatcagttcttggggagtctacctcttaaatatttatccactccccattatccccacagacactagggcagccctcatcatctcaccaggactattgttagcctactaactgctcttcatgttactggtcttaactccttccaacccacctggcttcanagtacacctagagtaatccttccagaatgcaaacaaaatccttctaattccctaattatctcctagataaaagttaagctatttgacaaaaggcacacttcatgacccagtccaagtgctaatacccacaaactcttcacagatgggccatcagtttgtgaccactatggaaggttgatttgggctgccattgagcatgcatactcttatggacgtgtttgtcagactgaacactgagctgagtggatcatgcaacttgtgtagaggacagtataaatggctgaaaataaaagccaaatganaggcagatgtgaaaataaaaaagcctgtgcttactagaacacacagtcactttgtcttatgaatgtatcatcaggcatagcccaggtgctgagaaataaccaagtaactaatgcacttaataactggatccttttaaaaaccaaacaggcattgatgtcagatttcattattgctgatctgttcaatattgatttggatccttttatctttccaaggatgtggccaaagatttctgtggtgtatgcctctaccacaaaagcatttagaagtacaaacccagcccttgcctatgtctatcctcatatcctgccactcttcctctaccccacacaccaaacccctatggtctagccatactaaagagcaaattatctctaagtatgcctttcaagcaagcttcatcatcatgaatcaatgcctttatacacactgctgctttgcttagactgctcttctactttattctactcattacacttctcatttttngggacttattctaagcattatctcatctgtgatgctttttctagtcctcccagctcaagacagagtttggaatacctcctttttgctctcatagcatgttatgcattcctactaatatagcacctcctagtatgtagcgcttagcaaattatactgtagtagccaacagttcaaagctctggatccctgaggtcaggaacgccttaagcactggactgctggaggtctttctcatctttgtacctgcagtacctaatgcaggacttggcttacagcagagaatccgtacacatgtggggagtgaacgaactcaggatcttttttctcctcaaagcattgtaatcagtactttagggaaaaaggtagaagcataagaatattagggcaagatgcaacaacagcatcaacaatcacaaccacggctaattaatacttaacgttcgtcaggctctattctaagctcatacatatattcactcatttgtttctcacagcaaccctcctgtcctcattttacagatgagaaaaactgaggcacagagagactaattaagcaatttgcacaagatcacacacacaggctgctcgcggtgactcacgcttgtaatcccagcactttgggaggccaaggtgggtggatcacctgaggtcaggagtttgagaccagcctggccaacatggtgaaaccccgtctctactaaaaaatacaaaaattagctgggtgtggtggcanatgcctgtaatcccagctactcaggaggctgagacaggagaatcgcttgaacccaggaagaggaggttgcagtgagccaagatcgtgccattgcactctagcctgggagacagagtgagactccatctcaaaaaatataaaatataaaatataaaaaaaaaaataagatcacacacagagaaggcagcagaactggttccagagcctttatgctagaatagaaagtgcctgttattttgttcattctcctcctcgtccagtgtacagctgtagtgatggggaaacaggaaatcaattactaggttgccactaagtctacaaactattgaagaccagaatttacataaatcgtatgcagtcccacatctgacaggcttgcaaaaccttccacatttccatgagtaagcctatccaaatagtactacttctcaattgcaaatcataacaacctcttgtgtggccgtcagagctgactaagcagaaactatgatcctctgaatttagtatttttcctgtttgccaaaaatgatgtgtcattagtgacgaagttattcttaaagttcctttaacaaaactgtgatttatatcaaataacaatggcttggagggggtatggaaaattgattattcttcctaacaaatctattaattttattaaacttggtctccctccctttttcttggatgtttataaaatttaagtctttctaa

SEQ ID NO: 388559 - DNA, 261 bp, Homo sapiens
tatactgaataacaaataggtgcccagtaaccagttgctgtcaaattttgggaaaagttatgtgattgcttactgatcatgatgcacatctcttatttacttagtgatttgtggaccaagcattcagaagctatgcacttactcaaagttgatatactgtggtaactaagtgttgaaccaggttgttggggactgttatttatactgtgatggctggtacctgtgtatttcagaactgtgcaaaagcaaagactgcttgtg

SEQ ID NO: 388560 - DNA, 293 bp, Homo sapiens
aaaatgcttgttgatattttagttattaattcatattaactttggctgaaacttttaaattctattgtgaatagtcaagtaaaatttagattgttacattctgggttagtattagattgtttttaagattgttttaaacaagatgtttttaagatgagttttaaatagttctcttaacacaaataaagcttaatatgagtatttgaaggaaattatcccaaaccattccagttcctggctgtgaaaggcttttccaggcctaataagttttccacttcagccgtaagtaggtg

SEQ ID NO: 388561 - DNA, 409 bp, Homo sapiens
gcatttaatgactatgtaaaatatggactaaaatattgtacattcatggaggtttaaccactggatatttatgcctgtattaccctgatacaaatattcagctgtatctgaatagttaaaatgtcttttagaataccacgtgggttagacagaagttcactatcaataatttagaatatatgtaatcttacatgctgccaagaaggaagtaaaaataagtacataatctttgagaggtcaggattcattttttctgtcgtgtattcattcattaaaatgatcgaatattcaatgttactctcagtattgaaattgggagcaaatgtagtccttgctttcatggagcttatagtctctggaggtgatagactttaactaattaataacactcagataatacaaatatggc

SEQ ID NO: 388562 - DNA, 688 bp, Homo sapiens
gacgagagcaccctaaccatcagggtaatatcctctaagtgctggtgtcctgtaaatgtcagaagcctggtgggattaatccacaacctcaggttctaattcaggtcagaggcagacaagtggtgattggcagttttacttaattgtcaattaaaggctctctgatgacaggagggatcgacattccaaggcaagcaatgcagttgacaattaagagctaaaaattaaaccagccatccatatcatcacatgcccaaggcttcataggaacccttggtactgcaattgttcccaggtagaaaatgaggtccttgaacctggccatgatggggcaacagctggaaatcttgctctagccctggatcccacaagatcccctgctccctgacaatctctcagaggctccccatggcctctcagataaggccctggccttgatatggcctctggccacctctccagctgcattgctcccctccctgaacttcatcctgtatcctgacctcaaaaactttgcagttggctttatacatcctgctctgttcctgctgcctggaacattcttccctcctttgcccttcaataaaccacctactctgtgaagcctcttatgccctctttttctgcccacagcactctgtacatactagaattgtatcaccttgctgctgtggactataatgtgttt

SEQ ID NO: 388563 - DNA, 454 bp, Homo sapiens
atctatctctttcctcccctgtttcaaccccacatgtattccatgctcagcagcagcagcagaaatagtaggatatagatcacaaaggtttttctggtgagtcaaatagggtgttttcttttgaaactgtaatgaatatgtttgccagtcaaatggcttcatgagaacagtagaaccttatgaatgtatactagcatacaaggatctcaaatacattaattattctcagttttaggaatgtaaatagattaagtcccacaatgaaatttcagaagtttttgttctgtaagtaaaaaattactaaccactgatgttcaagattttcttttaatagcactatccttgagaaccaaaaagtttatgttttgattttcaaatgttaaacaagatgctaaacaaatcctggactgttaataaaaattaattatgtattattggataaggaattttcacc

SEQ ID NO: 388564 - DNA, 795 bp, Homo sapiens
cccaactgaggcaaaatggcctcagagtttaactggtatatgaccttcctttaggaacactggactggtaagggaaaacgcctcaggtgagcatgcacacaacttcagtaaacacactgcacacgcaggccctcccaagcactagcaggccactgcacatgcagacagccaaagggaagaatcaggagagaagggctgcaacctcccaagaagcatgccaatgtgtaaaaccccaggtcaaaggtcaaactgtgcccttgatctctcaagtctcccacttggccctcttccaagtatattttgtatttttttctctcttgttctaaagctttttaataacttctactcctgccctaaaacttgcctcagtctctcactctgctttatgcactttggtcaaattatttcttctgaggaggcaagaactgaggttggtctagacccatacagatttgccaccgatagcaatcatggccaagtcatttcctctcaggaacttggtttcttcatccatacgatcggaggtaagagtaggcattttccatcttttttttttttttttttttttgactctagaaatactactttatctgatttttaaagaagatttccatctggctctggtgactttgaaactctgtgatcatatacgcgtgagaaataatgtggggcgccatgatttactctccactccacacatttacagatcacaaaaatgagatcccttgtaaccaggttcagaattatttaattgaggttaagatctaattttcatagctcaaaaagtcatgtatg

SEQ ID NO: 388565 - DNA, 109 bp, Homo sapiens
gtgggacaggagccagaggcgggtggagcgaggcagaggcccaccactgtctcccatgccgctggctcctgcagctgcctctttactgactgtgccgacccttccccag

SEQ ID NO: 388566 - DNA, 591 bp, Homo sapiens
cgtgtgcaagtcctgtggaggagaggagatgagagagcaatcgagtcaaggtctcactaggatgtccaggctggcctcgaactcctgggctcaagcaatccacctgccttggcctctgaaagtgcaggaattacagctgctgtgccctgaggggtgagggaaatgtggtcgcctaaaacaccatcaaaggttgctgcttaaacacttccctcagccatatatgaaggctaaatcagataaagatcccaggaagtgtgcaacaggagaaccagtgacacaatccaccttggtatgagtgtcagccatcttgtctttcaactggaaagctagaagtgacagcatggtatattaagaggtctctgcttgaataaattgatgtcaagttttattacatatagaccaagctagaaggcacaagacaaccactcaacaactatgtattaaacaacgaaatcaacgaaatggcatacagcagtatttcaaattcttgaaatacagatagggacaggcaaaaactgtattctctagaaggctgaagtcagccaaagaaaatgcacagtaaacacaaatcgagatatttataagatcctt

SEQ ID NO: 388567 - DNA, 529 bp, Homo sapiens
acacagtgatggcctgcagtggtgaaccagtgagggaacaagtcctatggttggggagctacctgaggctggagagcagagtacagccaggcccacagtggtgcagcataccagagtcaaggtctcactaggatgtccaggctggcctcgaactcctgggctcaagcaatccacctgccttggcctctgaaagtgcaggaattacagaggagtgtatttagagtcaacaaccacacatggctaatctctcagaatgtttcatcatgagatgtgagcatcatgttccaggccctgagtgcttcataaaaaaaaaagttccttttccaccaaaacaatgccctgatttgagtgcttcatcaaaagagaaagatttctcatgataaaccatattctaagcacttagatcacaatatagtaaattttcaaaaggaagtcacttttgccaagatataaaggctcatgtacgtaaattctatgcttccaatataagtacatttcaaaaatattattaaacccttatttactgagt

SEQ ID NO: 388568 - DNA, 298 bp, Homo sapiens
gttggtggcatctggggacattaaacagtgacgtggacacagtgatggcctgcagtggtgaaccagtgagggaacaagtcctatggttggggagctacctgaggctggagagcagagtacagccaggcccacagtggtgcagcataccaggtctccatccagttggctaggacagtgtcctgtgccccttcttccctgaatccccttctcaccctagatgacccaagagtgtctctgaataatacattgcttcccattttctattcattatgcttcagtaaacttttttattttctta

SEQ ID NO: 388569 - DNA, 456 bp, Homo sapiens
aggatgtcataacttgacctcataatggcatcttggcaatgaaggaacttaatgagcaagcagactgtgtgttgcccattgacagtctttatttgacatcattagcaaagtcgacctcatagtgaattctggaaagttgggtacaactgtagacgacttcaagtgctgtggctttaaaaagcagaataagccctttgttgcagtcaacaacattgtggcaaatttgctcaacctaacaagctccgcaagatttgaagggtcccttaataaggaccataatgaaatcagcatgaatttagttccttttcctcagcttcattatcttgtatcaagcctaacacctctatacacactggcggatgttaacattcctactaaaagattggatcagatgttttcaaatgcctttagtaaagatcaccagctgcttcaggcagaccctaaacatagtcttta

SEQ ID NO: 388570 - DNA, 400 bp, Homo sapiens
gagaccgcaccacagcaccccagcctggtgacagagcaagactctatcacaaaaaaaaaataaaagaaaaagacaaaaaaaaggcagcattttagcaaggtgaatgtggcagcctttcccagatcagcacagccaaaatagcctggatggaagagtcacagtcaaacagttcctgaacgcccactgtgagccaggcatcatgctccccacggaaggttacccagaggacaggatgcctgaactgggtcttagagaccagcaggagagcactcctggatttcttacagcagtgacgcccaagcctgcctctgtaactccatccaaatacagacttccaggccccacccaggagattctgagcccacaggctggggtggggcccaggattctgtattttcaa

SEQ ID NO: 388571 - DNA, 637 bp, Homo sapiens
cataaccagaccccatttttacaaaaaataaggacaaaattaagtgggtatggtggcaaatgcctgtagtcctagctacttgggagactaaggtgggaggatcgcttgagcccaggatgtccaggctgcattgagccatgattgcaccactgactgggcaacagtgggagaccctgtctcaaaaataaaaataaaaacagtttatagccccactaattactgatagatgtggtgttattccggaaatgcattcttatcagtacaggcatttcaagagaggaataaaatgctgacaacattatttttccacttacattgaccaaacccaggcgagcacattagtataaggcttaaaaggggattttaagtatatttaaatgttttgttgtggtttgatgttaaaatatgtttgccttatattttaaatgattagagttcttgtcaaagtctccatctatcttcttcctcagggacattgatggatttgctaatgatttttaaactacatcgtgcaatataaatgctaattaaccttccttagatatgatactgtatatttaatacatagcaatccttatttttaaagtgatttaacttccttttttccctccagctttatggagatatgattgacaaa

SEQ ID NO: 388572 - DNA, 460 bp, Homo sapiens
ttagtagaaacatggtttcaccgtgttagccaggatggtctcgatctcctgaccttgtgatccgcctgcctcggcctcccaaagtgctgagattacaggcctgagccaccgcgtctggcccacatgtttattttcaactttacttccaaactttatgatcacaatggaaggctaccaggaaaaagcattcttttagtgggttttctcatgaagatttaggaagaagataacttggcaattagagtaaaagtattaaaacacttaatccaagatctagactagcatcattgtgttgtattgggcttaagatgcttattttctttcaggtgctttgcaaggcacttatgttcaaggctatctgggtattaatcctgattcagctgtccaaagaagataagcatgaaattatccttccaacatctattaagcaagcaagacttaatcatgccaaaaccaacct

SEQ ID NO: 388573 - DNA, 699 bp, Homo sapiens
attctaattagagccttggcagagctccagtatagtctaggccagtacttctcaaccttgactgggtgtgtgaatcacctgggggtgtagctgattctttaggagtgggctggtgcctgggattctactcctgatctgtggacaacagtttgagatgctaggcattaaactgaacttccaggattggctcccaaaattacagcacagaatcgggccgcctaaggagctgcggcctcccctgcaaccaggaagctgcggtatctgacatctgccaccaacagctgttagcaacagagctagcactcctgcagtgacacccactggccaagtaaatgtccacacactccacctctctgctcagtgacttagatccaaatccaaatcttacctgactacagctgcttggtggatcctaaggccacaccctgaatctacctgcaaaagatgcctgggaaacatatttgccagctcttcagtctcagcacgctagagagggattgaaacaagtgttgaataaaccaattagcagttatgagaacagtgccaggaaagtcacactgcctaccttactgaagcctgaaagtctaccatttgaaaataatttcttaaaattaagcactgttggccgggtatggtggctcccgccagtaatcccagaactttgggaggccgaggctggtggatcacgaggtcaagaga

SEQ ID NO: 388574 - DNA, 297 bp, Homo sapiens
taaaaggtgttaaggctgtttggtctgtggagggcaagactaaagggactaccatcaagtttctgaaattcatgaagagtatgatcaatgatacattttcatatcatattcaattattgagcacctactgtgttcaagttgctcaacattaaaagacagtcctcggccgggcgcggtggctcatgcctataatcccagcactttgggaggccgaggcaggtgaatcacgaggtcaggagttcaagaccagcctgactaacatggtgaaacccccacctctactaaaaatacaaaaat

SEQ ID NO: 388575 - DNA, 338 bp, Homo sapiens
gcattcctatgacccaggaaattccaagggatctagtagctctgtgtcaggaactgggatcggagaccaaatattagatggtctaatatttggagctaaagatgctcctatagcatattttcccattatttcacagcatcatggcattgcatataacctcattttttcatatatgacctatctctgatctattacctcacctccaaggtcctgggagataaggaggcaatgacatcatttttcagggttgttttagggatgaggggcaaggcctctcaccttgagagagagtggcagtgttgggcccactaatagaggatcccacgaactgccagagg

SEQ ID NO: 388576 - DNA, 374 bp, Homo sapiens
tgatttatcactagttctaactagccttccatcagtcattccaaagtaatggtctgtaatgagaaatcactatgtataattatacacaataaaaatatatacaacaggtattttgataatatgataattaaaaccaaatatagtcattgaggcttagaatttttaaaaactgtattatatattgtaaaatcccatccttttttttttttagatggagtcttgctctgtcgcccaggctggagtccagtggcatgatctcagctcactgcaacctccacttcctgggttcaagcaattcccttgtctcagccctccgagtagctgggactacaggcacccaccactatgcctgaccaacttttgtatttttagtg

SEQ ID NO: 388577 - DNA, 857 bp, Homo sapiens
tcctggttcatttaatccaaatgctgatctgtcttcagggaccaaacttgacactttccatgaggacttctgtcaccattcctgtccctttctgacctttaggttcctctggggtttactggacatttgtgtgggcacctcatgatgtactgatgtattaaatcagggagtcttcttacacttttgtaaactctacattgcctagcacagttctatggacttaaatattttattctttgagttaaaggaataggtgcagtgaatgaatcaaagaattctactcaatatagccttgctctactaaccttaatcagttactcctagtcagggtcatttaaatagtctccagattgcttttcagtgagacaacccccctaccccccgcctttttttaaaccaagtttttagttccctgtagaaaaccatgggggaaatatttcttgtcgtaatatagatgagaaactgttttggttctttactaccatcttgtaatgcattaatgcattgtagtcctccttggagttttaggaggatcaatcctacttacatttcacatgatttgaagtatgttaaaaagatcccttatgtacagtgtattaatatcatagataaattctgttgacaggttaatgattcttaaattcagctgcccatcaattgagtagttttaaaaaatgtagacttcagtccaactctagccctactaaaccagaattaaggtaggagtggaggtgagaatggacttacttagataagctcattcttagtcgtagatagcttgggaatctcatatgcagagtatccatattgactgtagaagaaaaaagctaaaatgtctgtatgatagggacaagtga

SEQ ID NO: 388578 - DNA, 423 bp, Homo sapiens
ctcccataattcccatgtgttgtgggagggacccagtggaagacgactgaattatggggatgggtctttcccatgctgttctcgtgatagtgaataggtatcatgagatctgatggttttaaaaatgggagcttccttgtacaagctctctttgcctgctgccatccacataagatatgacttgctcctccttgcctttcaccatgattgtgaggtctccccagccacgtggaactgttaagtccaataaacctctttcttttgtaaattgcccagtctcggatatgtctttatcagcagcatggaaatggactaatacaaacacttactattagaagttcttctgtacgttgctctaaaatctttttcactcttattttgtaacactgataattctgccaccacaataaacagaacaagatt

SEQ ID NO: 388579 - DNA, 206 bp, Homo sapiens
cctctgagagatcagcagggtgaagaaaagggagtttttatggtgctataagccagagaccccaaaaattgccatcaaatactcatccattctgagtgcaaaactcagcaagccactgtgaaaacaactcccaaaactagaagattcacaggcttccatttacaagtgagcccagaaacactaaggggagaccttccacttctgca

SEQ ID NO: 388580 - DNA, 780 bp, Homo sapiens
agcgggcgcgggggcgcccctgcccaccgctcccggcagggcttttggtggccatgggggataaggggcgttgactcacccgggcggggctccgggagttgcacagaccaaggccctgtgcctccctctacagccctcagggagctcattgaggagctggtcaacatcacccagaaccagaaggctccgctctgcaatggcagcatggtatggagcatcaacctgacagctggcatgtactgtgcagccctggaatccctgatcaacgtgtcaggctgcagtgccatcgagaagacccagaggatgctgagcggattctgcccgcacaaggtctcagctgggcagttttccagcttgcatgtccgagacaccaaaatcgaggtggcccagtttgtaaaggacctgctcttacatttaaagaaactttttcgcgagggacagttcaactgaaacttcgaaagcatcattatttgcagagacaggacctgactattgaagttgcagattcatttttctttctgatgtcaaaaatgtcttgggtaggcgggaaggagggttagggaggggtaaaattccttagcttagacctcagcctgtgctgccgtcttcagcctagccgacctcagccttccccttgcccagggctcagcctggtgggcctcctctgtccagggccctgagctcggtggacccagggatgacatgtccctacacccctcccctgccctagagcacactgtagcattacagtgggtgcccccttgccagacatgtggtggg

SEQ ID NO: 388581 - DNA, 744 bp, Homo sapiens
agagtctgtgtcacctgtgtcagctgtggataaggaatgagaccaccatgatgcaaggagaggtggctcatggggcctggctcccaggacttttcctgatgcatgtttgcatttctggggccggaatcaagagcctctgggcttgtggcttcacagaatggtggaagaagactggtggagttagagacagaagactcaaccatgataatcagcttgttaatcagcattttggttcaaaaataatttgggagtgtattgatcaggtttctgccaggctaatgttgcacaacaaatggcctccaaattcagaggcttaaattatttctttcttgctcactactcggtgttaagctgtgtctctcatgggctcatttgggaataggaaggcctggtcaggttctgggctaggtttaaggtttaaggtttatgtcctcattctgggatcaggggatcctggggcatatttttgtttgtgcttctcctgtcaggtataggaagccaagataaatcatgcaggcaaatttaaagcttctgtcggctggttgcagtggctcagcatgtaatcccagcactttgggaggcacaggtgggcagatcacctgaggtcaggagttcaagaccagcctgacaaacatggagaaaccccgtctctactaaaactgcaaaaagtagccgggtgtggtggcagacacctgtagtcccagctattctggagactgaggcaggagaatagcttgaatccag

SEQ ID NO: 388582 - DNA, 411 bp, Homo sapiens
gggggcggggtgcggctggggcgaattagttgccattcggagtgaggagtgggtagaagcggcggcggcggcggcggcgtttgcggtggcgcggactccgaggagcgccagcacctcgaggccctttctctctaccctggtccccagaagcaggggtcccggccctccttgcagctgccgggttctcccgtgcgtgcagccctgcgagggctgaggagaaggctgcgagcggccctcggggctgcgtgatccgggccgttgccctgtcagcacgatgcctggagcggtggcggcggcggctccgggctccttgcggccccggccgtgaccgccacaccgagcccagccgggcggttgcggccgttggacgtttgttttcgcagccttcccctcccccctcgccgaggcggc

SEQ ID NO: 388583 - DNA, 477 bp, Homo sapiens
gggggcggggtgcggctggggcgaattagttgccattcggagtgaggagtgggtagaagcggcggcggcggcggcggcgtttgcggtggcgcggactccgaggagcgccagcacctcgagggcccgcagagccaccatgtccactgcctcctcctcctcctcctccagttcctctcagacccctcatcccccgtcgcagaggatgaggcgcagcgccgcggggtccccgcccgccgtcgccgccgccgggagcgggaacggtgcgggcggcggcggcggcgtgggctgcgccccggctgcgggagccggccggctgctgcagcccatccgcgccacggtgccctaccagctcttgcggggcagccagcacagtccccctttcgcaattccaccaaacacccacaccccaaccacacacaacacttcacaaaatccacaccccaccaccaaccaaaccccacacctaccaccacccaa

SEQ ID NO: 388584 - DNA, 973 bp, Homo sapiens
  misc_feature (11)..(11): n is a, c, g, or t
  misc_feature (23)..(23): n is a, c, g, or t
  misc_feature (52)..(53): n is a, c, g, or t
  misc_feature (64)..(64): n is a, c, g, or t
  misc_feature (330)..(330): n is a, c, g, or t
agttttccccngagtcattgtanagtcacccgatctaaatagattacttaannaaaaagataanctttgtcatatccacagtcagattttcttccaaatcttccttgctctcagaatcggtagttttgaagactcaatcactatggggcttttcaggaacacccatagctaactgtcgtcctatgttccccaccgtgacgcctcctgagaaaaatatacaagggagccaagaacgaatatagaggaaatctggggatgtatactgatagacaccattatacacgagaaactgcgtgatcagcgtagctagaaaagctatggtgatccccnacccaaggccacttctggaacgatcaaatgtccaccaaaggcccaaagatagggaagctgtgtgtctccgcagtgacgtgggcgggccgaggactcggtgacgtcagagggctgtgtgtagcgatgtgtgtggggttcggagccgccgggcacagccgaagggagcgggcgagcggcgacggcggcggcggcgggcacaggtgcggctccggcttacggcggcgacgcggcggaggcggcgggaggccagaggcgctcaccctcctaggagcccgacggcggcgacaggggcggtggggaattcacaaagctcgtcgagcttacccgggcaccgaggcccgagtagggggtttggatgcgcgggtcccgggtggggtcggggccagagggggtcgctaggcgggtgttccacggctgatcacgcttcgttggccccaggcggtgggcgccggcagggcagggcgctgtagttgacgggagccgcggggaccccggagacccggacgcccgtcaccgcccccctcccccagtccagcagcgctccgcggggatgccctggtctcgacccggtccgtcagcccccggcggcgcagggatccgcgcccggcgcctaaactgccctggtgtcctcttcgttctggcc

SEQ ID NO: 388585 - DNA, 560 bp, Homo sapiens
ctacttgggaggctgaggtgggaggactgtttgagtccggggtttcaggctgcagtgaaccatgatcatgccaccgcactgcagcctgggtgacagaacaaaaccctgtctctagaaaaaaaaaaaaagaaatccaagtttttatcaccttctgagagtaatcaacattcaggaggaacagagaagaacaaaagaccactgaatggttgagggtgggttgctggttaggttcagtggccagctgagtagtatctgaaaaattcattagtaaaattatggcactaggggtgagtcatgcagtcgaaggatgaatactaaatccagtacaaacacccatggtctttctttacatgaattccagtgaaaaatttctaagtgcctaaaatagcaagcggtctgaaatgatggcagcagtttattaaagactgaaaaaagaggccaggcacggtggctcacacctgtaatcccagcactttaggagtccaagaccagtggatcacaaggtcaggagttcaagaccagcctgtccaacatgctgaaaccccgtatctacagaaaat

SEQ ID NO: 388586 - DNA, 851 bp, Homo sapiens
ccgctctggggggtttatcatcagaaggagagagacccgagggagccacctgcccactccagatgaggtgctccgtggaacacgaggagcacacgaaacccgatcagctttgtgtgacttccgcgtgtggggtggcacgcgtgtgcttgctattcattgtttctgctgggggcatttttatcttttgaaattctttcttctgaacctttcgtgcctaccagaaccagcctgtcaggatgcgcctgatctccacagcagcccctccatccgactctgaagaagccgtcagctcacagaagattccttttgtttaatgagtaacagctactgactcactccatggcccaccagaatgacagactcctgttcaaaagcctgatctgaagttgctgccatgacacaagcaatgcctgtgaagtgcctgcagcccacgcctctgagacaggccaggcgtgtggtggacacgcagctgcaggcgcttgctctctgtcatcacgagaaaaagtatccctgcaccggacaagaaaggacctgcaggcacactcacaatcaacttcctgatttcacaatgatggtagggagccctgtgggcactagaagcagcggggaggggttctagacctttggtgcccaagagacttccgtgcatggaaaatgttgacttctagcttccatctgcagcgaactctccatcgggacatgggacctggctgtacgagttaattcaaactgagccactttccattagggcaccaaatggagttagcaatccaagattattttattttctgggctatccagatgacttaaagcctcgctgaagttcccatgagaagagtttaaacaaccca

SEQ ID NO: 388587 - DNA, 427 bp, Homo sapiens
tccatggaggctgaagtaactgggacacaaaagacagagcctccagtcccaggctctgctgatctgggctccttagggaccactgggaaagctggaccttgtgcatcccctacgagacatatgaggtgatggggagctgcatctctatcttgtgggcatctttgctgtggtttgagagtagaacaaggtcaaatcttaaacagattctaagtctctgctattcttgaatgccatgatcagacctagtacatatctgccagtctcctcttaaagggcagcccttgagctacagatggtgctttgagaggggtgcccagcagtgagtgcaggaacttttcaattgcctgactcgggtgcccctggatggcagcagttcctggaactcagctttccttcctcttctctcagaccaccatcattcatgctg

SEQ ID NO: 388588 - DNA, 4902 bp, Homo sapiens
  misc_feature (1646)..(1646): n is a, c, g, or t
ggagtcgcgctgcgcacgggggcccgggaagggtttgggctgcggacgtctggggtgaccatgaagaactggggcgctggggtgagggaacggggtgcagaacccacagttgggtgcgctgctccaagagggaacttgggggtagcatttgggactcgaaggagttgggtccaggtaggcaggggaacctggggtgcactgctgagcagacctgggcgcccgagaacggcccagcctctgggtctgactttgggataggacaggagctgtggggcatcctgcctctctgcggagtctgaaggctcctctccttaacagctgggctttttccctccttcccaatcgagtctgggcgtccagcccccgagtgctcgtcacgctggaccctggcgcggagccctggcatcacgactcggaggccgagactctctcctggagtcacccaggagagatggagccatctcagtgtgtggaggagctggaggatgatgtgttccaaccagaggatggggagccggtgacccaacccgggagcttgctctctgctgacctgtttgcccagagcctactggactgccccctcagccgacttcagctcttccctctcacccactgctgtggccctggccttcgacccaccagccaggaagacaaagctacccagactctcagcccagcctcccccagccaaggtgtcatgctgccttgtggggtgactgaggaaccccagcgactcttttatggcaatgctggctatcggcttcctctccctgccagtttcccagcagtcttgcccattggggagcagccccccgaagggcagtggcaacatcaagcagaggtacagattgcccgaaagcttcagtgcattgcagaccagttccaccggcttcatgtgcagcaacaccagcagaaccaaaatcgtgtgtggtggcagatcctcctcttcctgcacaaccttgctttgaatggagaagagaacaggaacggggcaggccctaggtgagggtgggctgccctcttcacatggggcaccaggaacaccgtctggaacaggaaggacatcgggcaggactgacactgtgtcttgtgaaattgtttttttgttgttattttgtgttttaattttttttaatttctctctgagtgtacatacaacatactcaagcgggaccttctttctctgtcaggcccttgacctggaatgggggcctttgtcaaacactgttgaaggagaggctgatgtgtctgtgatggtgagaattcccaagggctctgacaagtagattcttcgactgaggaatctaccagttgtcgaagatgatccgttagtgatgttctctgggaagtggactgtggtttttccagaggaactcagttaagaaatcgagagtggattagactcccagttccaccaaacctatgagccttccactgtggatgggggccgtgatcctgatggtcacattgctttaacccagcagggcttcggccaggggctttccacttgaggatagcagcttcactaggctggccggccagctccacatctgactgggttcttacttctcagccagtacctgccccatgggctcaaggattcctggccagtcctgccacctccagcagacctcagggagggttgngtttctctaaggacccctcaaacatgtcgcaaaatgaaccaaacttctggctaggcctcaaaactgacttggtcccacttggaggccccaggattggtcctgaggtacagagccactgccaccactggcggcctgggaccagctgggtgtcagccacggatgagccgaatagccagtcagcatgttgctgctggcagcctgtgcctttgtcagctcttctttcaaaagaccccaccgacagaccgcattccacccccaacatcggcactgagggacatcgggggcaagtttgcagtggggccggaaaatatggtggccaccctaccatgagagtcagccgtaggggaccccagaccccttggtttccttggaaacaacatacctcttcccccttatccccagtcctttttcatacctagtgggatacagaagaagccaggacagtggctttgccagctaagtgacttttagagtaacagataacgattagagtggggaaccgtcaaagctgggtacacatttcctatcttcctccagcttccagctaggccagaagggcatgctctggaacccagcaggatcacagctgcctgtgcacgtcttcccttctctccctgctgcggcacttatggagaggatctaaagcagccggtgtggcagctccgatagcaggcacagggaatctgttaaccagacgctagaaactaaattataacttttgcatatgtgagaaaagacaacattggtgctaacagtgaagtaaggcccaaaggaaagacggcttccctggacaaagaagacctcagggctacccaaggaaataggaggagtctagagtagactcacaaatctgaacaagcccaagtcttccagttctgaggagaggaggtcttcagtactattgaaggagacattgatcttctggatgtacagttgtgcaggttgttcactgcacaagggcacctgcagctaatggaggctggaattcagcttgtgttctgctcactaagctgtgtgcgtgccctggtgtggggctacttctcccaagaagaaggggtgcctttcctaatttgcaaaggtgccatatgggctcacagcaccctggaggagaagggcctcaaactgtgcatgtaagcctttgttttgttctgctcagatattctggatattacctcttcttggtcagaattctattctcagggtgtgtaccatgatttgtctgctaagaagacgggttcctgctttgcagagaaggagccggggaccagcttgaagactggctctgggacacactgaccattgtgaaattcagccttccctgtgggtctccataccattttatgatgtgtatgggacatacgttgttctcccctctctggatcaaggtggtgacaggcagcctgctgccgtatgcttcagtggcacacaccaaaaaaccgggattatttacagcagccactattcaccccttttggcagactctccacctgagttcagtgagagagaaaatgatttagatcttggtgctggggcaaggccatcagcttcagagaccttgccaggcccaggctgggtgccctgtggcctgagaactgagcccagactttgacaaacccacctcaacatcaagcctggggcaggtggaaggtggtctgactgcactgtctccatcttatgcaaagccaggaactcactcactgtcttaagtgagccagggcaaaatttacacccctcacgtttccctctcccttcttccccaccaacaaaacccaggaggtagctggcagagtagctgtcaggaaggagaaaggttctttctggctggttgtttttaattggcttagtgatctaaactggccccttcctcctctgcctggtgagttggcctaaacattcctcaagtctagcctcaggagacctgcccctcccccccgacctccaccccctcagactccatcccccacccccaggagcctggctgtctctagcgaggggtggagaatcagatttagagggagggagagtctgacctggatcctgacctgtaaccagctgaagacggtggaggctttgtggcttgctgagggtgggggttgggagagggactggaaaccttcctcctcgggaaagaaatgcctgggaggaagggaagcctgatattcagggtcaaaacagcccttctaattcacaaccccaaagcaggggtttctagaagttggtcaacagatctggtgagggaagtccccaggccagacgctggactcctgcaatgagggtggaggactcagcctggcctctgcctggcctgtttcaaagtctgggccactggcagccttctcttgctcaatccgaggtggaaaaagatcacctcccagtgacctccctcagcccccaggggagtaggtctgtgtccgaagctatgtggcaggcttgtttgaaggacccagaggggcccagctgacctgtctcactgctcctggcagcccagccccatcggcaggtggcccctgcctgggggttattcgggacggttcagccagggcctcccaggaagagtgctgtggagccacggtgactgtcctggacagcaaggagcatgctaccccagtgagcacttctttttgagggacttgatggggaggtggggtaggcagaagggacgtggcagaagcgggaagactttggtcaccatggctctgcaggccttctgcaaatcagtgctggcctgggctggaaacagctctgtgtgtgaaggtgaggactcttggaagcaggccatcctggccagacaccctagcaggaaggggctcacctgtcacccttaggcagcctgagggctggtggggacttttgagtcttgaggggatagcggaaaaagctgagctcataggtgcccagccagcctcccagctaaaggtgctcagagccccactgccccctctctctgtgcaggtggccagtgcccctccctgctctgggagcattgctagccttctaccccatccctggatccacaggggctatcgaggagacccagtgagaatgtagcattttgttcatccccagggtagctgccctggggtctgggcactctgcctctgggagagaggaagaagaaaggggccccattttttaaaaaactgtacagagcctttggctttatgtgtttatgttcttcacatgcatatgtgtgtatgtgtgtatatctttccccccatcaattggtacaatttttaataaaatcatttaaagcaaa

SEQ ID NO: 388589 - DNA, 4244 bp, Homo sapiens
  misc_feature (1646)..(1646): n is a, c, g, or t
ggagtcgcgctgcgcacgggggcccgggaagggtttgggctgcggacgtctggggtgaccatgaagaactggggcgctggggtgagggaacggggtgcagaacccacagttgggtgcgctgctccaagagggaacttgggggtagcatttgggactcgaaggagttgggtccaggtaggcaggggaacctggggtgcactgctgagcagacctgggcgcccgagaacggcccagcctctgggtctgactttgggataggacaggagctgtggggcatcctgcctctctgcggagtctgaaggctcctctccttaacagctgggctttttccctccttcccaatcgagtctgggcgtccagcccccgagtgctcgtcacgctggaccctggcgcggagccctggcatcacgactcggaggccgagactctctcctggagtcacccaggagagatggagccatctcagtgtgtggaggagctggaggatgatgtgttccaaccagaggatggggagccggtgacccaacccgggagcttgctctctgctgacctgtttgcccagagcctactggactgccccctcagccgacttcagctcttccctctcacccactgctgtggccctggccttcgacccaccagccaggaagacaaagctacccagactctcagcccagcctcccccagccaaggtgtcatgctgccttgtggggtgactgaggaaccccagcgactcttttatggcaatgctggctatcggcttcctctccctgccagtttcccagcagtcttgcccattggggagcagccccccgaagggcagtggcaacatcaagcagaggtacagattgcccgaaagcttcagtgcattgcagaccagttccaccggcttcatgtgcagcaacaccagcagaaccaaaatcgtgtgtggtggcagatcctcctcttcctgcacaaccttgctttgaatggagaagagaacaggaacggggcaggccctaggtgagggtgggctgccctcttcacatggggcaccaggaacaccgtctggaacaggaaggacatcgggcaggactgacactgtgtcttgtgaaattgtttttttgttgttattttgtgttttaattttttttaatttctctctgagtgtacatacaacatactcaagcgggaccttctttctctgtcaggcccttgacctggaatgggggcctttgtcaaacactgttgaaggagaggctgatgtgtctgtgatggtgagaattcccaagggctctgacaagtagattcttcgactgaggaatctaccagttgtcgaagatgatccgttagtgatgttctctgggaagtggactgtggtttttccagaggaactcagttaagaaatcgagagtggattagactcccagttccaccaaacctatgagccttccactgtggatgggggccgtgatcctgatggtcacattgctttaacccagcagggcttcggccaggggctttccacttgaggatagcagcttcactaggctggccggccagctccacatctgactgggttcttacttctcagccagtacctgccccatgggctcaaggattcctggccagtcctgccacctccagcagacctcagggagggttgngtttctctaaggacccctcaaacatgtcgcaaaatgaaccaaacttctggctaggcctcaaaactgacttggtcccacttggaggccccaggattggtcctgaggtacagagccactgccaccactggcggcctgggaccagctgggtgtcagccacggatgagccgaatagccagtcagcatgttgctgctggcagcctgtgcctttgtcagctcttctttcaaaagaccccaccgacagaccgcattccacccccaacatcggcactgagggacatcgggggcaagtttgcagtggggccggaaaatatggtggccaccctaccatgagagtcagccgtaggggaccccagaccccttggtttccttggaaacaacatacctcttcccccttatccccagtcctttttcatacctagtgggatacagaagaagccaggacagtggctttgccagctaagtgacttttagagtaacagataacgattagagtggggaaccgtcaaagctgggtacacatttcctatcttcctccagcttccagctaggccagaagggcatgctctggaacccagcaggatcacagctgcctgtgcacgtcttcccttctctccctgctgcggcacttatggagaggatctaaagcagccggtgtggcagctccgatagcaggcacagggaatctgttaaccagacgctagaaactaaattataacttttgcatatgtgagaaaagacaacattggtgctaacagtgaagtaaggcccaaaggaaagacggcttccctggacaaagaagacctcagggctacccaaggaaataggaggagtctagagtagactcacaaatctgaacaagcccaagtcttccagttctgaggagaggaggtcttcagtactattgaaggagacattgatcttctggatgtacagttgtgcaggttgttcactgcacaagggcacctgcagctaatggaggctggaattcagcttgtgttctgctcactaagctgtgtgcgtgccctggtgtggggctacttctcccaagaagaaggggtgcctttcctaatttgcaaaggtgccatatgggctcacagcaccctggaggagaagggcctcaaactgtgcatgtaagcctttgttttgttctgctcagatattctggatattacctcttcttggtcagaattctattctcagggtgtgtaccatgatttgtctgctaagaagacgggttcctgctttgcagagaaggagccggggaccagcttgaagactggctctgggacacactgaccattgtgaaattcagccttccctgtgggtctccataccattttatgatgtgtatgggacatacgttgttctcccctctctggatcaaggtggtgacaggcagcctgctgccgtatgcttcagtggcacacaccaaaaaaccgggattatttacagcagccactattcaccccttttggcagactctccacctgagttcagtgagagagaaaatgatttagatcttggtgctggggcaaggccatcagcttcagagaccttgccaggcccaggctgggtgccctgtggcctgagaactgagcccagactttgacaaacccacctcaacatcaagcctggggcaggtggaaggtggtctgactgcactgtctccatcttatgcaaagccaggaactcactcactgtcttaagtgagccagggcaaaatttacacccctcacgtttccctctcccttcttccccaccaacaaaacccaggaggtagctggcagagtagctgtcaggaaggagaaaggttctttctggctggttgtttttaattggcttagtgatctaaactggccccttcctcctctgcctggtgagttggcctaaacattcctcaagtctagcctcaggagacctgcccctcccccccgacctccaccccctcagactccatcccccacccccaggagcctggctgtctctagcgaggggtggagaatcagatttagagggagggagagtctgacctggatcctgacctgtaaccagctgaagacggtggaggctttgtggcttgctgagggtgggggttgggagagggactggaaaccttcctcctcgggaaagaaatgcctgggaggaagggaagcctgatattcagggtcaaaacagcccttctaattcacaaccccaaagcaggggtttctagaagttggtcaacagatctggtgagggaagtccccaggccagacgctggactcctgcaatgagggtggaggactcagcctggcctctgcctggcctgtttcaaagtctgggccactggcagccttctaccccatccctggatccacaggggctatcgaggagacccagtgagaatgtagcattttgttcatccccagggtagctgccctggggtctgggcactctgcctctgggagagaggaagaagaaaggggccccattttttaaaaaactgtacagagcctttggctttatgtgtttatgttcttcacatgcatatgtgtgtatgtgtgtatatctttccccccatcaattggtacaatttttaataaaatcatttaaagcaaa

SEQ ID NO: 388590 - DNA, 3812 bp, Homo sapiens
  misc_feature (1646)..(1646): n is a, c, g, or t
ggagtcgcgctgcgcacgggggcccgggaagggtttgggctgcggacgtctggggtgaccatgaagaactggggcgctggggtgagggaacggggtgcagaacccacagttgggtgcgctgctccaagagggaacttgggggtagcatttgggactcgaaggagttgggtccaggtaggcaggggaacctggggtgcactgctgagcagacctgggcgcccgagaacggcccagcctctgggtctgactttgggataggacaggagctgtggggcatcctgcctctctgcggagtctgaaggctcctctccttaacagctgggctttttccctccttcccaatcgagtctgggcgtccagcccccgagtgctcgtcacgctggaccctggcgcggagccctggcatcacgactcggaggccgagactctctcctggagtcacccaggagagatggagccatctcagtgtgtggaggagctggaggatgatgtgttccaaccagaggatggggagccggtgacccaacccgggagcttgctctctgctgacctgtttgcccagagcctactggactgccccctcagccgacttcagctcttccctctcacccactgctgtggccctggccttcgacccaccagccaggaagacaaagctacccagactctcagcccagcctcccccagccaaggtgtcatgctgccttgtggggtgactgaggaaccccagcgactcttttatggcaatgctggctatcggcttcctctccctgccagtttcccagcagtcttgcccattggggagcagccccccgaagggcagtggcaacatcaagcagaggtacagattgcccgaaagcttcagtgcattgcagaccagttccaccggcttcatgtgcagcaacaccagcagaaccaaaatcgtgtgtggtggcagatcctcctcttcctgcacaaccttgctttgaatggagaagagaacaggaacggggcaggccctaggtgagggtgggctgccctcttcacatggggcaccaggaacaccgtctggaacaggaaggacatcgggcaggactgacactgtgtcttgtgaaattgtttttttgttgttattttgtgttttaattttttttaatttctctctgagtgtacatacaacatactcaagcgggaccttctttctctgtcaggcccttgacctggaatgggggcctttgtcaaacactgttgaaggagaggctgatgtgtctgtgatggtgagaattcccaagggctctgacaagtagattcttcgactgaggaatctaccagttgtcgaagatgatccgttagtgatgttctctgggaagtggactgtggtttttccagaggaactcagttaagaaatcgagagtggattagactcccagttccaccaaacctatgagccttccactgtggatgggggccgtgatcctgatggtcacattgctttaacccagcagggcttcggccaggggctttccacttgaggatagcagcttcactaggctggccggccagctccacatctgactgggttcttacttctcagccagtacctgccccatgggctcaaggattcctggccagtcctgccacctccagcagacctcagggagggttgngtttctctaaggacccctcaaacatgtcgcaaaatgaaccaaacttctggctaggcctcaaaactgacttggtcccacttggaggccccaggattggtcctgaggtacagagccactgccaccactggcggcctgggaccagctgggtgtcagccacggatgagccgaatagccagtcagcatgttgctgctggcagcctgtgcctttgtcagctcttctttcaaaagaccccaccgacagaccgcattccacccccaacatcggcactgagggacatcgggggcaagtttgcagtggggccggaaaatatggtggccaccctaccatgagagtcagccgtaggggaccccagaccccttggtttccttggaaacaacatacctcttcccccttatccccagtcctttttcatacctagtgggatacagaagaagccaggacagtggctttgccagctaagtgacttttagagtaacagataacgattagagtggggaaccgtcaaagctgggtacacatttcctatcttcctccagcttccagctaggccagaagggcatgctctggaacccagcaggatcacagctgcctgtgcacgtcttcccttctctccctgctgcggcacttatggagaggatctaaagcagccggtgtggcagctccgatagcaggcacagggaatctgttaaccagacgctagaaactaaattataacttttgcatatgtgagaaaagacaacattggtgctaacagtgaagtaaggcccaaaggaaagacggcttccctggacaaagaagacctcagggctacccaaggaaataggaggagtctagagtagactcacaaatctgaacaagcccaagtcttccagttctgaggagaggaggtcttcagtactattgaaggagacattgatcttctggatgtacagttgtgcaggttgttcactgcacaagggcacctgcagctaatggaggctggaattcagcttgtgttctgctcactaagctgtgtgcgtgccctggtgtggggctacttctcccaagaagaaggggtgcctttcctaatttgcaaaggtgccatatgggctcacagcaccctggaggagaagggcctcaaactgtgcatgtaagcctttgttttgttctgctcagatattctggatattacctcttcttggtcagaattctattctcagggtgtgtaccatgatttgtctgctaagaagacgggttcctgctttgcagagaaggagccggggaccagcttgaagactggctctgggacacactgaccattgtgaaattcagccttccctgtgggtctccataccattttatgatgtgtatgggacatacgttgttctcccctctctggatcaaggtggtgacaggcagcctgctgccgtatgcttcagtggcacacaccaaaaaaccgggattatttacagcagccactattcaccccttttggcagactctccacctgagttcagtgagagagaaaatgatttagatcttggtgctggggcaaggccatcagcttcagagaccttgccaggcccaggctgggtgccctgtggcctgagaactgagcccagactttgacaaacccacctcaacatcaagcctggggcaggtggaaggtggtctgactgcactgtctccatcttatgcaaagccaggaactcactcactgtcttaagtgagccagggcaaaatttacacccctcacgtttccctctcccttcttccccaccaacaaaacccaggaggtagctggcagagtagctgtcaggaaggagaaaggttctttctggctggttgtttttaattggcttagtgatctaaactggccccttcctcctctgcctggtgagttggcctaaacattcctcaagtctagcctcaaggaaggaacctggccccccttcccaggggggggagaagagaagcagcagcggaaacgaatacatagcgcaggaggacccaaggaagaccagcagattggaggcgaacgaagagcgggacagcatatacccgcaaaaagagatcaccaaaaaagggaacaaaggaacaacgccgaaacggagcaaaagggtcaaaaagagaaaccaactaacgggaaagggggagacgaaacaaagagacgggaaaaagaaaaa

SEQ ID NO: 388591 - DNA, 189 bp, Homo sapiens
tctggtcttttatttttcaaggtgtggtaaaaatgcaaggagatcagttaggaaattaaagccttctagctttctcagctgccagcttgagtgacctgaaggcgctcagctttcgccgtgatttcctttcccctcttggagttgagaagagtgattccgaccaccacgcgataggcagcacagcagagg

SEQ ID NO: 388592 - DNA, 4547 bp, Homo sapiens
  misc_feature (1291)..(1291): n is a, c, g, or t
attttcccaggtaccctgcatgcatatagctgctgattctactcctgctattgctcacaaccctcagagtcaaactttgtgaccggcctaggagagatggagccatctcagtgtgtggaggagctggaggatgatgtgttccaaccagaggatggggagccggtgacccaacccgggagcttgctctctgctgacctgtttgcccagagcctactggactgccccctcagccgacttcagctcttccctctcacccactgctgtggccctggccttcgacccaccagccaggaagacaaagctacccagactctcagcccagcctcccccagccaaggtgtcatgctgccttgtggggtgactgaggaaccccagcgactcttttatggcaatgctggctatcggcttcctctccctgccagtttcccagcagtcttgcccattggggagcagccccccgaagggcagtggcaacatcaagcagaggtacagattgcccgaaagcttcagtgcattgcagaccagttccaccggcttcatgtgcagcaacaccagcagaaccaaaatcgtgtgtggtggcagatcctcctcttcctgcacaaccttgctttgaatggagaagagaacaggaacggggcaggccctaggtgagggtgggctgccctcttcacatggggcaccaggaacaccgtctggaacaggaaggacatcgggcaggactgacactgtgtcttgtgaaattgtttttttgttgttattttgtgttttaattttttttaatttctctctgagtgtacatacaacatactcaagcgggaccttctttctctgtcaggcccttgacctggaatgggggcctttgtcaaacactgttgaaggagaggctgatgtgtctgtgatggtgagaattcccaagggctctgacaagtagattcttcgactgaggaatctaccagttgtcgaagatgatccgttagtgatgttctctgggaagtggactgtggtttttccagaggaactcagttaagaaatcgagagtggattagactcccagttccaccaaacctatgagccttccactgtggatgggggccgtgatcctgatggtcacattgctttaacccagcagggcttcggccaggggctttccacttgaggatagcagcttcactaggctggccggccagctccacatctgactgggttcttacttctcagccagtacctgccccatgggctcaaggattcctggccagtcctgccacctccagcagacctcagggagggttgngtttctctaaggacccctcaaacatgtcgcaaaatgaaccaaacttctggctaggcctcaaaactgacttggtcccacttggaggccccaggattggtcctgaggtacagagccactgccaccactggcggcctgggaccagctgggtgtcagccacggatgagccgaatagccagtcagcatgttgctgctggcagcctgtgcctttgtcagctcttctttcaaaagaccccaccgacagaccgcattccacccccaacatcggcactgagggacatcgggggcaagtttgcagtggggccggaaaatatggtggccaccctaccatgagagtcagccgtaggggaccccagaccccttggtttccttggaaacaacatacctcttcccccttatccccagtcctttttcatacctagtgggatacagaagaagccaggacagtggctttgccagctaagtgacttttagagtaacagataacgattagagtggggaaccgtcaaagctgggtacacatttcctatcttcctccagcttccagctaggccagaagggcatgctctggaacccagcaggatcacagctgcctgtgcacgtcttcccttctctccctgctgcggcacttatggagaggatctaaagcagccggtgtggcagctccgatagcaggcacagggaatctgttaaccagacgctagaaactaaattataacttttgcatatgtgagaaaagacaacattggtgctaacagtgaagtaaggcccaaaggaaagacggcttccctggacaaagaagacctcagggctacccaaggaaataggaggagtctagagtagactcacaaatctgaacaagcccaagtcttccagttctgaggagaggaggtcttcagtactattgaaggagacattgatcttctggatgtacagttgtgcaggttgttcactgcacaagggcacctgcagctaatggaggctggaattcagcttgtgttctgctcactaagctgtgtgcgtgccctggtgtggggctacttctcccaagaagaaggggtgcctttcctaatttgcaaaggtgccatatgggctcacagcaccctggaggagaagggcctcaaactgtgcatgtaagcctttgttttgttctgctcagatattctggatattacctcttcttggtcagaattctattctcagggtgtgtaccatgatttgtctgctaagaagacgggttcctgctttgcagagaaggagccggggaccagcttgaagactggctctgggacacactgaccattgtgaaattcagccttccctgtgggtctccataccattttatgatgtgtatgggacatacgttgttctcccctctctggatcaaggtggtgacaggcagcctgctgccgtatgcttcagtggcacacaccaaaaaaccgggattatttacagcagccactattcaccccttttggcagactctccacctgagttcagtgagagagaaaatgatttagatcttggtgctggggcaaggccatcagcttcagagaccttgccaggcccaggctgggtgccctgtggcctgagaactgagcccagactttgacaaacccacctcaacatcaagcctggggcaggtggaaggtggtctgactgcactgtctccatcttatgcaaagccaggaactcactcactgtcttaagtgagccagggcaaaatttacacccctcacgtttccctctcccttcttccccaccaacaaaacccaggaggtagctggcagagtagctgtcaggaaggagaaaggttctttctggctggttgtttttaattggcttagtgatctaaactggccccttcctcctctgcctggtgagttggcctaaacattcctcaagtctagcctcaggagacctgcccctcccccccgacctccaccccctcagactccatcccccacccccaggagcctggctgtctctagcgaggggtggagaatcagatttagagggagggagagtctgacctggatcctgacctgtaaccagctgaagacggtggaggctttgtggcttgctgagggtgggggttgggagagggactggaaaccttcctcctcgggaaagaaatgcctgggaggaagggaagcctgatattcagggtcaaaacagcccttctaattcacaaccccaaagcaggggtttctagaagttggtcaacagatctggtgagggaagtccccaggccagacgctggactcctgcaatgagggtggaggactcagcctggcctctgcctggcctgtttcaaagtctgggccactggcagccttctcttgctcaatccgaggtggaaaaagatcacctcccagtgacctccctcagcccccaggggagtaggtctgtgtccgaagctatgtggcaggcttgtttgaaggacccagaggggcccagctgacctgtctcactgctcctggcagcccagccccatcggcaggtggcccctgcctgggggttattcgggacggttcagccagggcctcccaggaagagtgctgtggagccacggtgactgtcctggacagcaaggagcatgctaccccagtgagcacttctttttgagggacttgatggggaggtggggtaggcagaagggacgtggcagaagcgggaagactttggtcaccatggctctgcaggccttctgcaaatcagtgctggcctgggctggaaacagctctgtgtgtgaaggtgaggactcttggaagcaggccatcctggccagacaccctagcaggaaggggctcacctgtcacccttaggcagcctgagggctggtggggacttttgagtcttgaggggatagcggaaaaagctgagctcataggtgcccagccagcctcccagctaaaggtgctcagagccccactgccccctctctctgtgcaggtggccagtgcccctccctgctctgggagcattgctagccttctaccccatccctggatccacaggggctatcgaggagacccagtgagaatgtagcattttgttcatccccagggtagctgccctggggtctgggcactctgcctctgggagagaggaagaagaaaggggccccattttttaaaaaactgtacagagcctttggctttatgtgtttatgttcttcacatgcatatgtgtgtatgtgtgtatatctttccccccatcaattggtacaatttttaataaaatcatttaaagcaaa

SEQ ID NO: 388593 - DNA, 5247 bp, Homo sapiens
  misc_feature (1646)..(1646): n is a, c, g, or t
ggagtcgcgctgcgcacgggggcccgggaagggtttgggctgcggacgtctggggtgaccatgaagaactggggcgctggggtgagggaacggggtgcagaacccacagttgggtgcgctgctccaagagggaacttgggggtagcatttgggactcgaaggagttgggtccaggtaggcaggggaacctggggtgcactgctgagcagacctgggcgcccgagaacggcccagcctctgggtctgactttgggataggacaggagctgtggggcatcctgcctctctgcggagtctgaaggctcctctccttaacagctgggctttttccctccttcccaatcgagtctgggcgtccagcccccgagtgctcgtcacgctggaccctggcgcggagccctggcatcacgactcggaggccgagactctctcctggagtcacccaggagagatggagccatctcagtgtgtggaggagctggaggatgatgtgttccaaccagaggatggggagccggtgacccaacccgggagcttgctctctgctgacctgtttgcccagagcctactggactgccccctcagccgacttcagctcttccctctcacccactgctgtggccctggccttcgacccaccagccaggaagacaaagctacccagactctcagcccagcctcccccagccaaggtgtcatgctgccttgtggggtgactgaggaaccccagcgactcttttatggcaatgctggctatcggcttcctctccctgccagtttcccagcagtcttgcccattggggagcagccccccgaagggcagtggcaacatcaagcagaggtacagattgcccgaaagcttcagtgcattgcagaccagttccaccggcttcatgtgcagcaacaccagcagaaccaaaatcgtgtgtggtggcagatcctcctcttcctgcacaaccttgctttgaatggagaagagaacaggaacggggcaggccctaggtgagggtgggctgccctcttcacatggggcaccaggaacaccgtctggaacaggaaggacatcgggcaggactgacactgtgtcttgtgaaattgtttttttgttgttattttgtgttttaattttttttaatttctctctgagtgtacatacaacatactcaagcgggaccttctttctctgtcaggcccttgacctggaatgggggcctttgtcaaacactgttgaaggagaggctgatgtgtctgtgatggtgagaattcccaagggctctgacaagtagattcttcgactgaggaatctaccagttgtcgaagatgatccgttagtgatgttctctgggaagtggactgtggtttttccagaggaactcagttaagaaatcgagagtggattagactcccagttccaccaaacctatgagccttccactgtggatgggggccgtgatcctgatggtcacattgctttaacccagcagggcttcggccaggggctttccacttgaggatagcagcttcactaggctggccggccagctccacatctgactgggttcttacttctcagccagtacctgccccatgggctcaaggattcctggccagtcctgccacctccagcagacctcagggagggttgngtttctctaaggacccctcaaacatgtcgcaaaatgaaccaaacttctggctaggcctcaaaactgacttggtcccacttggaggccccaggattggtcctgaggtacagagccactgccaccactggcggcctgggaccagctgggtgtcagccacggatgagccgaatagccagtcagcatgttgctgctggcagcctgtgcctttgtcagctcttctttcaaaagaccccaccgacagaccgcattccacccccaacatcggcactgagggacatcgggggcaagtttgcagtggggccggaaaatatggtggccaccctaccatgagagtcagccgtaggggaccccagaccccttggtttccttggaaacaacatacctcttcccccttatccccagtcctttttcatacctagtgggatacagaagaagccaggacagtggctttgccagctaagtgacttttagagtaacagataacgattagagtggggaaccgtcaaagctgggtacacatttcctatcttcctccagcttccagctaggccagaagggcatgctctggaacccagcaggatcacagctgcctgtgcacgtcttcccttctctccctgctgcggcacttatggagaggatctaaagcagccggtgtggcagctccgatagcaggcacagggaatctgttaaccagacgctagaaactaaattataacttttgcatatgtgagaaaagacaacattggtgctaacagtgaagtaaggcccaaaggaaagacggcttccctggacaaagaagacctcagggctacccaaggaaataggaggagtctagagtagactcacaaatctgaacaagcccaagtcttccagttctgaggagaggaggtcttcagtactattgaaggagacattgatcttctggatgtacagttgtgcaggttgttcactgcacaagggcacctgcagctaatggaggctggaattcagcttgtgttctgctcactaagctgtgtgcgtgccctggtgtggggctacttctcccaagaagaaggggtgcctttcctaatttgcaaaggtgccatatgggctcacagcaccctggaggagaagggcctcaaactgtgcatgtaagcctttgttttgttctgctcagatattctggatattacctcttcttggtcagaattctattctcagggtgtgtaccatgatttgtctgctaagaagacgggttcctgctttgcagagaaggagccggggaccagcttgaagactggctctgggacacactgaccattgtgaaattcagccttccctgtgggtctccataccattttatgatgtgtatgggacatacgttgttctcccctctctggatcaaggtggtgacaggcagcctgctgccgtatgcttcagtggcacacaccaaaaaaccgggattatttacagcagccactattcaccccttttggcagactctccacctgagttcagtgagagagaaaatgatttagatcttggtgctggggcaaggccatcagcttcagagaccttgccaggcccaggctgggtgccctgtggcctgagaactgagcccagactttgacaaacccacctcaacatcaagcctggggcaggtggaaggtggtctgactgcactgtctccatcttatgcaaagccaggaactcactcactgtcttaagtgagccagggcaaaatttacacccctcacgtttccctctcccttcttccccaccaacaaaacccaggaggtagctggcagagtagctgtcaggaaggagaaaggttctttctggctggttgtttttaattggcttagtgatctaaactggccccttcctcctctgcctggtgagttggcctaaacattcctcaagtctagcctcaggagacctgcccctcccccccgacctccaccccctcagactccatcccccacccccaggagcctggctgtctctagcgaggggtggagaatcagatttagagggagggagagtctgacctggatcctgacctgtaaccagctgaagacggtggaggctttgtggcttgctgagggtgggggttgggagagggactggaaaccttcctcctcgggaaagaaatgcctgggaggaagggaagcctgatattcagggtcaaaacagcccttctaattcacaaccccaaagcaggggtttctagaagttggtcaacagatctggtgagggaagtccccaggccagacgctggactcctgcaatgagggtggaggactcagcctggcctctgcctggcctgtttcaaagtctgggccactggcagccttctcttgctcaatccgaggtggaaaaagatcacctcccagtgacctccctcagcccccaggggagtaggtctgtgtccgaagctatgtggcaggcttgtttgaaggacccagaggggcccagctgacctgtctcactgctcctggcagcccagccccatcggcaggtggcccctgcctgggggttattcgggacggttcagccagggcctcccaggaagagtgctgtggagccacggtgactgtcctggacagcaaggagcatgctaccccagtgagcacttctttttgagggacttgatggggaggtggggtaggcagaagggacgtggcagaagcgggaagactttggtcaccatggctctgcaggccttctgcaaatcagtgctggcctgggctggaaacagctctgtgtgtgaaggtgaggactcttggaagcaggccatcctggccagacaccctagcaggaaggggctcacctgtcacccttaggcagcctgagggctggtggggacttttgagtcttgaggggatagcggaaaaagctgagctcataggtgcccagccagcctcccagctaaaggtgctcagagccccactgccccctctctctgtgcaggtggccagtgcccctccctgctctgggagcattgctagccttctaccccatccctggatccacaggggctatcgaggagacccagtgagaatgtagcattttgttcatccccagggtagctgccctggggtctgggcactctgcctctgggagagaggaagaagaaaggggccccattttttaaaaaactgtacagagcctttggctttatgtgtttatgttcttcacatgcatatgtgtgtatgtgtgtatatctttccccccatcaattggtacaatttttaataaaatcatttaaagcaaaaaacataaaaaaaaaaaacaaaaaaaaaaattgagaaaaaaaaacaaaaaaaaaaaaaaaaaaaaaaaaaaaaacaaaaaaaaaaaaaaaaataaaatcgggaaaaaaaaaaaaaaaacaaaaaaaaaaacaattttggccccctttgccccatgtatttttaatctgggccaggtttattctcgcggccgaaattcgggctaatttggccaattccccttttggggggggttttaacaattaactggccgggtttttaaaccggggggatgggaaaaaccttgggtttcccaaattaaatctttttgaaaaaaatcctttttttccaaggtggggaaaaacgga

SEQ ID NO: 388594 - DNA, 278 bp, Homo sapiens
gaagaagggaaggggagtccttccaggtatggccctggtggggcagcagcccagatgcctgcgttgccccctcacaggagagatggagccatctcagtgtgtggaggagctggaggatgatgtgttccaaccagaggatggggagccggtgacccaacccgggagcttgctctctgctgacctgtttgcccagagcctactggactgccccctcagccgacttcagctcttccctctcacccactgctgtggccctggccttcgacccaccagccagg

SEQ ID NO: 388595 - DNA, 697 bp, Homo sapiens
acaggtgcagcaggcaccgccggtaacccctggcctggcctgcgctgagccctgcaccagccgtgctgagggagcctgggcctggcccttcatgtgggatagaaacggccgtgccggtctcgatggtgctttggcagtttctctggaaatctgaaacctgcggtcttcagcccagccccaccctgggcctgcatgtggctgcgtgtcgtagagaaacatctgccctgatggtgacctgatgtgagcagcagtttcacagagtaagccacccctgtgcacgaggtctggaaaggtaagtgcgacgtcgagtcctgagcacagaagcaggtggcagaactgcatggcaggaggtgggcttggcgggccccttcctgacccccaagagccagctgccaccaggagcgtcctggggtctgtttccagcccggtggcagccgagcttcctgggcacccagctttccccagcctgctctgagcactggagttgagggcactgagcagagtggggctgagcccctggcggtggaggggacacatcagtgggtgttggcttgaggtggtttctgggaggctgctgggccccgatctaaagggacacacctggctgcacccacctcctgcagactttctccgtgggagaccaatgcaacaggcggggtggagcagccacgtggcagccacgagggggaaaggaagg

SEQ ID NO: 388596 - DNA, 414 bp, Homo sapiens
cctataatacctctattctttattatacaaaaacgaaagaaataaaagtctagcttcttgacctcaaggatcttaatataaggaagaaataatttttaaaagaggcttccctgcttaccttctcacttctcctgcaataaactgtccatattcttacatctggggatgcatactggtctcaatgtatgcatagtaaaatcacgatgcacagtaatatcaaagaacacctgttcccagcgctgaagcattccgatggttcttttaaagcagtagtatatcttattttcaaggcatttggaaatgaagggcaaactaatgtcttgttttaagaaactgcttagtccaccactgaagaaaatatccagaaattattttcattttacgtatagggctttcttcaaaaaaaaaaaaaaa

SEQ ID NO: 388597 - DNA, 819 bp, Homo sapiens
  misc_feature (5)..(5): n is a, c, g, or t
  misc_feature (12)..(12): n is a, c, g, or t
  misc_feature (14)..(14): n is a, c, g, or t
  misc_feature (16)..(16): n is a, c, g, or t
gagcngccgccncncncatcggcatgtccccctggaactgcgacaacgcggcggcggcggcagcaggaccagcatgcaccaccgaaacgactcccagaggctggggaaagctggctgcccgccagagccgtcgttgcaaatggcaaatactaatttcctctccaccttatcccctgaacactgcagacctttggcgggggaatgcatgaacaagctcaaatgcggcgctgctgaagcagagataatgaatctccccgagcgcgtggggactttttccgctatcccggctttagggggcatctcattacctccaggggtcatcgtcatgacagcccttcactcccccgcagcagcctcagcagccgtcacagacagtgcgtttcaaattgccaatctggcagactgcccgcagaatcattcctcctcctcctcgtcctcctcagggggagctggcggagccaacccagccaagaagaagaggaaaaggtgtggggtctgcgtgccctgcaagaggctcatcaactgtggcgtctgcagcagttgcaggaaccgcaaaacgggacaccagatctgcaaatttagaaaatgtgaagagctaaagaaaaaacctggcacttcactagagagaacacctgttcccagcgctgaagcattccgatggttcttttaaagcagtagtatatcttattttcaaggcatttggaaatgaagggcaaactaatgtcttgttttaagaaactgcttagtccaccactgaagaaaatatccagaaattattttcattttacgtatagggctttcttcaaaaaaaaaaaaaaa

SEQ ID NO: 388598 - DNA, 725 bp, Homo sapiens
attcacaaaacacttgaaaggaaggatagaatttgagctttatctttgaaatcgtgagtgatacagattaatttgacacttgagaatatcctgtttctggcttcttttttcccctgacacatttggctgatgcaaaaaaaaccacccacaatgttaatgtaacaggaaagaaaaatagtaaatcattaagaaggttaaataataaaacttatgtatattataagccatgcttttacagcatgtgaacagatgatccaaaacaatgtttgtacttggctttcaaagatgctttcatatttagtttgaactgttacattctggatttctcaaaagtttacatgatacatgtccaaacagcatcccagatactttctaaaactagctatatctatatcctctacctcgtcccctcatacatgctctgtatttgaactattctagcatgtcaaagctttatggaaatgaaaaataattcttcacaaaaacagaagaaaaaacaaaaggttgggaacctaggataaaaatgttaatagaaataatgcattgtctgtgtcttaaacttcacaatgattgcttgccttctctagtggtagaattaccattttgtaattataatcacctgctgataccctataattttttttctgtaggtgaattacttttcctttttttcccagaagttgataattaaggaatatatatagggaaaacacaatgggattcca

SEQ ID NO: 388599 - DNA, 809 bp, Homo sapiens
tatttttattaaaggaccaccctggctgtggtgagatgaatggattcaaacagggcaagaatggatacagggagataagttaggaagctggtatagaaatctggatgagatatggtggcttggatgatactagcagtgagtatgggaagtaggtggattactttacacttttttagatcagtctattcttgatgtcttgaagacaaatttaatttcatatataaatctaaataaaatatttatatttcatgtaaaataggataattctgaccaaatattagcaccttttctagtctcaagttctcagtgtggtaaaacagtatatatatacatattagcattgctgtcactctcttctcaaatatttttgttttgtttttttaacccaagacaatggaaggtaatacagagaatataggttttgtggtgtggtagattgaaagccactctagctatatggacctgaggcaagtacatttaacattttaaaactatttcctacttataaaatgatgataaaaatacgtagagttgctgtaaaattaactaaggtaatatgtacaaagtacctgacatatactgggtttccataaatgatttctatttttacatacctaataggaaagattcttctgtacaaaatctttttgatacttaagtaaccaaaataccttgtataggatataaaaaaaacttttgttgaattttgttgcatatgaaagtagtatgtttagatttacttatcagctactgacaaatagtttattttcttgtgaaaagactgtctgtagggtaattttagcaataag

SEQ ID NO: 388600 - DNA, 3817 bp, Homo sapiens
agatcttactccctttggcattttacaccttactcatacaatcatttttaaaaaatagcaatttaaaaaaatacagttcaagtgttcatcatatccaggcatgcaagccttttctaaatttttttaaataataaaaaagccccacagaggaaaggaggttatttgtgtcctcctgacacacacttttagattttggttaaaaagtctctagtgggtgcaaagtgaccccctttgtcactggaaacaaataggagcattctttgtgccactgtccacaaccacacagatatgtttcccaagggagctcatcaggtcttcaaacatttagcaagcatgacatgtgtaagagacagtattggagaagtaagacaagccttgctctgccgaagcttacaatccaggagctcaccccttcaaggaatttacagcctccagacagataataacattaggtccatgaaagcctacaaggcaagaagttcaggagagaaagaagtcataaccatcttggaagaatctcaacttgttttatcagaactcaaacgccaatttctcacccctagcttccctcattagcgcttattaactagtattgggaggaccaagcgaagagtaaagctagggtagcagaggccataagctaattgcaaaggacagagctaaagaaacatgctagtttcccctgagcacccaactgcatgactgaaaatggattaatttgtatttctaatggatatacaagaaacacgtgaatatgctaaaataaatttaaggtcaagcaatgcaaagtgttagtgcgtttgccttccactctcagaggcagcctctcttatttggttcttgggctgcttcataaaaagttctgtgttttttaatggcctcagcttttgggaggctcaggccacctagcccatcaggagaccaggcccgaaggatggatctgaagagtgggcaacggagagttaaaccagggctgacttcaacaggcccagtcaagtcaggggcaagcacattgtccatccactggaagacggaaaggggagaggaaggcaggccctcccgactcacaggtcacctcgcaactttgctaggcactacccaccctttagggataagtgaagtatgtggtgggcatacaaggcgcacaggggagtcattctggcaaattccaagaaggttttaagggctcccgaggcaggcaggcccagttgctgtttggagcttcctttggggtgggaggatggcgggggcagggggccggggcggtgccttaacgaggggagatgcttttaaatagctgccttccaaaaaccatcctccctgcttctttgagaagcacccagctgttgtttaccctccaggacagcaaatccggttatttgtctctctattccgtgatattataaagtaatgaatggtccattaaactaagtttgggatcccgtctccccacagccacctcctcgccggcaccctcagccggggaggccgtaggctcggctgcagcctggcagcctcagtccccctccctccaccatttccccctactccctccctctcctgcaccccctccccccggttatttgggagattagagttcattaattaaatcctgtgcttagatcgaactgtaacattattccaatcacatttatcttgcaggcggcggaggagatggcagcctcgctggaaacgcgcgggggagcctgagccggcggccggggacgcacggcgctgcgcgctccttcgccacgccgccgcgcagcccctccatcttcctgctcggcaccgggccccgcgcgcccctgcctacggggtcccgctgctctccggggctcctgccagccccaacccccggccccggtggcctccccccacccccgcccgggtccccctcctccgccacacgcgcgcgcgctcacacacacacacacacacacacacacatatatacacgccagcgagctgctggccgctcaatggaccgatttccccggtttccctgaacccagcccagcccgggatgagaaactgcaaaatggcccgggtcgccagtgtgctggggctggtcatgctcagcgtcgccctgctgattttatcgctcatcagctacgtgtccctgaaaaaggagaacatcttcaccactcccaagtacgccagcccgggggcgccccgaatgtacatgttccacgcgggattccggtcacaatttgcgctgaagtttctagacccgtcattcgtgcccattacgaattctctcacccaggaactccaagagaaaccttctaagtggaaatttaatcggacagcgtttttacatcaaaggcaagaaattcttcagcatgtcgatgtaataaaaaatttttctttgaccaagaatagtgttcggattggacaactgatgcactatgattattccagccataaatatgttttctctattagcaataacttccggtcacttcttccagatgtgtcacccattatgaacaagcattataatatttgtgctgtggttggaaatagtgggatcctgacagggagccagtgtggacaagaaatagataaatcagattttgttttccgttgcaatttcgcccctacggaggctttccaaagagatgttggaagaaaaaccaatcttaccaccttcaaccccagcatcctggaaaaatattacaacaatctcttgactattcaggaccgtaacaactttttcctcagtttaaaaaagcttgacggggccattctttggatccctgcatttttcttccacacttcagcaactgtgaccaggacattagttgacttttttgttgaacacagaggtcagttaaaagtccaactggcttggccgggaaatataatgcaacatgtcaacaggtactggaaaaacaaacatttgtcacctaaacggctgagcacaggtattcttatgtacacccttgcatcagcaatatgtgaagagatccacttgtatggattttggccgtttggatttgaccccaacacaagggaagatcttccataccattactatgacaaaaaaggaaccaaatttaccaccaagtggcaggagtcccaccagctgcctgctgagtttcagctgctgtaccgaatgcatggggaagggctcaccaagctgactctgtcacactgtgcctaagaactccaaacggaaagtgccaaatggctgtttaaaaagtgccccaaatcaaattgaatagccttcagaatagaaccctagagaatgtcttataaggattgtctgccatttaaaaggaaagatgtcttttctcttttgcactgctcttttaagagttttagcagatttagcaggacagatgcattgaagccacatggtttagacttgattgataaagggaatgttgcatttgggactatgctgctaacgaaatggtttgaagtattttcatgtttggattttaataataaactgcctctcatttttatgaggactagagctatagtttctgcagctctgctcagatagtcctcataatcagaggcctctggccaactggggcaggacctgttttgctggtgggatcagactctgaaaaatggaaacgtaaaaaactggtttgcatatctcatcttctatctatctccctatctccatctctatcaccatctcactccctccctctgcaactactccctgccctaccaccgtggagtttaataatttgctaggaatcctattgaattcgctttgcttgtatatgttgcatttgtacttgatgtgtttaaggttctgggtaactttgatgcttcatgacaaaataggcaaatc

SEQ ID NO: 388601 - DNA, 3119 bp, Homo sapiens
agatcttactccctttggcattttacaccttactcatacaatcatttttaaaaaatagcaatttaaaaaaatacagttcaagtgttcatcatatccaggcatgcaagccttttctaaatttttttaaataataaaaaagccccacagaggaaaggaggttatttgtgtcctcctgacacacacttttagattttggttaaaaagtctctagtgggtgcaaagtgaccccctttgtcactggaaacaaataggagcattctttgtgccactgtccacaaccacacagatatgtttcccaagggagctcatcaggtcttcaaacatttagcaagcatgacatgtgtaagagacagtattggagaagtaagacaagccttgctctgccgaagcttacaatccaggagctcaccccttcaaggaatttacagcctccagacagataataacattaggtccatgaaagcctacaaggcaagaagttcaggagagaaagaagtcataaccatcttggaagaatctcaacttgttttatcagaactcaaacgccaatttctcacccctagcttccctcattagcgcttattaactagtattgggaggaccaagcgaagagtaaagctagggtagcagaggccataagctaattgcaaaggacagagctaaagaaacatgctagtttcccctgagcacccaactgcatgactgaaaatggattaatttgtatttctaatggatatacaagaaacacgtgaatatgctaaaataaatttaaggtcaagcaatgcaaagtgttagtgcgtttgccttccactctcagaggcagcctctcttatttggttcttgggctgcttcataaaaagttctgtgttttttaatggcctcagcttttgggaggctcaggccacctagcccatcaggagaccaggcccgaaggatggatctgaagagtgggcaacggagagttaaaccagggctgacttcaacaggcccagtcaagtcaggggcaagcacattgtccatccactggaagacggaaaggggagaggaaggcaggccctcccgactcacaggtcacctcgcaactttgctaggcactacccaccctttagggataagtgaagtatgtggtgggcatacaaggcgcacaggggagtcattctggcaaattccaagaaggttttaagggctcccgaggcaggcaggcccagttgctgtttggagcttcctttggggtgggaggatggcgggggcagggggccggggcggtgccttaacgaggggagatgcttttaaatagctgccttccaaaaaccatcctccctgcttctttgagaagcacccagctgttgtttaccctccaggacagcaaatccggttatttgtctctctattccgtgatattataaagtaatgaatggtccattaaactaagtttgggatcccgtctccccacagccacctcctcgccggcaccctcagccggggaggccgtaggctcggctgcagcctggcagcctcagtccccctccctccaccatttccccctactccctccctctcctgcaccccctccccccggttatttgggagattagagttcattaattaaatcctgtgcttagatcgaactgtaacattattccaatcacatttatcttgcaggcggcggaggagatggcagcctcgctggaaacgcgcgggggagcctgagccggcggccggggacgcacggcgctgcgcgctccttcgccacgccgccgcgcagcccctccatcttcctgctcggcaccgggccccgcgcgcccctgcctacggggtcccgctgctctccggggctcctgccagccccaacccccggccccggtggcctccccccacccccgcccgggtccccctcctccgccacacgcgcgcgcgctcacacacacacacacacacacacacacatatatacacgccagcgagctgctggccgctcaatggaccgatttccccggtttccctgaacccagcccagcccgggatgagaaactgcaaaatggcccgggtcgccagtgtgctggggctggtcatgctcagcgtcgccctgctgattttatcgctcatcagctacgtgtccctgaaaaaggagaacatcttcaccactcccaagtacgccagcccgggggcgccccgaatgtacatgttccacgcgggattccggtcacaatttgcgctgaagtttctagacccgtcattcgtgcccattacgaattctctcacccaggaactccaagagaaaccttctaagtggaaatttaatcggacagcgtttttacatcaaaggcaagaaattcttcagcatgtcgatgtaataaaaaatttttctttgaccaagaatagtgttcggattggacaactgatgcactatgattattccagccataaatatgttttctctattagcaataacttccggtcacttcttccagatgtgtcacccattatgaacaagcattataatatttgtgctgtggttggaaatagtgggatcctgacagggagccagtgtggacaagaaatagataaatcagattttgttttccgttgcaatttcgcccctacggaggctttccaaagagatgttggaagaaaaaccaatcttaccaccttcaaccccagcatcctggaaaaatattacaacaatctcttgactattcaggaccgtaacaactttttcctcagtttaaaaaagcttgacggggccattctttggatccctgcatttttcttccacacttcagcaactgtgaccaggacattagttgacttttttgttgaacacagaggtcagttaaaagtccaactggcttggccgggaaatataatgcaacatgtcaacaggttctttgcaactttacattgctgtaaacagtgctctgatgaacatctttggaattaaatgtttgattatttccttagataaatcccttgaagtggattttcaagagaaaacttaccaacaagttaggagaaaaacatgcatcatcattaaggaagacttcctcaacagaaggattatgcattattgtgtactaaataaggaaaataaataagctattgttgtgtgcttcttcaat

SEQ ID NO: 388602 - DNA, 426 bp, Homo sapiens
gacggccattttatggtctctccggcacccggagggatggacaatgcagatggggttccctagttttctttttttctctcgggtgtgtgtgggagcagagggtggaccaaatgagaggggctccgggacggaacggagcccgcacgcgtaccagccgccctcgccccagccgctgcactttaatggctacctcggcttccccgagctgaggccagcacgcttgtctgtgctcatgctcctctccaggtcacaatttgcgctgaagtttctagacccgtcattcgtgcccattacgaattctctcacccaggaactccaagagaaaccttctaagtggaaatttaatcggacagcgtttttacatcaaaggtaggataggaggaaaagatccaaaaggtgcttttaagaattcaagagctcaaaaca

SEQ ID NO: 388603 - DNA, 1948 bp, Homo sapiens
cggccgctgtccgcggtgctgattccctggtcctcgcagcgccgcgggctccagccctgcgcccggcgtgcgccctgctctccgcatgacggccattttatggtctctccggcacccggagggatggacaatgcagatggggttccctagttttctttttttctctcgggtgtgtgtgggagcagagggtggaccaaatgagaggggctccgggacggaacggagcccgcacgcgtaccagccgccctcgccccagccgctgcactttaatggctacctcggcttccccgagctgaggccagcacgcttgtctgtgctcatgctcctctccaggtcacaatttgcgctgaagtttctagacccgtcattcgtgcccattacgaattctctcacccaggaactccaagagaaaccttctaagtggaaatttaatcggacagcgtttttacatcaaaggcaagaaattcttcagcatgtcgatgtaataaaaaatttttctttgaccaagaatagtgttcggattggacaactgatgcactatgattattccagccataaatatgttttctctattagcaataacttccggtcacttcttccagatgtgtcacccattatgaacaagcattataatatttgtgctgtggttggaaatagtgggatcctgacagggagccagtgtggacaagaaatagataaatcagattttgttttccgttgcaatttcgcccctacggaggctttccaaagagatgttggaagaaaaaccaatcttaccaccttcaaccccagcatcctggaaaaatattacaacaatctcttgactattcaggaccgtaacaactttttcctcagtttaaaaaagcttgacggggccattctttggatccctgcatttttcttccacacttcagcaactgtgaccaggacattagttgacttttttgttgaacacagaggtcagttaaaagtccaactggcttggccgggaaatataatgcaacatgtcaacaggtactggaaaaacaaacatttgtcacctaaacggctgagcacaggtattcttatgtacacccttgcatcagcaatatgtgaagagatccacttgtatggattttggccgtttggatttgaccccaacacaagggaagatcttccataccattactatgacaaaaaaggaaccaaatttaccaccaagtggcaggagtcccaccagctgcctgctgagtttcagctgctgtaccgaatgcatggggaagggctcaccaagctgactctgtcacactgtgcctaagaactccaaacggaaagtgccaaatggctgtttaaaaagtgccccaaatcaaattgaatagccttcagaatagaaccctagagaatgtcttataaggattgtctgccatttaaaaggaaagatgtcttttctcttttgcactgctcttttaagagttttagcagatttagcaggacagatgcattgaagccacatggtttagacttgattgataaagggaatgttgcatttgggactatgctgctaacgaaatggtttgaagtattttcatgtttggattttaataataaactgcctctcatttttatgaggactagagctatagtttctgcagctctgctcagatagtcctcataatcagaggcctctggccaactggggcaggacctgttttgctggtgggatcagactctgaaaaatggaaacgtaaaaaactggtttgcatatctcatcttctatctatctccctatctccatctctatcaccatctcactccctccctctgcaactactccctgccctaccaccgtggagtttaataatttgctaggaatcctattgaattcgctttgcttgtatatgttgcatttgtacttgatgtgtttaaggttctgggtaactttgatgcttcatgacaaaataggcaaatc

SEQ ID NO: 388604 - DNA, 230 bp, Homo sapiens
  misc_feature (223)..(223): n is a, c, g, or t
ccacagcatggtgggcagtcatttgtaacccacagaacattgagtttctaaaatttgagtgtttttaacttacgaaggccaactttactgatgaagtgattaccccaaatatgtgaaatccatatttcaagtacaatagcaggaaatcggaaatgggtaggtatatttctgactgtcaaagagtacaaagtaaagaggggcccctgaagagtgacactactgngaaaaac

SEQ ID NO: 388605 - DNA, 352 bp, Homo sapiens
agacttatacttgtttgtggtgttctttcagacttattttttaaattaaaaacattgtttttagagatggggtcttcctctgtcatctagccttgagtacagtggtgtgatcatagctcactgcagtctccaactcctgggctcaagtgatccgcctgcctcagcctcccaagtagcttggactacaggcacatgccaccatgcctggctaatttttaaaacattttttgtagagacaaggtctcgctatgttgcctaagttggtcttgaaatcctgacctcaacagtcctcccaccccaccctctcaaagtattgggattacaggcatgagccatcgttcccagcccagcc

SEQ ID NO: 388606 - DNA, 378 bp, Homo sapiens
atgatttcattggcttgcagatcctccatggccccctggaaaaccaactgtaaaagatgtaggcaaaacatcagtaaggttgaattggacaaaaccagaacatgatggaggtgcaaagattgagtcttatgtcattgaaatgctgaagactggaacagatgagtgggtcagagtggcggaaggggttcccaccactcagcacttgctcccagggctcatggaaggacaggaatactcattccgagttagagctgtgaataaggctggggaaagtgaacccagtgaacccagtgaccctgtgctttgccgggagaagctatatcctccatcaccaccacgctggcttgaagttattaatatcacaaaaaatacagcaga

SEQ ID NO: 388607 - DNA, 443 bp, Homo sapiens
tgtgagagtatattgatgagaaaatggcagcctgtgtcagcatttcaagccaatatatgtccctttattcatttttttaataccacctcaagaacattttcctaatttgtaatatgcaaacagagataagagtttgaaactctcatgctggacttttctcattttattatgaaagaggaacagtaaccctggccctttcctactaccgaagattttgtgaaaacagccgctgtacaatctctaggtaaaccataagaataatgtaaaactctccctcatctcctaatcagcttatatgtttcttaaattctctctggattctgtcctcttccctgcatctctatttcctgcacccaagcaggattctctcatcttcacaaatggtttttcagactcggatatttggcagacatttttttcagaatgaagtaagactgacactt

SEQ ID NO: 388608 - DNA, 404 bp, Homo sapiens
actggtaatgtcggcacacatgcagcaacatcagactgcactaatagtcactgtgttcctcagagccaggcactgtcactcactgtaaaaaagcaaagccaatttcacttgagaattttcctaacaaggcaggaaacattattgactttattgaatttcagctacaggacacatcttttgagtgttcagtgctatgaagtgggaatccctccttcattatacgggtgtacattgacagtcttcaggaagagcacttgtgagattgtttggtttgagcttacctacatgtttttttctttcttcatgaaacatcatttttacttgaaagaatagctgacaaactggtttttcagactcggatatttggcagacatttttttcagaatgaagtaagactgacactt

SEQ ID NO: 388609 - DNA, 478 bp, Homo sapiens
catcagaaaataaaagcgtggttaatacaatctgagaagtcagggctgtcccaggtgacctgctgggcttggggtaaagtcagctgtagccaagatgagtcactggaagtatggttaacgctcttaatttccacaggctccttcaatctacccttttccaggttcttagatcgattacatgcatttattccacagcccatttctttcactgcccaagttgctgggagtccagcaggttcagcctgcagctgagagctttcctggctatcgagcgtactttctacaagtgtttccatctaggatttgaaaacattcaaatgggacagagcctccttccagcttgagttgaaaatagtcatgaaatagctgctatttgggacattcagataaaataaaacaagaaaaaaaagataaactaattaatggtttgaattgttttgggcatttttttttttcatttttgagacagtgtttcttg

SEQ ID NO: 388610 - DNA, 319 bp, Homo sapiens
gcctcagcctcccatgtagctgggattacaggtgtccaccaccacacctgggtaattttgttgtatttttagtaaagacggggtttcaccatgttggccaggctggtctcgaactcctgaccttgtgatccacccacctcggcccccaaagtgctgggattacaggcatgagccactgcgcccggccctctttttttttttaactgatagaaaacctatctagccaccacaaactggtcaaggaagtacaactcaaaggccaggaccaggctttccatggactgaaataattaaatcatttaattatatcagagttaaa

SEQ ID NO: 388611 - DNA, 466 bp, Homo sapiens
gagggtcgcatcagacaaacctgcctcccgttttattcttcaataagatagctagaaagttcaaaagagctacatacccccctcacaatttctccacaagcaaattcctttcgggcctcaagatctttgccctaaaacagttctgatgaattttccctggcaatgtaaattgatagcttatcttcacaggtacaatgcagaaagtcagccctccgctcactgaagacaaatgcatatgtgatttcttcctctgtcctattgtttatacaaaatgcagattcactgagccagacagtgagtaaggcatatgtgactattcctctacccactctcacatgtaaattgtgtattcagtgaaaggctgatcacagactcaaaagaaagcaaacttttggccgggcatgctggctcacgcctataatcccagcactttgggaggctgagatgggtggattacctgaggtca

SEQ ID NO: 388612 - DNA, 363 bp, Homo sapiens
ctccagcctgggcgacagagcaagactccgtctcaaaaaaaaagccttccttgccaggtgaaagcaagagtggtatggaacatttatttaaacataagaagcagaaggttcctcctcttgcaagtatgttttctctaaatgtagcatttccactggaggaggtggtctgggtggatggttaatatgtgaggattgtgcagccaggcagataaccaggcctctgcatatacagatacccacagcccaggaatcttgagaactgaatggcccataacaacctctggcactatcggagctgcagggaggcttggctggggctactccagtctcaggcccctgtttttagcggaagtcacaaggagg

SEQ ID NO: 388613 - DNA, 231 bp, Homo sapiens
aagttttatttgtgaaattaccttacaaatgttagagaggtttaaaaaaaatctctgcttgtcttttctcttgttttatcctgtcttattcttggaaaagttaatatttgagaatagctagcatgtcctattaatcccttttttagaaaaggacccgctccgacaccagttggcagttaggtttcatcagtcactcgagattatggattaactcactgatctttttaccct

SEQ ID NO: 388614 - DNA, 272 bp, Homo sapiens
catgattttggtttgcttggttttcttatcctttgaagtaagacacttcatgattgtcatgagtttggttcccaagggtgtgagatttataggaaccaagacttttacagtaaagagatgatttaaaaggcaaaccactaaaaatgacagtatgaaactaaaacgtttccaagttgctttaatccctgaactaatccttgcagaatgccagggaaagaggatgggaggtaaaggtcatggttaggaagagaaaaagagctaacatttactaa

SEQ ID NO: 388615 - DNA, 269 bp, Homo sapiens
acacaccttattttaacaacaacaacaacagcaacaatgaaggtgcggcatgcaaacacccaaagcctccccacaatctgttaggaagtgtatcagtggacacctttatctagagggtcccgggatttgtggaatggaagataaatggcagcaaatccaatgccagtcctcctgaaaggcaggataggtcatgattgctgagtcataaagtcacccctcatgactcagcaaaatcaatttaggaaggcagtggctcatcaagctcttgc

SEQ ID NO: 388616 - DNA, 86 bp, Homo sapiens
  misc_feature (2)..(2): n is a, c, g, or t
gnggggaggggtctgtgtaggggacccccatgctgacccagtggctgttttatcctgtgcatataaatacaaacagcacagtgcac

SEQ ID NO: 388617 - DNA, 373 bp, Homo sapiens
tccttcaatatgattaactacaggcatttcaggtatctgctgagcagaataaaggactacctttttatgtgaagtagttgtctaaagatcagaaataattgctttgtacattagccttcatgacctgcttgacctagttaattaattttttgctagcataataataatagatatatattggagatatgtttcatcattaagtatctaattgacctctaattttaagagctgcaccttccatttattgtcttttggaaatggctggagcacccaacagaaaaaccgaggacagtcagaagctgacttcaatcccacatagtccctctgtcttaggttgtatttctttgttatttgtatttatcattgatgaaca

SEQ ID NO: 388618 - DNA, 848 bp, Homo sapiens
atctcattcaactttgtatcacctgagcttaactaacacctggcacagagaagaaacatattaaggatttgctgagagaataagatagtataacttggtcttatatctaaggtttgattttctaggaacctatagtgaattttaggcttgcttttcagtttttgtagcagggatgtagcacaggtttgggactcagcacacctagtctgaaagctgatttctgtcacagcatgcatgagggacagtctcttcagtttatttataccttagtgctgtgattctcgagcttatagacactgtgaggacagaattttagctctttaaacaaaggggggcaaatatacagtgacctctatctatgtaggtatttaactgaaaggaattccagggccaagtgtgtctactattaaaagaaacgtacttttcttacaatgtagtccctgaatgcaaatcatggttttatctggtgggcaactgaagaaacagcaatctgaactgatatgggaggcagacctcactgtaacaggattagtgagaaacagtgtttgtggctcttaattgctcatttttttttttttaatgggggatgttagggattttctaagggcaggtttatccatatgcagagttgatgttaggatgtaataccacaaagatgtaattaactcctctgtttgtggtctccatgttaattcactctcataagagggtatgcagtgtggtcactattctaccaccatttttaagaaaaaatttaaaactattttttatcttccaaattaaatattttgctatttgataagttaacaatgcaacagaaaatcaatataacttttatctttaccaga

SEQ ID NO: 388619 - DNA, 613 bp, Homo sapiens
gctgtagacatatgaagtaattgttctagctttaaatcatcttatcatagaatatttagtgacctgaaaaacatttgtcagtgacttgtaaatgaggaaacataataacaatgaagttattgctagctgctgctgttggaatgtaccatttgcaaaaattgagaggaaaccttaataaatttaaaggagaaaaaaaatacagaaattgcaactggatctgacattttttttttaactgatagccctacatcatcaccctgtgccaaaaatgtggaattctgtcactaagtttgtagtttcttctcatgagaaattggtttcttaatttataaagttgacgttccaattttgtatgtctggttttatttgtaactcatttttattatctcataaacatctcagttatactcttaaaatggggagcctgttgactttggcacatctctgtaggggtgatggtgaatttatttgtcttggggtccagaagtgctagagggccagtgtgtgcaccagacgtagtacctaacttgatttacatctgttccttactccagaaccctgatatgagttgaaaagaattgatgactagcagtgagaaagaatggagcccttc

SEQ ID NO: 388620 - DNA, 498 bp, Homo sapiens
gagccagggaggagtgggcctctttgatgagagcgttgagttgcatggagtcggttgttcatcccagcctccccatggccctcgcctcccatgtctttgaagcacccctccagggagtcaggtgtgtgctcagccaccctctgccccattcctagaccctcacccccaccactgttcctgtgtcttcacgagctgtcccttacaggcaggggcttcccacaggctgggggcctcggggcggggagcatgagctgggctggcaccacgactgagggcttccggcccggcttcttccccacagcaggctgctcagagggggtgctgccgggactgccatgcccacctgagaggggcctgggggtgcgtcctcggccggttagggaatttggggtgaggttcctcaggagccctcactctgcctgtggacgctgcacctgccacttaaagaccccaaagactctgttgggaactgttgtcaataaaatgtttctgaggatg

SEQ ID NO: 388621 - DNA, 931 bp, Homo sapiens
tggagttttaagggcaggggaggtgtgaatgccatatttgtgtcttggaaagatggctttggctgcatgacagcatttggattagagatgtctaagaatggaaagaggtacacacattaggagactgcagttttggtgagaggtgatggaagctcgagactagtgaggaaaagggaggtgtcaacatgagccctagattcttggagtccagaacttgaagaaaaaagagtatttttgtaaattgacctttgttaaattttagggcaagatgtttcaaaattaccctcttaatgacttattttttaaaatagtatagactgcaataaataagaacgaaagatcagacattttcatattaatgtactagttggtgttataaacttctatcatcacttctaaaaatgtgtttaatttattatactgaaatgaggctgaagggatttataacttcagtaatttgaaatgcggtggattttgcttttgtgtattatctttgtttcaacaactgtggttttatttcccctcagtatttgattttcatcaagcagctgatggtatccaggaacaacagagacaagaacaagcaggaaaaaatttgggtacaacaaaaaagggcattggcccagtttattcgtccaaagctgctcggagtggactcaggatgtgcgaccttgtttctgactttgatggcttctctgagaggtttaaagttctagctaaccaatacaaatctatataccccactttggaaatagacattgaaggtgaattacaaaaactcaagggttatatggaaaagattaaaccaatggtgagagatggagtttattttctatatgaggccctacatggaccaccaaagaaaatcttggtagaaggtgcaaatgcagcactattagatattgattttggggtaagtgagatatgactt

SEQ ID NO: 388622 - DNA, 793 bp, Homo sapiens
tccatgttgagttaattttcatgtgatgcgaggtaaaagccttaagtgtatctccttgtgtgtagatatttacttgtcctcgcaccgttagttgaaaatactattcttttcccattgaaatgcctttgcccctctgttcttataccagcaccacagtgttttgatactgtggctttatagcatgttttgaaattcaggagtacaagccctccagctttgttcttttcaagattgattttgctattctgggtcttttgcgtttgatataaattttggggctggcatcagaaaaatggcagagttttagctccaaacacccatttctccacagaatcatcaaaaaacaaataggaactatcagaatgaactttgtcagaactctggaaaacacaggtttacatcagtcaggtaaacaatagataaagaaaaaggcaaattaaaaatggtaggaaagctgtgtggtgtttttacttgtccttgcccatcccctttccaggtcaatggcaatcttgaagaaagcaacctgcattgccagtgtgggaccctggtctctggttctaaagggagcagagcagaccttatttgcaaattattgtggtctttctattttaacctctctgtggctgcctgaagggctgacacagagtgcccatctgtgttttatctaactcagaattcacctaggatggaaaagtggtgagcattgcttggaaacattataaggagaacaaaaaaaccacaactgcttggagcaaaagatgatatacacaatctaaagcctgggaggaagaac

SEQ ID NO: 388623 - DNA, 2430 bp, Homo sapiens
tgcacgggagtggcgcgccaggccgcggaaggggcgtggcctcggtccggggtggcggccgttgccgccaccagggcctcttcctgcgggcggtgctgccgaggccggcctgcgcggggcagtcatggtacccccttgagcgggctgtggcggagagcggggcggggactggctggagggtggcggcccggcggggcgggggcggggccggcctctggctccttcttcctctgcatgtggctggcggccgcagagcagttcagttcgctcactcctcgccggccgcctctccttcgggctctcctcgcgtcactggagccatggcgttcgccgagacctacccggcggcatcctccctgcccaacggcgattgcggccgccccagggcgcggcccggaggaaaccgggtgacggtggtgctcggtgcgcagtggggcgacgaaggcaaagggaaggtggtggacctgctggcgcaggacgccgacatcgtgtgccgctgccagggaggaaataatgctggccatacagttgttgtggattctgtggaatatgattttcatctcttacccagtggaataattaatccaaatgtcactgcattcattggaaatggtgtggtaattcatctacctggattgtttgaagaagcagagaaaaatgttcaaaaaggaaaaggactagaaggctgggaaaaaaggcttattatatctgacagagctcatattgtatttgattttcatcaagcagctgatggtatccaggaacaacagagacaagaacaagcaggaaaaaatttgggtacaacaaaaaagggcattggcccagtttattcgtccaaagctgctcggagtggactcaggatgtgcgaccttgtttctgactttgatggcttctctgagaggtttaaagttctagctaaccaatacaaatctatataccccactttggaaatagacattgaaggtgaattacaaaaactcaagggttatatggaaaagattaaaccaatggtgagagatggagtttattttctatatgaggccctacatggaccaccaaagaaaatcttggtagaaggtgcaaatgcagcactattagatattgattttgggacttacccttttgtaacctcttcaaattgtactgttggaggtgtttgtactggtttgggtatgccacctcaaaatgttggagaagtgtatggagttgtgaaagcttatacaactagagttggtattggtgcctttcctacagagcaagacaatgaaattggagaattattacaaacaaggggtagagagtttggtgtaactactggaaggaaaagaagatgtggctggttggacctcgttttgctcaaatatgctcatatgatcaatggatttactgcgttggcacttaccaagttggatattttggacatgtttacggaaatcaaagttggagttgcttacaagttagatggtgaaatcatacctcatatcccagcaaaccaagaagtcttaaataaagttgaagttcaatataagactctcccaggatggaacacagacatatcaaatgcaagggcgtttaaagaactacctgttaatgcacaaaactatgttcgatttattgaagatgagcttcaaattccagttaagtggattggtgttggtaaatccagagaatctatgattcaactcttttaatgattgccagtaatgcaagaaacactccttgagagggaggggaaaagactttcttaaatatttcatttatgacctgcaaattcaagaataaagacactgaagtaagtttgaagccctacagttgtttccagtcttttcagatggatgcctactgtggagattaactttggcatattccagtgtcagctttctttagctggaattgccaaatcatttgttgctcctgctgctctcatggtgccacgtttttttttttcaatgtttagtaatagtataatccatgttgtttgatatcaaaagtagaattacttttaatgtagtttttcttcattattgtcattgcgtgttcttaagttttacccctattagatggtaagaacaattaatgcagttttgcacaaatatttttacattctgatcattcagttctgtcattgtaatctttgttgttagaaacaaatgatgaaaacataggggttctgtaaacttttgtaatgctatgaattctgtttaaattttgggctgtctattttctgctgaaaccatgcaaaattgagctttggtggggctgggagggggttatgtattcatgggacctttaatttgtacagaacacagaacttatttctgtcagttatttaatacattgaaaatttagtgaaatgttcaaagagaatagatgtttcccaaaacaacaatctttatgttaaaaatagtcattaaaagatctgttgtaata

SEQ ID NO: 388624 - DNA, 2685 bp, Homo sapiens
tgcacgggagtggcgcgccaggccgcggaaggggcgtggcctcggtccggggtggcggccgttgccgccaccagggcctcttcctgcgggcggtgctgccgaggccggcctgcgcggggcagtcatggtacccccttgagcgggctgtggcggagagcggggcggggactggctggagggtggcggcccggcggggcgggggcggggccggcctctggctccttcttcctctgcatgtggctggcggccgcagagcagttcagttcgctcactcctcgccggccgcctctccttcgggctctcctcgcgtcactggagccatggcgttcgccgagacctacccggcggcatcctccctgcccaacggcgattgcggccgccccagggcgcggcccggaggaaaccgggtgacggtggtgctcggtgcgcagtggggcgacgaaggcaaagggaaggtggtggacctgctggcgcaggacgccgacatcgtgtgccgctgccagggaggaaataatgctggccatacagttgttgtggattctgtggaatatgattttcatctcttacccagtggaataattaatccaaatgtcactgcattcattggaaatggtgtggtaattcatctacctggattgtttgaagaagcagagaaaaatgttcaaaaaggaaaaggactagaaggctgggaaaaaaggcttattatatctgacagagctcatattgtatttgattttcatcaagcagctgatggtatccaggaacaacagagacaagaacaagcaggaaaaaatttgggtacaacaaaaaagggcattggcccagtttattcgtccaaagctgctcggagtggactcaggatgtgcgaccttgtttctgactttgatggcttctctgagaggtttaaagttctagctaaccaatacaaatctatataccccactttggaaatagacaccaaagaaaatcttggtagaaggtgcaaatgcagcactattagatattgattttgggacttacccttttgtaacctcttcaaattgtactgttggaggtgtttgtactggtttgggtatgccacctcaaaatgttggagaagtgtatggagttgtgaaagcttatacaactagagttggtattggtgcctttcctacagagcaagacaatgaaattggagaattattacaaacaaggggtagagagtttggtgtaactactggaaggaaaagaagatgtggctggttggacctcgttttgctcaaatatgctcatatgatcaatggatttactgcgttggcacttaccaagttggatattttggacatgtttacggaaatcaaagttggagttgcttacaagttagatggtgaaatcatacctcatatcccagcaaaccaagaagtcttaaataaagttgaagttcaatataagactctcccaggatggaacacagacatatcaaatgcaagggcgtttaaagaactacctgttaatgcacaaaactatgttcgatttattgaagatgagcttcaaattccagttaagtggattggtgttggtaaatccagagaatctatgattcaactcttttaatgattgccagtaatgcaagaaacactccttgagagggaggggaaaagactttcttaaatatttcatttatgacctgcaaattcaagaataaagacactgaagtaagtttgaagccctacagttgtttccagtcttttcagatggatgcctactgtggagattaactttggcatattccagtgtcagctttctttagctggaattgccaaatcatttgttgctcctgctgctctcatggtgccacgtttttttttttcaatgtttagtaatagtataatccatgttgtttgatatcaaaagtagaattacttttaatgtagtttttcttcattattgtcattgcgtgttcttaagttttacccctattagatggtaagaacaattaatgcagttttgcacaaatatttttacattctgatcattcagttctgtcattgtaatctttgttgttagaaacaaatgatgaaaacataggggttctgtaaacttttgtaatgctatgaattctgtttaaattttgggctgtctattttctgctgaaaccatgcaaaattgagctttggtggggctgggagggggttatgtattcatgggacctttaatttgtacagaacacagaacttatttctgtcagttatttaatacattgaaaatttagtgaaatgttcaaagagaatagatgtttcccaaaacaacaatctttatgttaaaaatagtcattaaaagatctgttgtaatatatggtggatatttttctttaatttcaaacattacctctgaaatgtgtatcttttcttttttatcttaccattaattttaaatctagtggattggttttcaacatcgtgcctgccgatatgcctacagaatcatctgtaagtgtcaaaatgaacccacgttgttagccataattttgattatgcctttatttctcctttcttgaaaaaaaaaaggtgttattttgacaattaggcataacattgttttgtagattatcttttaatgaactattttaaatgttaaattaggtgccacttaaatttattttattacaccatgaatagctgattaaaagaaccaaatatttctagt

SEQ ID NO: 388625 - DNA, 2303 bp, Homo sapiens
tgcacgggagtggcgcgccaggccgcggaaggggcgtggcctcggtccggggtggcggccgttgccgccaccagggcctcttcctgcgggcggtgctgccgaggccggcctgcgcggggcagtcatggtacccccttgagcgggctgtggcggagagcggggcggggactggctggagggtggcggcccggcggggcgggggcggggccggcctctggctccttcttcctctgcatgtggctggcggccgcagagcagttcagttcgctcactcctcgccggccgcctctccttcgggctctcctcgcgtcactggagccatggcgttcgccgagacctacccggcggcatcctccctgcccaacggcgattgcggccgccccagggcgcggcccggaggaaaccgggtgacggtggtgctcggtgcgcagtggggcgacgaaggcaaagggaaggtggtggacctgctggcgcaggacgccgacatcgtgtgccgctgccagggaggaaataatgctggccatacagttgttgtggattctgtggaatatgattttcatctcttacccagtggaataattaatccaaatgtcactgcattcattggaaatggtgtggtaattcatctacctggattgtttgaagaagcagagaaaaatgttcaaaaaggaaaaggactagaaggctgggaaaaaaggcttattatatctgacagagctcatattgtatttgattttcatcaagcagctgatggtatccaggaacaacagagacaagaacaagcaggaaaaaatttgggtacaacaaaaaagggcattggcccagtttattcgtccaaagctgctcggagtggactcaggatgtgcgaccttgtttctgactttgatggcttctctgagaggtttaaagttctagctaaccaatacaaatctatataccccactttggaaatagacattgaaggtgaattacaaaaactcaagggttatatggaaaagattaaaccaatggtgagagatggagtttattttctatatgaggccctacatggaccaccaaagaaaatcttggtagaaggtgcaaatgcagcactattagatattgattttgggacttacccttttgtaacctcttcaaattgtactgttggaggtgtttgtactggtttgggtatgccacctcaaaatgttggagaagtgtatggagttgtgaaagcttatacaactagagttggtattggtgcctttcctacagagcaagacaatgaaattggagaattattacaaacaaggggtagagagtttggtgtaactactggaaggaaaagaagatgtggctggttggacctcgttttgctcaaatatgctcatatgatcaatggatttactgcgttggcacttaccaagttggatattttggacatgtttacggaaatcaaagttggagttgcttacaagttagatggtgaaatcatacctcatatcccagcaaaccaagaagtcttaaataaagttgaagttcaatataagactctcccaggatggaacacagacatatcaaatgcaagggcgtttaaagaactacctgttaatgcacaaaactatgttcgatttattgaagatgagcttcaaattccagttaagtggattggtgttggtaaatccagagaatctatgattcaactcttttaatgattgccagtaatgcaagaaacactccttgagagggaggggaaaagactttcttaaatatttcatttatgacctgcaaattcaagaataaagacactgaatggattggttttcaacatcgtgcctgccgatatgcctacagaatcatctaatcatcaaaaaacaaataggaactatcagaatgaactttgtcagaactctggaaaacacaggtttacatcagtcaggtaaacaatagataaagaaaaaggcaaattaaaaatggtaggaaagctgtgtggtgtttttacttgtccttgcccatcccctttccaggtcaatggcaatcttgaagaaagcaacctgcattgccagtgtgggaccctggtctctggttctaaagggagcagagcagaccttatttgcaaattattgtggtctttctattttaacctctctgtggctgcctgaagggctgacacagagtgcccatctgtgttttatctaactcagaattcacctaggatggaaaagtggtgagcattgcttggaaacattataaggagaacaaaaaaaccacaactgcttggagcaaaagatgatatacacaatctaaagcctgggaggaagaac

SEQ ID NO: 388626 - DNA, 3053 bp, Homo sapiens
tgcacgggagtggcgcgccaggccgcggaaggggcgtggcctcggtccggggtggcggccgttgccgccaccagggcctcttcctgcgggcggtgctgccgaggccggcctgcgcggggcagtcatggtacccccttgagcgggctgtggcggagagcggggcggggactggctggagggtggcggcccggcggggcgggggcggggccggcctctggctccttcttcctctgcatgtggctggcggccgcagagcagttcagttcgctcactcctcgccggccgcctctccttcgggctctcctcgcgtcactggagccatggcgttcgccgagacctacccggcggcatcctccctgcccaacggcgattgcggccgccccagggcgcggcccggaggaaaccgggtgacggtggtgctcggtgcgcagtggggcgacgaaggcaaagggaaggtggtggacctgctggcgcaggacgccgacatcgtgtgccgctgccagtgtgctccatacatgaaagttaaggagaaattacttttactagttggtcccagaggaaggaatcccttctctgttcaaaaaaagtgagatctggtcatgctgtggggaagacgtatccgaataccgagctttcttgctgtcgacagcgggagagaggctgaggcctgtgtgtctccttcactgacatcttgacatctcgttaatatggaaatagctcaggttgagctacactatgggttgtaagaaggtttggagaacacaaccattatgggaggaaataatgctggccatacagttgttgtggattctgtggaatatgattttcatctcttacccagtggaataattaatccaaatgtcactgcattcattggaaatggtgtggtaattcatctacctggattgtttgaagaagcagagaaaaatgttcaaaaaggaaaaggactagaaggctgggaaaaaaggcttattatatctgacagagctcatattgtatttgattttcatcaagcagctgatggtatccaggaacaacagagacaagaacaagcaggaaaaaatttgggtacaacaaaaaagggcattggcccagtttattcgtccaaagctgctcggagtggactcaggatgtgcgaccttgtttctgactttgatggcttctctgagaggtttaaagttctagctaaccaatacaaatctatataccccactttggaaatagacattgaaggtgaattacaaaaactcaagggttatatggaaaagattaaaccaatggtgagagatggagtttattttctatatgaggccctacatggaccaccaaagaaaatcttggtagaaggtgcaaatgcagcactattagatattgattttgggacttacccttttgtaacctcttcaaattgtactgttggaggtgtttgtactggtttgggtatgccacctcaaaatgttggagaagtgtatggagttgtgaaagcttatacaactagagttggtattggtgcctttcctacagagcaagacaatgaaattggagaattattacaaacaaggggtagagagtttggtgtaactactggaaggaaaagaagatgtggctggttggacctcgttttgctcaaatatgctcatatgatcaatggatttactgcgttggcacttaccaagttggatattttggacatgtttacggaaatcaaagttggagttgcttacaagttagatggtgaaatcatacctcatatcccagcaaaccaagaagtcttaaataaagttgaagttcaatataagactctcccaggatggaacacagacatatcaaatgcaagggcgtttaaagaactacctgttaatgcacaaaactatgttcgatttattgaagatgagcttcaaattccagttaagtggattggtgttggtaaatccagagaatctatgattcaactcttttaatgattgccagtaatgcaagaaacactccttgagagggaggggaaaagactttcttaaatatttcatttatgacctgcaaattcaagaataaagacactgaagtaagtttgaagccctacagttgtttccagtcttttcagatggatgcctactgtggagattaactttggcatattccagtgtcagctttctttagctggaattgccaaatcatttgttgctcctgctgctctcatggtgccacgtttttttttttcaatgtttagtaatagtataatccatgttgtttgatatcaaaagtagaattacttttaatgtagtttttcttcattattgtcattgcgtgttcttaagttttacccctattagatggtaagaacaattaatgcagttttgcacaaatatttttacattctgatcattcagttctgtcattgtaatctttgttgttagaaacaaatgatgaaaacataggggttctgtaaacttttgtaatgctatgaattctgtttaaattttgggctgtctattttctgctgaaaccatgcaaaattgagctttggtggggctgggagggggttatgtattcatgggacctttaatttgtacagaacacagaacttatttctgtcagttatttaatacattgaaaatttagtgaaatgttcaaagagaatagatgtttcccaaaacaacaatctttatgttaaaaatagtcattaaaagatctgttgtaatatatggtggatatttttctttaatttcaaacattacctctgaaatgtgtatcttttcttttttatcttaccattaattttaaatctagtggattggttttcaacatcgtgcctgccgatatgcctacagaatcatctgtaagtgtcaaaatgaacccacgttgttagccataattttgattatgcctttatttctcctttcttgaaaaaaaaaaggtgttattttgacaattaggcataacattgttttgtagattatcttttaatgaactattttaaatgttaaattaggtgccacttaaatttattttattacaccatgaatagctgattaaaagaaccaaatatttctagt

SEQ ID NO: 388627 - DNA, 2331 bp, Homo sapiens
gaattgcgagctgcggtaccccggcgcaattgcgtggtgtctgctgctcagggaggaaataatgctggccatacagttgttgtggattctgtggaatatgattttcatctcttacccagtggaataattaatccaaatgtcactgcattcattggaaatggtgtggtaattcatctacctggattgtttgaagaagcagagaaaaatgttcaaaaaggaaaaggactagaaggctgggaaaaaaggcttattatatctgacagagctcatattgtatttgattttcatcaagcagctgatggtatccaggaacaacagagacaagaacaagcaggaaaaaatttgggtacaacaaaaaagggcattggcccagtttattcgtccaaagctgctcggagtggactcaggatgtgcgaccttgtttctgactttgatggcttctctgagaggtttaaagttctagctaaccaatacaaatctatataccccactttggaaatagacattgaaggtgaattacaaaaactcaagggttatatggaaaagattaaaccaatggtgagagatggagtttattttctatatgaggccctacatggaccaccaaagaaaatcttggtagaaggtgcaaatgcagcactattagatattgattttgggacttacccttttgtaacctcttcaaattgtactgttggaggtgtttgtactggtttgggtatgccacctcaaaatgttggagaagtgtatggagttgtgaaagcttatacaactagagttggtattggtgcctttcctacagagcaagacaatgaaattggagaattattacaaacaaggggtagagagtttggtgtaactactggaaggaaaagaagatgtggctggttggacctcgttttgctcaaatatgctcatatgatcaatggatttactgcgttggcacttaccaagttggatattttggacatgtttacggaaatcaaagttggagttgcttacaagttagatggtgaaatcatacctcatatcccagcaaaccaagaagtcttaaataaagttgaagttcaatataagactctcccaggatggaacacagacatatcaaatgcaagggcgtttaaagaactacctgttaatgcacaaaactatgttcgatttattgaagatgagcttcaaattccagttaagtggattggtgttggtaaatccagagaatctatgattcaactcttttaatgattgccagtaatgcaagaaacactccttgagagggaggggaaaagactttcttaaatatttcatttatgacctgcaaattcaagaataaagacactgaagtaagtttgaagccctacagttgtttccagtcttttcagatggatgcctactgtggagattaactttggcatattccagtgtcagctttctttagctggaattgccaaatcatttgttgctcctgctgctctcatggtgccacgtttttttttttcaatgtttagtaatagtataatccatgttgtttgatatcaaaagtagaattacttttaatgtagtttttcttcattattgtcattgcgtgttcttaagttttacccctattagatggtaagaacaattaatgcagttttgcacaaatatttttacattctgatcattcagttctgtcattgtaatctttgttgttagaaacaaatgatgaaaacataggggttctgtaaacttttgtaatgctatgaattctgtttaaattttgggctgtctattttctgctgaaaccatgcaaaattgagctttggtggggctgggagggggttatgtattcatgggacctttaatttgtacagaacacagaacttatttctgtcagttatttaatacattgaaaatttagtgaaatgttcaaagagaatagatgtttcccaaaacaacaatctttatgttaaaaatagtcattaaaagatctgttgtaatatatggtggatatttttctttaatttcaaacattacctctgaaatgtgtatcttttcttttttatcttaccattaattttaaatctagtggattggttttcaacatcgtgcctgccgatatgcctacagaatcatctgtaagtgtcaaaatgaacccacgttgttagccataattttgattatgcctttatttctcctttcttgaaaaaaaaaaggtgttattttgacaattaggcataacattgttttgtagattatcttttaatgaactattttaaatgttaaattaggtgccacttaaatttattttattacaccatgaatagctgattaaaagaaccaaatatttctagt

SEQ ID NO: 388628 - DNA, 1960 bp, Homo sapiens
gctaatccaaatgttacaatagagtgagcaccgtcaccagcccttttctactttgcgtttgtcagttttcatgtcataaagtcaggtaatttattcttgttctggttatgttaaacgtttattagtatacatggaaattggtttttgtctttgtgtatagggttatatggaaaagattaaaccaatggtgagagatggagtttattttctatatgaggccctacatggaccaccaaagaaaatcttggtagaaggtgcaaatgcagcactattagatattgattttgggacttacccttttgtaacctcttcaaattgtactgttggaggtgtttgtactggtttgggtatgccacctcaaaatgttggagaagtgtatggagttgtgaaagcttatacaactagagttggtattggtgcctttcctacagagcaagacaatgaaattggagaattattacaaacaaggggtagagagtttggtgtaactactggaaggaaaagaagatgtggctggttggacctcgttttgctcaaatatgctcatatgatcaatggatttactgcgttggcacttaccaagttggatattttggacatgtttacggaaatcaaagttggagttgcttacaagttagatggtgaaatcatacctcatatcccagcaaaccaagaagtcttaaataaagttgaagttcaatataagactctcccaggatggaacacagacatatcaaatgcaagggcgtttaaagaactacctgttaatgcacaaaactatgttcgatttattgaagatgagcttcaaattccagttaagtggattggtgttggtaaatccagagaatctatgattcaactcttttaatgattgccagtaatgcaagaaacactccttgagagggaggggaaaagactttcttaaatatttcatttatgacctgcaaattcaagaataaagacactgaagtaagtttgaagccctacagttgtttccagtcttttcagatggatgcctactgtggagattaactttggcatattccagtgtcagctttctttagctggaattgccaaatcatttgttgctcctgctgctctcatggtgccacgtttttttttttcaatgtttagtaatagtataatccatgttgtttgatatcaaaagtagaattacttttaatgtagtttttcttcattattgtcattgcgtgttcttaagttttacccctattagatggtaagaacaattaatgcagttttgcacaaatatttttacattctgatcattcagttctgtcattgtaatctttgttgttagaaacaaatgatgaaaacataggggttctgtaaacttttgtaatgctatgaattctgtttaaattttgggctgtctattttctgctgaaaccatgcaaaattgagctttggtggggctgggagggggttatgtattcatgggacctttaatttgtacagaacacagaacttatttctgtcagttatttaatacattgaaaatttagtgaaatgttcaaagagaatagatgtttcccaaaacaacaatctttatgttaaaaatagtcattaaaagatctgttgtaatatatggtggatatttttctttaatttcaaacattacctctgaaatgtgtatcttttcttttttatcttaccattaattttaaatctagtggattggttttcaacatcgtgcctgccgatatgcctacagaatcatctgtaagtgtcaaaatgaacccacgttgttagccataattttgattatgcctttatttctcctttcttgaaaaaaaaaaggtgttattttgacaattaggcataacattgttttgtagattatcttttaatgaactattttaaatgttaaattaggtgccacttaaatttattttattacaccatgaatagctgattaaaagaaccaaatatttctagt

SEQ ID NO: 388629 - DNA, 2032 bp, Homo sapiens
gggagtcatatttgttttacactaacaggaaactatgaaaataagtagatgagtttcagcattaaatttcttcataatccagtaagtgagtagctgctataaagagctgagtcagtcactgtacatgcattcaaggagcctctctgtataagcacttgcgttaaagctctgacctcgtttttatgtcattacagctaaaatgaataaaaagtaaaacactgagtctttgagagggcagttacagttcagatctgttagatacctataatatactcaaatgcagaattgtaacggtaattctgttttaaaatgtgttattcatgtgtctactatattttaatgtctgtttctgtttttagggacttacccttttgtaacctcttcaaattgtactgttggaggtgtttgtactggtttgggtatgccacctcaaaatgttggagaagtgtatggagttgtgaaagcttatacaactagagttggtattggtgcctttcctacagagcaagacaatgaaattggagaattattacaaacaaggggtagagagtttggtgtaactactggaaggaaaagaagatgtggctggttggacctcgttttgctcaaatatgctcatatgatcaatggatttactgcgttggcacttaccaagttggatattttggacatgtttacggaaatcaaagttggagttgcttacaagttagatggtgaaatcatacctcatatcccagcaaaccaagaagtcttaaataaagttgaagttcaatataagactctcccaggatggaacacagacatatcaaatgcaagggcgtttaaagaactacctgttaatgcacaaaactatgttcgatttattgaagatgagcttcaaattccagttaagtggattggtgttggtaaatccagagaatctatgattcaactcttttaatgattgccagtaatgcaagaaacactccttgagagggaggggaaaagactttcttaaatatttcatttatgacctgcaaattcaagaataaagacactgaagtaagtttgaagccctacagttgtttccagtcttttcagatggatgcctactgtggagattaactttggcatattccagtgtcagctttctttagctggaattgccaaatcatttgttgctcctgctgctctcatggtgccacgtttttttttttcaatgtttagtaatagtataatccatgttgtttgatatcaaaagtagaattacttttaatgtagtttttcttcattattgtcattgcgtgttcttaagttttacccctattagatggtaagaacaattaatgcagttttgcacaaatatttttacattctgatcattcagttctgtcattgtaatctttgttgttagaaacaaatgatgaaaacataggggttctgtaaacttttgtaatgctatgaattctgtttaaattttgggctgtctattttctgctgaaaccatgcaaaattgagctttggtggggctgggagggggttatgtattcatgggacctttaatttgtacagaacacagaacttatttctgtcagttatttaatacattgaaaatttagtgaaatgttcaaagagaatagatgtttcccaaaacaacaatctttatgttaaaaatagtcattaaaagatctgttgtaatatatggtggatatttttctttaatttcaaacattacctctgaaatgtgtatcttttcttttttatcttaccattaattttaaatctagtggattggttttcaacatcgtgcctgccgatatgcctacagaatcatctgtaagtgtcaaaatgaacccacgttgttagccataattttgattatgcctttatttctcctttcttgaaaaaaaaaaggtgttattttgacaattaggcataacattgttttgtagattatcttttaatgaactattttaaatgttaaattaggtgccacttaaatttattttattacaccatgaatagctgattaaaagaaccaaatatttctagt

SEQ ID NO: 388630 - DNA, 1903 bp, Homo sapiens
gctaatccaaatgttacaatagagtgagcaccgtcaccagcccttttctactttgcgtttgtcagttttcatgtcataaagtcaggtaatttattcttgttctggttatgttaaacgtttattagtatacatggaaattggtttttgtctttgtgtatagggttatatggaaaagattaaaccaatggtgagagatggagtttattttctatatgaggccctacatggaccgacttacccttttgtaacctcttcaaattgtactgttggaggtgtttgtactggtttgggtatgccacctcaaaatgttggagaagtgtatggagttgtgaaagcttatacaactagagttggtattggtgcctttcctacagagcaagacaatgaaattggagaattattacaaacaaggggtagagagtttggtgtaactactggaaggaaaagaagatgtggctggttggacctcgttttgctcaaatatgctcatatgatcaatggatttactgcgttggcacttaccaagttggatattttggacatgtttacggaaatcaaagttggagttgcttacaagttagatggtgaaatcatacctcatatcccagcaaaccaagaagtcttaaataaagttgaagttcaatataagactctcccaggatggaacacagacatatcaaatgcaagggcgtttaaagaactacctgttaatgcacaaaactatgttcgatttattgaagatgagcttcaaattccagttaagtggattggtgttggtaaatccagagaatctatgattcaactcttttaatgattgccagtaatgcaagaaacactccttgagagggaggggaaaagactttcttaaatatttcatttatgacctgcaaattcaagaataaagacactgaagtaagtttgaagccctacagttgtttccagtcttttcagatggatgcctactgtggagattaactttggcatattccagtgtcagctttctttagctggaattgccaaatcatttgttgctcctgctgctctcatggtgccacgtttttttttttcaatgtttagtaatagtataatccatgttgtttgatatcaaaagtagaattacttttaatgtagtttttcttcattattgtcattgcgtgttcttaagttttacccctattagatggtaagaacaattaatgcagttttgcacaaatatttttacattctgatcattcagttctgtcattgtaatctttgttgttagaaacaaatgatgaaaacataggggttctgtaaacttttgtaatgctatgaattctgtttaaattttgggctgtctattttctgctgaaaccatgcaaaattgagctttggtggggctgggagggggttatgtattcatgggacctttaatttgtacagaacacagaacttatttctgtcagttatttaatacattgaaaatttagtgaaatgttcaaagagaatagatgtttcccaaaacaacaatctttatgttaaaaatagtcattaaaagatctgttgtaatatatggtggatatttttctttaatttcaaacattacctctgaaatgtgtatcttttcttttttatcttaccattaattttaaatctagtggattggttttcaacatcgtgcctgccgatatgcctacagaatcatctgtaagtgtcaaaatgaacccacgttgttagccataattttgattatgcctttatttctcctttcttgaaaaaaaaaaggtgttattttgacaattaggcataacattgttttgtagattatcttttaatgaactattttaaatgttaaattaggtgccacttaaatttattttattacaccatgaatagctgattaaaagaaccaaatatttctagt

SEQ ID NO: 388631 - DNA, 162 bp, Homo sapiens
taccttagcaatcttcagggtgttgccattaaattcctgccccgcactttcttaggaaatactccagaaatccagcctttacctaccttttgtcttacattcagatctggtcatgctgtggggaagacgtatccgaataccgagctttcttgctgtcgacag

SEQ ID NO: 388632 - DNA, 358 bp, Homo sapiens
ggcatactgtcctgtgctgggtcttatttgtacatcctgtttagaaatcggcacagtctgctaacagaatagagaacagcaaaaaggcacatagggaaaagttatggtgatactgagaaaagtaggggactacctgttttaatcccaacgagtgaacattagagatgaattgattcaattccttttctctttgtattctcctagttaagtggattggtgttggtaaatccagagaatctatgattcaactcttttaatgattgccagtaatgcaagaaacactccttgagagggaggggaaaagactttcttaaatatttcatttatgacctgcaaattcaagaataaagacactgaa

SEQ ID NO: 388633 - DNA, 2783 bp, Homo sapiens
tgcacgggagtggcgcgccaggccgcggaaggggcgtggcctcggtccggggtggcggccgttgccgccaccagggcctcttcctgcgggcggtgctgccgaggccggcctgcgcggggcagtcatggtacccccttgagcgggctgtggcggagagcggggcggggactggctggagggtggcggcccggcggggcgggggcggggccggcctctggctccttcttcctctgcatgtggctggcggccgcagagcagttcagttcgctcactcctcgccggccgcctctccttcgggctctcctcgcgtcactggagccatggcgttcgccgagacctacccggcggcatcctccctgcccaacggcgattgcggccgccccagggcgcggcccggaggaaaccgggtgacggtggtgctcggtgcgcagtggggcgacgaaggcaaagggaaggtggtggacctgctggcgcaggacgccgacatcgtgtgccgctgccagggaggaaataatgctggccatacagttgttgtggattctgtggaatatgattttcatctcttacccagtggaataattaatccaaatgtcactgcattcattggaaatggtgtggtaattcatctacctggattgtttgaagaagcagagaaaaatgttcaaaaaggaaaaggactagaaggctgggaaaaaaggcttattatatctgacagagctcatattgtatttgattttcatcaagcagctgatggtatccaggaacaacagagacaagaacaagcaggaaaaaatttgggtacaacaaaaaagggcattggcccagtttattcgtccaaagctgctcggagtggactcaggatgtgcgaccttgtttctgactttgatggcttctctgagaggtttaaagttctagctaaccaatacaaatctatataccccactttggaaatagacattgaaggtgaattacaaaaactcaagggttatatggaaaagattaaaccaatggtgagagatggagtttattttctatatgaggccctacatggaccaccaaagaaaatcttggtagaaggtgcaaatgcagcactattagatattgattttgggacttacccttttgtaacctcttcaaattgtactgttggaggtgtttgtactggtttgggtatgccacctcaaaatgttggagaagtgtatggagttgtgaaagcttatacaactagagttggtattggtgcctttcctacagagcaagacaatgaaattggagaattattacaaacaaggggtagagagtttggtgtaactactggaaggaaaagaagatgtggctggttggacctcgttttgctcaaatatgctcatatgatcaatggatttactgcgttggcacttaccaagttggatattttggacatgtttacggaaatcaaagttggagttgcttacaagttagatggtgaaatcatacctcatatcccagcaaaccaagaagtcttaaataaagttgaagttcaatataagactctcccaggatggaacacagacatatcaaatgcaagggcgtttaaagaactacctgttaatgcacaaaactatgttcgatttattgaagatgagcttcaaattccagttaagtggattggtgttggtaaatccagagaatctatgattcaactcttttaatgattgccagtaatgcaagaaacactccttgagagggaggggaaaagactttcttaaatatttcatttatgacctgcaaattcaagaataaagacactgaagtaagtttgaagccctacagttgtttccagtcttttcagatggatgcctactgtggagattaactttggcatattccagtgtcagctttctttagctggaattgccaaatcatttgttgctcctgctgctctcatggtgccacgtttttttttttcaatgtttagtaatagtataatccatgttgtttgatatcaaaagtagaattacttttaatgtagtttttcttcattattgtcattgcgtgttcttaagttttacccctattagatggtaagaacaattaatgcagttttgcacaaatatttttacattctgatcattcagttctgtcattgtaatctttgttgttagaaacaaatgatgaaaacataggggttctgtaaacttttgtaatgctatgaattctgtttaaattttgggctgtctattttctgctgaaaccatgcaaaattgagctttggtggggctgggagggggttatgtattcatgggacctttaatttgtacagaacacagaacttatttctgtcagttatttaatacattgaaaatttagtgaaatgttcaaagagaatagatgtttcccaaaacaacaatctttatgttaaaaatagtcattaaaagatctgttgtaatatatggtggatatttttctttaatttcaaacattacctctgaaatgtgtatcttttcttttttatcttaccattaattttaaatctagtggattggttttcaacatcgtgcctgccgatatgcctacagaatcatctgtaagtgtcaaaatgaacccacgttgttagccataattttgattatgcctttatttctcctttcttgaaaaaaaaaaggtgttattttgacaattaggcataacattgttttgtagattatcttttaatgaactattttaaatgttaaattaggtgccacttaaatttattttattacaccatgaatagctgattaaaagaaccaaatatttctagt

SEQ ID NO: 388634 - DNA, 2555 bp, Homo sapiens
aaaaaaccttatcgggctaggtacgaggcctggtgttcgctcactcctcgccggccgcctctccttcgggctctcctcgcgtcactggagccatggcgttcgccgagacctacccggcggcatcctccctgcccaacggcgattgcggccgccccagggcgcggcccggaggaaaccgggtgacggtggtgctcggtgcgcagtggggcgacgaaggcaaagggaaggtggtggacctgctggcgcaggacgccgacatcgtgtgccgctgccagggaggaaataatgctggccatacagttgttgtggattctgtggaatatgattttcatctcttacccagtggaataattaatccaaatgtcactgcattcattggaaatggtgtggtaattcatctacctggattgtttgaagaagcagagaaaaatgttcaaaaaggaaaaggactagaaggctgggaaaaaaggcttattatatctgacagagctcatattgtatttgattttcatcaagcagctgatggtatccaggaacaacagagacaagaacaagcaggaaaaaatttgggtacaacaaaaaagggcattggcccagtttattcgtccaaagctgctcggagtggactcaggatgtgcgaccttgtttctgactttgatggcttctctgagaggtttaaagttctagctaaccaatacaaatctatataccccactttggaaatagacattgaaggtgaattacaaaaactcaagggttatatggaaaagattaaaccaatggtgagagatggagtttattttctatatgaggccctacatggaccaccaaagaaaatcttggtagaaggtgcaaatgcagcactattagatattgattttgggacttacccttttgtaacctcttcaaattgtactgttggaggtgtttgtactggtttgggtatgccacctcaaaatgttggagaagtgtatggagttgtgaaagcttatacaactagagttggtattggtgcctttcctacagagcaagacaatgaaattggagaattattacaaacaaggggtagagagtttggtgtaactactggaaggaaaagaagatgtggctggttggacctcgttttgctcaaatatgctcatatgatcaatggatttactgcgttggcacttaccaagttggatattttggacatgtttacggaaatcaaagttggagttgcttacaagttagatggtgaaatcatacctcatatcccagcaaaccaagaagtcttaaataaagttgaagttcaatataagactctcccaggatggaacacagacatatcaaatgcaagggcgtttaaagaactacctgttaatgcacaaaactatgttcgatttattgaagatgagcttcaaattccagttaagtggattggtgttggtaaatccagagaatctatgattcaactcttttaatgattgccagtaatgcaagaaacactccttgagagggaggggaaaagactttcttaaatatttcatttatgacctgcaaattcaagaataaagacactgaagtaagtttgaagccctacagttgtttccagtcttttcagatggatgcctactgtggagattaactttggcatattccagtgtcagctttctttagctggaattgccaaatcatttgttgctcctgctgctctcatggtgccacgtttttttttttcaatgtttagtaatagtataatccatgttgtttgatatcaaaagtagaattacttttaatgtagtttttcttcattattgtcattgcgtgttcttaagttttacccctattagatggtaagaacaattaatgcagttttgcacaaatatttttacattctgatcattcagttctgtcattgtaatctttgttgttagaaacaaatgatgaaaacataggggttctgtaaacttttgtaatgctatgaattctgtttaaattttgggctgtctattttctgctgaaaccatgcaaaattgagctttggtggggctgggagggggttatgtattcatgggacctttaatttgtacagaacacagaacttatttctgtcagttatttaatacattgaaaatttagtgaaatgttcaaagagaatagatgtttcccaaaacaacaatctttatgttaaaaatagtcattaaaagatctgttgtaatatatggtggatatttttctttaatttcaaacattacctctgaaatgtgtatcttttcttttttatcttaccattaattttaaatctagtggattggttttcaacatcgtgcctgccgatatgcctacagaatcatctgtaagtgtcaaaatgaacccacgttgttagccataattttgattatgcctttatttctcctttcttgaaaaaaaaaaggtgttattttgacaattaggcataacattgttttgtagattatcttttaatgaactattttaaatgttaaattaggtgccacttaaatttattttattacaccatgaatagctgattaaaagaaccaaatatttctagt

SEQ ID NO: 388635 - DNA, 1870 bp, Homo sapiens
tgcacgggagtggcgcgccaggccgcggaaggggcgtggcctcggtccggggtggcggccgttgccgccaccagggcctcttcctgcgggcggtgctgccgaggccggcctgcgcggggcagtcatggtacccccttgagcgggctgtggcggagagcggggcggggactggctggagggtggcggcccggcggggcgggggcggggccggcctctggctccttcttcctctgcatgtggctggcggccgcagagcagttcagttcgctcactcctcgccggccgcctctccttcgggctctcctcgcgtcactggagccatggcgttcgccgagacctacccggcggcatcctccctgcccaacggcgattgcggccgccccagggcgcggcccggaggaaaccgggtgacggtggtgctcggtgcgcagtggggcgacgaaggcaaagggaaggtggtggacctgctggcgcaggacgccgacatcgtgtgccgctgccagggaggaaataatgctggccatacagttgttgtggattctgtggaatatgattttcatctcttacccagtggaataattaatccaaatgtcactgcattcattggaaatggtgtggtaattcatctacctggattgtttgaagaagcagagaaaaatgttcaaaaaggaaaaggactagaaggctgggaaaaaaggcttattatatctgacagagctcatattgtatttgattttcatcaagcagctgatggtatccaggaacaacagagacaagaacaagcaggaaaaaatttgggtacaacaaaaaagggcattggcccagtttattcgtccaaagctgctcggagtggactcaggatgtgcgaccttgtttctgactttgatggcttctctgagaggtttaaagttctagctaaccaatacaaatctatataccccactttggaaatagacattgaaggtgaattacaaaaactcaagggttatatggaaaagattaaaccaatggtgagagatggagtttattttctatatgaggccctacatggaccaccaaagaaaatcttggtagaaggtgcaaatgcagcactattagatattgattttgggacttacccttttgtaacctcttcaaattgtactgttggaggtgtttgtactggtttgggtatgccacctcaaaatgttggagaagtgtatggagttgtgaaagcttatacaactagagttggtattggtgcctttcctacagagcaagacaatgaaattggagaattattacaaacaaggggtagagagtttggtgtaactactggaaggaaaagaagatgtggctggttggacctcgttttgctcaaatatgctcatatgatcaatggatttactgcgttggcacttaccaagttggatattttggacatgtttacggaaatcaaagttggagttgcttacaagttagatggtgaaatcatacctcatatcccaggtattttcttttaggcaatatctaaaggatattataaggtgaatgtattagagcagtttcataaagctcttccatataatttgtgatagatagcgacaggtttgatatgccctttatgattagtgcaaatttgctcacttattattagttatttggttcatagctaatacttatttaggtgttgggtcacaacaagcatgtgctcaaactcaaaagaaaaaacatggacctctgagcctagccatacagctcttgagtctcatcttccctcctttgaaagcaatttccatggaggtgtttcttccttccttggggaagtatgccactcttgagagtgaataagaagaggggtaagaagagcccttgttaagctggctctcag

SEQ ID NO: 388636 - DNA, 727 bp, Homo sapiens
tgcacgggagtggcgcgccaggccgcggaaggggcgtggcctcggtccggggtggcggccgttgccgccaccagggcctcttcctgcgggcggtgctgccgaggccggcctgcgcggggcagtcatggtacccccttgagcgggctgtggcggagagcggggcggggactggctggagggtggcggcccggcggggcgggggcggggccggcctctggctccttcttcctctgcatgtggctggcggccgcagagcagttcagttcgctcactcctcgccggccgcctctccttcgggctctcctcgcgtcactggagccatggcgttcgccgagacctacccggcggcatcctccctgcccaacggcgattgcggccgccccagggcgcggcccggaggaaaccgggtgacggtggtgctcggtgcgcagtggggcgacgaaggcaaagggaaggtggtggacctgctggcgcaggacgccgacatcgtgtgccgctgccagggaggaaataatgctggccatacagttgttgtggattctgtggaatatgattttcatctcttacccagtggaataattaatccaaatgtcactgcattcattggaaatggtgtggtaattcatctacctggattgtttgaagaagcagagaaaaatgttcaaaaaggaaaaggcggccgctcgcgatctagaactagcccacgcgtccgcgacccacgcgtccg

SEQ ID NO: 388637 - DNA, 144 bp, Homo sapiens
gcccgcggctcgcggacctgcagcccagcccggccgcgctgcgtgccccggcgcgcacccctcccactcccatccactcggagccacgtcccctgcccggctccggccggctcccaccgtccccggccaccgtcttcgcccctg

SEQ ID NO: 388638 - DNA, 561 bp, Homo sapiens
ccatccaggctgttaatttatttggtcaacagtttcgtgatttccatatggtgctgatgtctttgttagctcttcttcacttcctgcatttatttttatgtggcaggctgcctagtccctaggggaatagctgagtggtaggaggggttgtgatcttttagcaagatttcaaaacagaataatgtatgcatgtaataaaaacaaatacgctcactcacagtgcaaaaccaaaaagaacacccaaatccctggaacttctgtgctactaagtcttttgttgtaggctaagattattttccttttggggttaattatttctgccttaattattgactgttgtgaaatctctcttctgagacattcccaaattttatttaaactagtgggtaccagctgtactgaaaccataattttagccatgtatttttattagaaaaatgtttccaggggattaaggaattttaatatttagtggaagttttaaaaaagaatgtaaaaatgccttttggaacctaagaatagttgtctattttagaaaaatcagaaatattgatggagaaa

SEQ ID NO: 388639 - DNA, 515 bp, Homo sapiens
tttccactgcatgcctgatgctgtcagtagcagatcctgtttcaaaaacagagtagaggccactaggcacaaactccctcagcttcctcccctcaccacataaaaatgtcctagtacctttatattaacttcttgtctgtcccagagaaagaggggtcccgattccaccctcagacttagcacctccacctgtgatttttgtttctatttcttactgcttttaattgtgaccctgctaaatctctcggaaagcttgtaaaagcagtgattgctggaccttacccacagagtctctgattttagtggcttgggagtaagactagagaatttgcatttccgacaagttgcctggtgatgctgcgctgctgtctggggaatcatacttggaaaatcattgtcttttagatagtgcttgtgctttttgtttgtttgtttgtttttgagacagggtcttgctctgttaccctggctggagtgcaatggtgcaatttcaacttactgcaacctctgcttcc

SEQ ID NO: 388640 - DNA, 442 bp, Homo sapiens
catggttccaaaactggcagttgagccaagagatcaattgaaatgaaaaggcttcttgaagtgaaggtccaaagtgctagctttgcattttggcaatctagagcaattgtattagtgggccagagttcttgagtctaggcaggcgtgccagacagattctttatactctcctgctactgacctggcccactcagactccatccctgacactgtcccattacaataaaacaagttgcacagaaataggactgaaaatatcagtaaccatctgttttccttatcatggtggggacatgagcttcagcttttggattcaggaccacaggtatggcagagaacaaagtatatttagtgaaccataaacactgggattcctctgtgtgccagacattactctagatgcaaggtctctgttctcctggaacacgcattccagacaaga

SEQ ID NO: 388641 - DNA, 318 bp, Homo sapiens
ccatctgacacagagtcccacaggaatcagcttgcagtgggctttataatccaaagttagcattatactgcagtgtttcctcccatggttcaaggaaaaaacaacctgaagtggggcttttctatttatgagagaagatttataagtaattcaaaagtggtatttactatcagaagtcagagatcacttctaagcatatcagtaaatgccctcaatttggtatccacatacttttaacttggaagatttgttatgagcatccccctttatcagtatgacttctttctttgtgctctcttgagaagggaaaagatgaag

SEQ ID NO: 388642 - DNA, 619 bp, Homo sapiens
taagtagtgaatatatttatttgtaagactaaaagtagactcagaattagtctgaaaaccacagtagtactggttttttttacacctgtatttgccttcgttttcttttctttgtatttcatgcatctcagcctcttctctttttgtatttcatgcatctcagcctatgcttctcttcagtgcgtgcctgtagtgcacataagtcttctaaggatcaactttgtaactgaaccaactggactcctgtccaggagtttatacccttcttggcatctctcctgcccatttgtttaatctttccaactcatttgatcctctagtattagagctgacagctgcagttgcatatggagttcataaagtagctgaataataaaatgtcatgacccagttcttgtatagtttcactgatgactaaattggcaactcttttaatattgaaatgggaatgatcaagctgtgtacttttctttggaagttcacgtatattcaatgagtacttttacctcctatgactttccatagcagaaatgctacagacttatttggcaggtcaggtggaacattatcttgattttataattatcttgattttacaagaggaaagtttatgtataaa

SEQ ID NO: 388643 - DNA, 555 bp, Homo sapiens
aaggcaatgctgagataatcgagggtactcggttgaggatactcaccagatttggctgctttctctcctgcttccccagagtctggcctcttctggttttagcatcttcattttctgcagagatggagtctcaccatgttgcccaggctggcctcaaactcctgagctcaaggaatcctcccaccttgacctcccaaagtgctgggattatagaaatgagccaccatgcctgggctcccaattctcgaagttggagaaaatggaaaaaaggtgatattgatgatctttcctgagtcctattatgtgcctgacattgtttgagaagctgaacttctcaagggagagatctgttcttcagaccagagggaaatttggaagcccaaatagagaacagtatttctagatctgacctttagactataagaggcacctaattccttaaaatagaatattgttgcttttcattatgccatgcacatgataagggctctgtatatattttgggatgagggcaatagtattgtccatgtttctctaaaataaactggtaaaact

SEQ ID NO: 388644 - DNA, 292 bp, Homo sapiens
tctaatcataagcatgtaaatcttgcaaatctcctcaccagaaggtggtgactgtgcttaatataatgcccaaagaagccagaatgtgttttcctcatccattctgcctagcatagtctcatttcatttcccacactgtatatccactcagcattttgctccctaactgtgtttgtgcaatttactcttatttacatacccaacaagattgcctacagattctatctgtctcaatcttactggactttttaaagctcatatcaagtgtttccatccatgtcatattttctat

SEQ ID NO: 388645 - DNA, 662 bp, Homo sapiens
agcccgctctcagacccaggtctgtctgactctaggcccatattcctcccatcatgttcttctgcctccccctcttctcctgaactcttctcatcttaaggacttcattcttccctcctaagctctggtaatttaatatgacagtctgggagttactcacttttatggaagtgccgacacatttcacagacctcttgcacagtgtagttgactttcccagaagcacatctctctggagcgggaggcagcagcccagaaatgctgtctcaggaggaaaattgacatttggagttggaggtttctaagtgggatgcagaccagtgctcttcagattgttctatgctatgaccttttcccgtggcgcacattttctccactgtagagatagcgagggcttctgtattgcagagagcactgtgctttgaagggccagctttgtaatagtaaaagaggagaggcaaaggggagagggccagcaggcctgactccttggcggcagcaggaattgggctccagtcacttgcttaacactgagaaaaaggaaagaagacaggtgtgtttttgttcttaagtctcttgctttctagtggagaacattaaattaacacccaaaaaacagagaatgatgaaacaataaattgtgaggcactatgtagtaatga

SEQ ID NO: 388646 - DNA, 289 bp, Homo sapiens
aagtaggatttgctgctctcaaacaacttcaacacaggtgagggatggttccccgtgagtgaggggcaggccccaggcccggtacccaggtggtgccacacacacctcacaggctgctctgcctgcaggcctctcactgcactcatttccaggatggggcagtcatctatgcaactcccactgtgcctcacaccctgcctcatgcagaggagaaggtcgacgcagagcagaaaggtcgacgcaaagaagaaagggtcgaacgcagagaagaaagggttcggacgccaga

SEQ ID NO: 388647 - DNA, 236 bp, Homo sapiens
  misc_feature (213)..(213): n is a, c, g, or t
  misc_feature (215)..(215): n is a, c, g, or t
tatataggtcctttgtccattttttaatcagattgtgtttctttttgctgagttttttttaacatattctaacaactagaatatatagagaatatagatacataggtcctttatccattttccttttttttttttttttgagatgtagtctcactctgtcgcccaggctggagtgcagtgagtcgagatcgcgccattgcactccagcctggncnacaagagcgaaactctgtctt

SEQ ID NO: 388648 - DNA, 445 bp, Homo sapiens
cctgaggtcaggagtttgagaccagcctggctaacatggtgaaacacagtctctactaaaaatacgaaaatgaactgggcgtggtggtgggtgcctgtaatcccagctaattgggaggctgaggcaggagaatcacttgaacccgggaggtggaggttgcagtgagctgagatcatgccattgcactcctgtctgggctataagagcaaaattccgtctcaaaaacaaaacaagacagacaaaaaagaaataatccacaccctaaagtgcgattcagctgaaattgtctatggtattttgcctagaattaaccaaaagagctggggtaggggctggtggcgcatagctcagcattacagatctacttaaatcttgtaaactatttataggtttgggttgttataacatgtttagcatggttaataagccaatcaagaaatatccc

SEQ ID NO: 388649 - DNA, 365 bp, Homo sapiens
cacagagtaataatgaactatttctcatttgtgcccagttttttgcagaagttttttaaatggggattaacctcctcacagtatcagtccatggtggttccagcatagtctatacccaaaaccatgtttagaaccacttgagggaagctcagaaccaatcaaggctatacccaggacaatctactaaaccagaatcttccctcaggtcaaaagctaagcattttccaggctcccaaagctactctgagtcaatggaacttacagtgatgtgtggcagcaagtcagggtagcctctaattcctatacagagaaagatgttttctgaaacaaaattcaggtcacacttcctgacaatagagaatatt

SEQ ID NO: 388650 - DNA, 389 bp, Homo sapiens
gtgtcatctggcttcgttcagtctatcttggctggtgccactgtcctcctgggtgtgtgtcttggtgacaatgggtttgagcgtgcagggttaccatccaggtgagtgtctggattctgatgcatctctgcaacagaatttctcagcacagggagtgtctgtggctgtggatcctgccagctgtggctctgacaggaggggtctctggccctatctccaggacccaggggtctctctgtcccaggaagcatggctctgttaacagtcccggccgcgctctaggtgtgtggccctgcagttgtgagtttgacccagtttccatcactgggtgatggtctggctttgtgcttttcctctttggctccgtgccttggggccggattgtgttt

SEQ ID NO: 388651 - DNA, 789 bp, Homo sapiens
gttgccccccacccccaccccttcaaatatagctgaagaatcactacctgaatagcctggctcagcctatctgcttcaattcattcctccttccccttgggactggacaactggaccctgcccttgcttagttggagtcagttgtgtgtgtgtgcaagttggtggaagatgtaatattttcagatctcaagaacagctcatgtttgtagtgtgctgtctcagacttgccagaataatagagctttctaatgacttaagcctcactcttatctcctattgagattttagtgcagtgttttcaataatcgttcatttgtacttcctgtgctgtgatttcagagtttgctgttcagtcaccgtggacacttttgttacttattctatcaatcttggatcttgcattcaccatttggagttaaatataaggttcacatgggagaaggaagcagggaaaatctcagtcagcaacctgagtgggatttactgtaaaagcaagggaaaataataaatacttataaatttaccctcccacccccatcaatgttttagatagttaaaaattacatgtgccaaagatgaatagccattaataatttatccagaaataaaagcaaggcagctgggagacttctccctagattaaggaagagaggctgtgggtggttgtcagtacaatggactgagctgcccagttacagtttggttaagaggactgtgctggtatgaagggcaggttatttgcttgagtgcaccccagcaattgctcagcgcctggcagaaggttgtaac

SEQ ID NO: 388652 - DNA, 1002 bp, Homo sapiens
gggaaggccttcagaaacacgtgagggaaaatgatcaaaagagaaggaaacggcccaggcacggtcgtcacgcctgtaatctcagcactttgggaggccgaggcaggcagatcacttgaggtcaggagtttgagaccagcctggctaacatggtgaaaccttgtctctactaaaaatacaaaaattagctgggcatggtggcgggcgcctataatcccagctactcgagaggctgaggcaggagaatcgcttgaacctaggaggcgaaggttttagtgagccgagatcacgccactgcactccagcctgggtgacagagcaagactcggtctaaaaaaaaaaaaaaaatgaaaacaaagaaaatgaagaagataggggctctacatgaaccaaggatcctagctggttattttgattaaaagatgactcaaatgatgttaacactgatcagactttagcacgagagctgcagagaaggaagacactatgatgagaatatatttggggttttgagctgggaaaagacttcttaaatatgatccagaaagtactggccataaggaaaaaatgttaacagatttgtctgcaccaaaatctaccaagagagtcctttcaactagaactgccgtcaccacaatgatgaacatggggaaagaggagaggtacctgctgtatattctcaggccttttagaacacatggagttgttcctctggccacatccacacgaacctacaagaaaggagatgttatagacgtcaagagatgccccacggatgttaccaaggcaaaaggaatgccccacagatgttaccaaggcaaaagaggaagagactacatgtatctagtatgctgttggcatggttggaaacaaacaacagcatgattcttgccaagagaattcatgtgtgtgtatggagcataccaagcactccaagagctgggaaggccttcagaaacacgtgagggaaaatgatcaaaagagaaggaaacggccaggcac

SEQ ID NO: 388653 - DNA, 415 bp, Homo sapiens
ggctgcaagatgaacagattgaggacaaggttcaattaacagcacaaaattcctgagaaggccagggaaaatgggatctagaactttgcttccaagtatgatccatggactgcaatactgtcattacctgtcagacatgcagaatctcagactccactccagacctgctgaatcattattttgcattttaggaagatcccaggtacttggtatagacattagagcttgagatgcactgatggagagctgagctccattctactaagagggaaggaggcaaggatgatgcctatcatgattgatttgatatctgatggcaggaagctgaaggcatttttgtctgtaggtttctattacctctgtcaaagagcaagtggaattatctgctgacactggcagggaagaggtgaaggga

SEQ ID NO: 388654 - DNA, 718 bp, Homo sapiens
actgaaagaataaacactgactctaattttcagtagcatttctctataaacatgcttgttcaatacaaaattataatacatcagaaaaatgttgtaatgccttttgaactgatctataacataacacattaaaggacaaaaggagacatatcactgctttgatgtatagttaaaaagagatgccatcatcacaattattcaaatagtttacagtgtatgtttaaccaagtatagatatatttttaaatatgattatttctacctagtattttcagaattgagtttagaatgatttacttgggatgtgcggcgattcttttttagataagtgggggatgttaggaagacattgttcaagtgcttgaaactttaatttggacaatacattgaaccacatgctggaatgttttaagtgactaccttatagttttagtatgagcctacccttggaagaaagtaaggtgatactaaattagaaaaactatgtgaaactggagtggtggtatactttggaccatatcaaataggtagagtattataagcataaaagaataaaattgggctcgctttggaaattttaaacatatatgtgtatgtgtgtatatatatgcatatacatacacatatgtgtatatacacacacacaatggtttggaagtggaacaggaaatgataactctactgacatgtctataataaaatgatgtgctttgaaact

SEQ ID NO: 388655 - DNA, 553 bp, Homo sapiens
ctgtggcagcgacaggaggacaggagtgagcaggcacaaggagggaggaccgaggaggggagaggcaagaacagaggtggcaattgtgactcttgtgtggcagcggttctccacaccaacaggtggctctcaagtttgtgtgattccacatctgtctgcttcccccaggcctctcagatttcattacagctactgctgttttcaaagcatgctgtctcctggccacacagacccagagccttctcatttgtaagggtacataatagttatatgaattttttctggtacaagtatacagtgtgtaacaatcaaatccgggtagctgggatccccctcacctcaaacacggctcattcctttgtgctgggatattccaaatcttctcttctggctatttgaaacacaacaaattattaactacggtcaccctattgtgctactgaacatgatctctgacggatgcacctccagacctccaagcacctctcaaccagctaaacacactcggtgactggcaggcaggccctggcagaagccgatctctgctgagagt

SEQ ID NO: 388656 - DNA, 2530 bp, Homo sapiens
ccctcggagctgctggccccgggcggctgctccagtctgagcgccctccgctcgccccgagagagacccggccatgcaggagccgctgctgggagccgagggcccggactacgacaccttccccgagaagccgcccccgtcgccaggggacagggcgcgggtcgggaccctgcagaacaaaagggtgttcctggccaccttcgccgcagtgctcggcaatttcagctttgggtatgccctggtctacacatcccctgtcatcccagccctggagcgctccttggatcctgacctgcatctgaccaaatcccaggcatcctggtttgggtccgtgttcaccctgggagcagcggccggaggcctgagtgccatgatcctcaacgacctcctgggccggaagctgagcatcatgttctcagctgtgccgtcggcggccggctatgcgctcatggcgggtgcgcacggcctctggatgctgctgctcggaaggacgctgacgggcttcgccggggggctcacagctgcctgcatcccggtgtacgtgtctgagattgctcccccaggcgttcgtggggctctgggggccacaccccagctcatggcagtgttcggatccctgtccctctacgcccttggcctcctgctgccgtggcgctggctggctgtggccggggaggcgcctgtgctcatcatgatcctgctgctcagcttcatgcccaactcgccgcgcttcctgctctctcggggcagggacgaagaggccctgcgggcgctggcctggctgcgtgggacggacgtcgatgtccactgggagttcgagcagatccaggacaacgtccggagacagagcagccgagtatcgtgggctgaggcacgggccccccacgtgtgccggcccatcaccgtggccttgctgatgcgcctcctgcagcagctgacgggcatcacgcccatcctggtctacctgcagtccatcttcgacagcaccgctgtcctgctgccccccaaggacgacgcagccatcgttggggccgtgcggctcctgtccgtgctgatcgccgccctcaccatggacctcgcaggccgcaaggtgctgctcttcgtctcagcggccatcatgtttgctgccaacctgactctggggctgtacatccactttggccccaggcctctgagccccaacagcactgcgggcctggaaagcgagtcctggggggacttggcgcagcccctggcagcacccgctggctacctcaccctggtgcccctgctggccaccatgctcttcatcatgggctacgccgtgggctggggtcccatcacctggctgctcatgtctgaggtcctgcccctgcgtgcccgtggcgtggcctcagggctctgcgtgctggccagctggctcaccgccttcgtcctcaccaagtccttcctgccagtggtgagcaccttcggcctccaggtgcctttcttcttcttcgcggccatctgcttggtgagcctggtgttcacaggctgctgtgtgcccgagaccaagggacggtccctggagcagatcgagtccttcttccgcacggggagaaggtccttcttgcgctaggtcaaggtccccgcctggagggggccaaacccccagtggctgggcctctgtgttggctacaaacctgcaccctgggaccaagaggcagcagtcatccctgccaccagccagagcacaggaagagcagtgtgatggggcctcagcagcgggtgcccctggctcgggacaggtagcactgctgtccagccacagccccagcccaggcagcccacagtgctgcacgtagccatgggccgcaggagtgcatacaaccctgcatccagggacacggccctgctgggtgacctcaggcctagtccctttcccttgcgtgaaggacacgccccacagaaggctacggggaggactgagaggacagggctggaggcagccaagtaacgtagtcatatcatcgcgctctgatctggtggcatctggctgtgcaaggaagacccggctttgccctcacaagtcttatgggcaccacagggaacatcctggacttaaaaagccagggcaggccgggcacagtggctcacgcctgtaatcccagcactttgggaggccaaagcaggtggattacccaaggccaggagttcaagaccagcctggccaacatggtgaaaccccgtctctactaaaaaatacaaaaaagctgggtgtggtggcacacacccgtagttccagctacttgggaggctgaggcagcattgcttgaacccgggaggtggaggctgcaatgagctgagatcatgccattgcactccagcctgggcaacgagagtgaaactccgtccccaccccctgccaaaaaaaaaaaaaaaaaagccagggcaaaggacctggcgtggccacttcctcctgccccagcccaacctctgggaacaggcagctcctatctgcaaactgtgttcacccttttgtaaaaataaaggaactggacccgtagtccta

SEQ ID NO: 388657 - DNA, 259 bp, Homo sapiens
gcggccgcctactactactactgctcgaattcaagcttctaacgatgtacggggatcatgccattgcactccagcctgggcaacgagagtgaaactccgtccccaccccctgccaaaaaaaaaaaaaaaaaagccagggcaaaggacctggcgtggccacttcctcctgccccagcccaacctctgggaacaggcagctcctatctgcaaactgtgttcacccttttgtaaaaataaaggaactggacccgtagtccta

SEQ ID NO: 388658 - DNA, 2294 bp, Homo sapiens
ccctcggagctgctggccccgggcggctgctccagtctgagcgccctccgctcgccccgagagagacccggccatgcaggagccgctgctgggagccgagggcccggactacgacaccttccccgagaagccgcccccgtcgccaggggacagggcgcgggtcggtccgtgttcaccctgggagcagcggccggaggcctgagtgccatgatcctcaacgacctcctgggccggaagctgagcatcatgttctcagctgtgccgtcggcggccggctatgcgctcatggcgggtgcgcacggcctctggatgctgctgctcggaaggacgctgacgggcttcgccggggggctcacagctgcctgcatcccggtgtacgtgtctgagattgctcccccaggcgttcgtggggctctgggggccacaccccagctcatggcagtgttcggatccctgtccctctacgcccttgcttcatgcccaactcgccgcgcttcctgctctctcggggcagggacgaagaggccctgcgggcgctggcctggctgcgtgggacggacgtcgatgtccactgggagttcgagcagatccaggacaacgtccggagacagagcagccgagtatcgtgggctgaggcacgggccccccacgtgtgccggcccatcaccgtggccttgctgatgcgcctcctgcagcagctgacgggcatcacgcccatcctggtctacctgcagtccatcttcgacagcaccgctgtcctgctgccccccaaggacgacgcagccatcgttggggccgtgcggctcctgtccgtgctgatcgccgccctcaccatggacctcgcaggccgcaaggtgctgctcttcgtctcagcggccatcatgtttgctgccaacctgactctggggctgtacatccactttggccccaggcctctgagccccaacagcactgcgggcctggaaagcgagtcctggggggacttggcgcagcccctggcagcacccgctggctacctcaccctggtgcccctgctggccaccatgctcttcatcatgggctacgccgtgggctggggtcccatcacctggctgctcatgtctgaggtcctgcccctgcgtgcccgtggcgtggcctcagggctctgcgtgctggccagctggctcaccgccttcgtcctcaccaagtccttcctgccagtggtgagcaccttcggcctccaggtgcctttcttcttcttcgcggccatctgcttggtgagcctggtgttcacaggctgctgtgtgcccgagaccaagggacggtccctggagcagatcgagtccttcttccgcacggggagaaggtccttcttgcgctaggtcaaggtccccgcctggagggggccaaacccccagtggctgggcctctgtgttggctacaaacctgcaccctgggaccaagaggcagcagtcatccctgccaccagccagagcacaggaagagcagtgtgatggggcctcagcagcgggtgcccctggctcgggacaggtagcactgctgtccagccacagccccagcccaggcagcccacagtgctgcacgtagccatgggccgcaggagtgcatacaaccctgcatccagggacacggccctgctgggtgacctcaggcctagtccctttcccttgcgtgaaggacacgccccacagaaggctacggggaggactgagaggacagggctggaggcagccaagtaacgtagtcatatcatcgcgctctgatctggtggcatctggctgtgcaaggaagacccggctttgccctcacaagtcttatgggcaccacagggaacatcctggacttaaaaagccagggcaggccgggcacagtggctcacgcctgtaatcccagcactttgggaggccaaagcaggtggattacccaaggccaggagttcaagaccagcctggccaacatggtgaaaccccgtctctactaaaaaatacaaaaaagctgggtgtggtggcacacacccgtagttccagctacttgggaggctgaggcagcattgcttgaacccgggaggtggaggctgcaatgagctgagatcatgccattgcactccagcctgggcaacgagagtgaaactccgtccccaccccctgccaaaaaaaaaaaaaaaaaagccagggcaaaggacctggcgtggccacttcctcctgccccagcccaacctctgggaacaggcagctcctatctgcaaactgtgttcacccttttgtaaaaataaaggaactggacccgtagtccta

SEQ ID NO: 388659 - DNA, 1293 bp, Homo sapiens
ggtgaaaccccgtctctactaaaaaatacaaaaaagctgggtgtggtggcacacacccgtagttccagctacttgggaggctgaggcagcattgcttgaacccgggaggtggaggctgcaatgagctgagatcatgccattgcactccagcctgggcaacgagagtgaaactccgtcctcaccaagtccttcctgccagtggtgagcaccttcggcctccaggtgcctttcttcttcttcgcggccatctgcttggtgagcctggtgttcacaggctgctgtgtgcccgagaccaagggacggtccctggagcagatcgagtccttcttccgcacggggagaaggtccttcttgcgctaggtcaaggtccccgcctggagggggccaaacccccagtggctgggcctctgtgttggctacaaacctgcaccctgggaccaagaggcagcagtcatccctgccaccagccagagcacaggaagagcagtgtgatggggcctcagcagcgggtgcccctggctcgggacaggtagcactgctgtccagccacagccccagcccaggcagcccacagtgctgcacgtagccatgggccgcaggagtgcatacaaccctgcatccagggacacggccctgctgggtgacctcaggcctagtccctttcccttgcgtgaaggacacgccccacagaaggctacggggaggactgagaggacagggctggaggcagccaagtaacgtagtcatatcatcgcgctctgatctggtggcatctggctgtgcaaggaagacccggctttgccctcacaagtcttatgggcaccacagggaacatcctggacttaaaaagccagggcaggccgggcacagtggctcacgcctgtaatcccagcactttgggaggccaaagcaggtggattacccaaggccaggagttcaagaccagcctggccaacatggtgaaaccccgtctctactaaaaaatacaaaaaagctgggtgtggtggcacacacccgtagttccagctacttgggaggctgaggcagcattgcttgaacccgggaggtggaggctgcaatgagctgagatcatgccattgcactccagcctgggcaacgagagtgaaactccgtccccaccccctgccaaaaaaaaaaaaaaaaaagccagggcaaaggacctggcgtggccacttcctcctgccccagcccaacctctgggaacaggcagctcctatctgcaaactgtgttcacccttttgtaaaaataaaggaactggacccgtagtccta

SEQ ID NO: 388660 - DNA, 697 bp, Homo sapiens
gcctcgtgcccagaaggctacggaaagggactaggcctgaggtcacccagcagggccgtgtccctttcccttgcgtgaaggacacgccccacagaaggctacggggaggactgagaggacagggctggaggcagccaagtaacgtagtcatatcatcgcgctctgatctggtggcatctggctgtgcaaggaagacccggctttgccctcacaagtcttatgggcaccacagggaacatcctggacttaaaaagccagggcaggccgggcacagtggctcacgcctgtaatcccagcactttgggaggccaaagcaggtggattacccaaggccaggagttcaagaccagcctggccaacatggtgaaaccccgtctctactaaaaaatacaaaaaagctgggtgtggtggcacacacccgtagttccagctacttgggaggctgaggcagcattgcttgaacccgggaggtggaggctgcaatgagctgagatcatgccattgcactccagcctgggcaacgagagtgaaactccgtccccaccccctgccaaaaaaaaaaaaaaaaaagccagggcaaaggacctggcgtggccacttcctcctgccccagcccaacctctgggaacaggcagctcctatctgcaaactgtgttcacccttttgtaaaaataaaggaactggacccgtagtccta

SEQ ID NO: 388661 - DNA, 469 bp, Homo sapiens
aaggtcttcacactgggttcgagttctgcataatcactcccagattctgtccgggctcttcactgtgacagctcatgcttactgagtgctcaccttggaacacgggctataccgggtactttacatataattcccacaaaaatcctagcaggtaaatgttgtcatctccatttcacacttggtcaatggcggctcacataggtttaggctgtacagctagagaatgttagagccacaattcaaacccaggtctgtgacttctgcatcagctcaacctcaataccacaagccccagccaccctgggatgcctgcgacccttgactaaatcacgcatgcccacacgctctgtcctctgtgggaaaggctcttttgctggtcttgttcacctgcaaagctcttactcatcctgcaggctcagtgctggtatcacctcctcatcacaagctaaaagttgagtggagcaataac

SEQ ID NO: 388662 - DNA, 410 bp, Homo sapiens
tgcggtgctctagagaatcccctcgcgaacgtgttatcctcagccagagggagtggctgtggagttctccaaccctagttgtagccacagcacaagcctagggagtagactgctgtccttctccaaaaccataaaggccttacttctatttaagatcctaaccctaatctgcaggttaagatggctaaaaaatttaatacaaatttgagatttttgccttcaaagggtcagggaagaactctagtttagttccgaactaaagctgtagagaatcactaaccttttacccaaagataaaaatgtaggtaagaactggcattcttattgtgttttgcagccaacaaacattatccactatgattctcaaaaatcatagtggataacacgttcgcgagggggtcctctagagt

SEQ ID NO: 388663 - DNA, 708 bp, Homo sapiens
cccgggcaacaagttctcaaaaagattccagcagctaatgaagctctttaaaaagtcaaaatgcagataagttgctgaattcctgggactcttaactgatattgcatactacacagaagcttcaaattcctcatgttttaaatgagcactagagggaggtttatcacctttttggttaccagatgataatctatatttgttattactcagtgactctctaatttcacatcagcatcgttcagcttgtgctagtcatcattctgatttgcttatctgtttttggtcaaaatatttatttttaaacatgttagaacttaccaaaatgaaagcaacagtgatgtattgaaatcttagttttgatattttaaagaaatgactttctagattaaaaaaatagttttgtagcattttaaacttagtgactatttagttcaattgttcatccattttttatttgcttttataattgcctccttgttttggtatattgtaaaataatttaaataatgtatttataaatatgtataattatgatgtaaaataccgtgtgtatatgtatgtatgtgtgtttctgtatatgcacacacataaacggctttgcctagccaaggattttttttatctgtataaaactttttgtataaagtttgctttcaataacagtaatgtataataaaaccatgtaaagttttgttgtaaaaaaaaaaa

SEQ ID NO: 388664 - DNA, 703 bp, Homo sapiens
tgaaaatcccagcagctatgtatgggatggttacaccagacactgtgctaaggattttctttgaattgtttctcactcaatcttcacggtagctcagtgaggtaggtaccattatcactgctagaaagcagtgaacttatatggtcttactgtggcactgggtccttaaacattatgcaaaactgtgagcaacttttatcggtttgttcttttaagaacataacacagcactctaaaaatagatctaactagattgttcacatctagcgattaaggccaccctgagattatagctgcatcatcaggaacccaagatctgaagcattcagtcaaagcctcttggccacctctctttttgtcatggccttcttggacttggagggggagaatggaagcaagtaccaaggagaaagtgttctcagaaaagccacacccattagaaaaatacaaggcctgaaaggtgtgagtggggacttgacacggaagagcatttcaagcttaagaaaaaaaaaaaaaagaagaatgtgggaggatgtcagcaacaatgcttgagattccctggtcccccaaagagtctctcctccataaaactaatgagaatgtgacaaaaatagattcaacttcttatagctctggaaattaactgaagatgtatagcaatttgcagagcatttattcaagaaaaagactaaatctctgtgag

SEQ ID NO: 388665 - DNA, 1058 bp, Homo sapiens
ccagtctgtcccccgcgtatggatatgtcatccacgcctcgggggccgccagcccctccgccgcgcggagcccacgaaggggacagcgcagccggcccagagctcgggtctccggggaccgagccttatgatctcctcattgcgtccccctctgcccactggacttggacttcagatctgaccccagacctgccggctacctcgggagggcccacctccccgcccatccagcaagatgccaatcctcaagcaactggtgtccagctcggtgcactccaagcgccgttcccgagcggacctcacggccgagatgatcagcgccccgctgggcgacttccgccacaccatgcacgttggccgggccggagacgcctttggggacacctccttcctcaatagcaaggctggcgagcccgacggcgagtccttggacgaacagccctcttcttcatcttccaaacgcagtctcctgtccaggaagttccggggcagcaagcggtcacagtcggtgaccaggggggagcgggagcagcgtgacatgctgggctccctgcgggactcggccctgtttgtcaagaatgccatgtccctgccccagctcaatgagaaggaggccgcggagaagggcaccagtaagctgcccaagagcctgtcatccagccccgtgaagaaggccaatgacggggagggcggcgatgaggaggcgggcacggaggaggcagtgccccgtcggaatggggccgcgggtccacattcccctgaccccctcctcgatgagcaggccttgggggatctgacagatctgcctgtcgtgcccaaggccacgtacgggctgaagcatgcgggagtccatcatgtccttccacatcgactggggcctcacatgctgggttgacgtcctcagatctttgggcaaggacggcgtggaccccgagagcggggcgcgtgggtacccctggccatgtatgggccccctgtgccactcaacgcagggtccccctaagcgcggggggcccccccctggaggaggaagcaggttggcccgcattggcgtgctc

SEQ ID NO: 388666 - DNA, 1071 bp, Homo sapiens
ctcccagcccctgaaagcccgagagccagagggaaacaaacgccggcgctgacaggggccgccagcccctccgccgcgcggagcccacgaaggggacagcgcagccggcccagagctcgggtctccggggaccgagccttatgatctcctcattgcgtccccctctgcccactggacttggacttcagatctgaccccagacctgccggctacctcgggagggcccacctccccgcccatccagcaagatgccaatcctcaagcaactggtgtccagctcggtgcactccaagcgccgttcccgagcggacctcacggccgagatgatcagcgccccgctgggcgacttccgccacaccatgcacgttggccgggccggagacgcctttggggacacctccttcctcaatagcaaggctggcgagcccgacggcgagtccttggacgaacagccctcttcttcatcttccaaacgcagtctcctgtccaggaagttccggggcagcaagcggtcacagtcggtgaccaggggggagcgggagcagcgtgacatgctgggctccctgcgggactcggccctgtttgtcaagaatgccatgtccctgccccagctcaatgagaaggaggccgcggagaagggcaccagtaagctgcccaagagcctgtcatccagccccgtgaagaaggccaatgacggggagggcggcgatgaggaggcgggcacggaggaggcagtgccccgtcggaatggggccgcgggtccacattcccctgaccccctcctcgatgagcaggccttgggggatctgacagatctgcctgtcgtgcccaaggccacgtacgggctgaagcatgcgggagtccatcatgtccttccacatcgactggggcctcacatgctgggttgacgtcctcagatctttgggcaaggacggcgtggaccccgagagcggggcgcgtgggtacccctggccatgtatgggccccctgtgccactcaacgcagggtccccctaagcgcggggggcccccccctggaggaggaagcaggttggcccgcattggcgtgctc

SEQ ID NO: 388667 - DNA, 569 bp, Homo sapiens
agttagagttctgatactcatactagctctgtgaccataggcaagtcagtctccactctctggccttcgtttctgtttataaaaagaaagggaaagaaccaatgatttctaagtcttctcctggatctacatttccaggattctttattgcagtgtcaacaaaggcacctactctggggcagagactgtattggggctttacacatactgcatctattttatcctcacatctcctcaggttagattttaatatttccaacagttctatgtttcctacaaggaaaatgcaaggtgttggtgggccggggcggggtgtaatctttctgaagttgtgtagatataaaagtcatcaatggatttaaacccaggcggcctgattctcacatctcccctggcctcaaaattatttccatattcatatgaaaaaccccagccagtcacaagagcccatacagtgtccagtgtctgtcactagcagaaggaatgaaagggaatttatctgcagaatgaggaattacaactggagtaaaaagagaatggtctgaaggtttctaggcagcagagtcaaa

SEQ ID NO: 388668 - DNA, 207 bp, Homo sapiens
tctgaagaatcactgcctgcctgatcttaaaataacatttttatcttagtcagaattgataatttataataggtccttgttgtctagtggctcaagcacttgtctcagcctggccttttgagcaatctgtagtctagatctggtgtcaccttgcctttccaaatttatcttccagtggctgctccccacaagctggttttcttcgtg

SEQ ID NO: 388669 - DNA, 412 bp, Homo sapiens
taggatccctctggctgttgtgctgagaacagaaggggtcaagggagtgggggagtaaaaatggaagcagggtgacgcatgcaggagtccagacaaaagacgggtgattttgctcaggttggtagcaacagaggtaatgagaagtagttggattttggatatattttgaaggaaggacctaaaagatttgctgatggcttagaagttaggtatgagttaagtcaaaaatgataccacagtttttggcctgaacaactggaaggacagaattaccattaactgatatggggaagaccgtggaaagaacagttttcgggcattaggaaaaataataacacatttgtatgcttttgagaatggttcagtggagagtagaaatactgacgagggagagaattattggagtcatagc

SEQ ID NO: 388670 - DNA, 307 bp, Homo sapiens
gcatggctgggtatcaaaacaaaaacactgagacactctacacaacaaaatgcaaagcgacatctggtatgttcccatctctccagggtcctcatgatgctgagcttttgagcattctaaaggtacacttggggaacttgcgtctgcaagaccgacttcttttcgcaggggtcagcacatccggagtgcaatggataagcctcgccctgggaaaaccaccttcgtgatcatggtatctcccctgcgatttccccaaatgtgggaaactcgactgcataatttgtggtagtaggggaaagcgtcgacg

SEQ ID NO: 388671 - DNA, 178 bp, Homo sapiens
ccatcttgacctcccaaagtgctgggattacagacatgagccactgtgcccagccagggctgtgtgttatgtagtgacagctcactgatacagctctctctggggacttaggaaccaagtttgaccccacatctgactcatccaagttttatccatcccacctcccatatctctccag

SEQ ID NO: 388672 - DNA, 455 bp, Homo sapiens
tgttttcctacaggaatgattacttttcagatccatttatgttttcatgctcaatacttactccccttccctgcaacacccaaagagtttacttttgcaagtcatttggtcttcagtctactactgaggaatagagaggcactaactgctttacccaggatcagaactcatgttcttaccttctattaatagagtacttgagcccgatggactaactggtctcacattttctctatcttggttttacttccataaacatcaatatctttacccacatgatttttccatcctcccatttttttccatatgtattagggttcaggaactatgatgctaatgatcacatttcttcctagttcctaatttcattagtgccatttcctgatatctacagaaacaattatcaatacatgtagctgcttgagccttatttagaaggctagcctttcttttcc

SEQ ID NO: 388673 - DNA, 393 bp, Homo sapiens
gaagtctgacaagggtaaaaccaggcagagcgagcaccaagcacaagaaagctgtaaagacccacaaggcaaacatttagaaaacccactcgcccgtggcttcctttatcccagagtgtcattagtgtctgtggtcagctacttgtactacctctgaattagctaccatttactaagtgcttagtacatgccaggcactgtgctaaacatttcatatgcattgcctcatttactctataaaataacagtgagttgaatattatttctgtcattttacagatgaagaaactggggtacagaaagatgagtaacttgctaaaagtcacaaagatagttaagtgttagatcaggatttatgctgggattttaggcagtgtgcaaaaagtttttttt

SEQ ID NO: 388674 - DNA, 253 bp, Homo sapiens
acaaaacacaacgaatggtcggatgtggctgtccttggtcatgatctctttcattcttgaatacctactcatcacttacagttctgcctcagtttactgtgcagaagccacctgtcatgtaacatccaaatctggtcatttaggacttaacttccctccatctcttcatactgagatgtagtgatgggagatttccatttcttctttcaaatgttgtttatacacacatttcaggcataaactttgtgggaaa

SEQ ID NO: 388675 - DNA, 396 bp, Homo sapiens
cagaaatcccgatcgttacaagccataggcatccatattaatagcacgaatgctataattagtcatttagggaaaaataaaataaatctgctccaagacagtctccctgaattttgtaagagttagaaggatggttttaagattgctgatcctgccatgctgacttgctttcccaagaatgcctttgaccttagccagcactagtaaagaactcagcaatgcctgtgaggagggccaattccatgtccccagaggacaatgaggtcccctcaacaatactcactaacatatgtgagcatcccacaacactgcaaaggctgaatgactcccacctgagatctgtcccttctaaactacctctgaccgctcagaggccctgcaggccaaactacctct

SEQ ID NO: 388676 - DNA, 425 bp, Homo sapiens
aaattagctgggcgtggtggcgcatgcctgtggtcccggctactcaggaggctgaggcaggagaatagcttgaacctgggaggtggagcttgcagtgagccaccgagattgtgtcattgcactccagcctgggcaacaagagcaaatctccatctcaaagaaaagacaagacaagacacctttgaggtcctcttctggtcctctgcaccagaaagcttgggagagtggggacatatttttcccccattgctgcattcctagtaactagatgtgtgctgcaaaaaaaaaaaaaatagtttaaggaatgaattggtagctattgttatatgtaaatgtgaaattaatatctacaaatacatatctgtatttataaattgtacttacgtagagaaacaaaaaaataaaaataattgtaattacatact

SEQ ID NO: 388677 - DNA, 373 bp, Homo sapiens
ccacgcccggccttaaatttttatttatattttgagggggtctcattgtgttgcccagactggagtgcaatggcacgatcatggctcactcaaatctccatctcaaagaaaagacaagacaagacacctttgaggtcctcttctggtcctctgcaccagaaagcttgggagagtggggacatatttttcccccattgctgcattcctagtaactagatgtgtgctgcaaaaaaaaaaaaaatagtttaaggaatgaattggtagctattgttatatgtaaatgtgaaattaatatctacaaatacatatctgtatttataaattgtacttacgtagagaaacaaaaaaataaaaataattgtaattacatact

SEQ ID NO: 388678 - DNA, 453 bp, Homo sapiens
ccacgcccggccttaaatttttatttatattttgagggggtctcattgtgttgcccagactggagtgcaatggcacgatcatggctcactgcaatctccacctcctaagcttgattctcctgcctctgcctcctgagtagctggaaccacaggtctgcaccaccataccaggctaattttttgtatttttggtagagaaggggtttcaccatagtgctcaggctggtctctaacttgtgagctcaagtgatccgcccacctcggcctcccaaagtgctgagattacaggtgtgacccatggcacctagccgagtttaactcttaaataaataaactgtgccaggcatggtggcttgcacctgtaatcccagcaattcaggacatggaggtgggagaattgcttgaacctaggagtttgagaccagcatggacaacatagtgagaccttgtctc

SEQ ID NO: 388679 - DNA, 837 bp, Homo sapiens
gagagaaggacggagtcgagtggcaccctagaagacgctctgtgccttcggaggtctttctgcctgcctgtcctcatgcctctcctcctcttgctgctcctgctgccaagccccttacacccccaccccatctgtgaggtctccaaagtggccagccacctagaagtgaactgtgacaagaggaatctgacagcgctgcctccagacctgccgaaagacacaaccatcctccacctgagtgagaacctcctgtacaccttctccctggcaaccctgatgccttacactcgcctcactcagctgaacctagataggtgcgagctcaccaagctccaggtcgatgggacgctgccagtgctggggaccctggatctatcccacaatcagctgcaaagcctgcccttgctagggcagacactgcctgctctcaccgtcctggacgtctccttcaaccggctgacctcgctgcctcttggtgccctgcgtggtcttggcgaactccaagagctctacctgaaaggcaatgagctgaagaccctgcccccagggctcctgacgcccacacccaagctggagaagctcagtctggctaacaacaacttgactgagctccccgctgggctcctgaatgggctggagaatctcgacacccttctcctccaagagaactcgctgtatacaataccaaagggcttttttgggtcccacctcctgccttttgcttttctccacgggaacccctggttatgcaactgtgagatcctctattttcgtcgctggctgcaggacaatgctgaaaatgtctacgtatggaagcaaggtgtggacgtcaaggcc

SEQ ID NO: 388680 - DNA, 1581 bp, Homo sapiens
ggctgccggggccgccactgcagctgctgctgcctgctggttgccgcgtcttcccggaggcgactgctggaagctgcagggaatttttgcggtgctctgccatattgtgtcttccccggccggtccctcgcctcccggccgagctgacgaactgtaagagtaaatgggtccagtaattggaatgactccagataagagagctgaaaccccaggagctgaaaagattgcaggattaagccagatttacaaaatgggaagcttgcctgaagctgttgatgctgccaggccgaaggccactctagtggacagtgagtcagcagatgatgaactcacaaacttgaactggcttcatgaaagcactaatcttctaacaaacttcagcctcggaagtgagggtcttccaattgttagtccattgtatgacatagagggagatgatgtgccatcctttggaccagcttgctaccagaacccagaaaaaaaatcagcgacttcaaagcccccatactcctttagtcttctcatttatatggccattgagcactctccaaataaatgtttgcctgtcaaagaaatttatagctggattctggaccattttccatattttgctactgcaccaacaggctggaagaattctgttcgacataatctgtccctgaataaatgttttcagaaagtggaaagaagccatggcaaggttaatggaaaaggttccttatggtgtgttgatccggaatataaacccaatcttatccaggcactgaagaagcaacctttttcttcagcatcttcacaaaatggttctttatcacctcactatttaagctctgtaatcaagcagaaccaggtgcgaaacctcaaagaatctgatattgatgctgctgctgcaatgatgcttttaaatacttctatagaacaaggaattttagaatgtgagaagcctcttcctcttaaaacagcattgcaaaaaaagaggagttacggcaatgcatttcatcatcccagtgctgtacgattacaagagagtgattctttagccaccagcattgatccaaaagaagatcacaattacagtgcaagtagcatggcagcacagcgttgtgcatccaggtctagcgtgtcttccctgtcttctgtggatgaggtatatgaatttatcccaaagaatagtcacgtgggaagtgatggcagtgaaggatttcacagtgaagaagatacagacgttgattatgaagatgatcctcttggagacagtggctatgcatcacagccttgtgcaaaaatctctgaaaaagggcagtcaggcaaaaagatgcgaaaacagacatgtcaagaaattgatgaggagctcaaagaggcagctggatctctgctccaccttgctggaattcgtacatgtttaggttccctaataagtactgcaaagacacaaaatcaaaagcaacggaaaaaatagaaatacttaaagtgtggcaatactctttcacttaattctttacaagggatatcaaagccataatggacttcattagttttagggtagggaagggatactaattacttatttctttcaaaaca

SEQ ID NO: 388681 - DNA, 638 bp, Homo sapiens
gaggtctgaggggctgtcccagacaaggcggagataaaatgagcctcagggagctggcatcccagaccagggggctgtgcacacttgccctgtcaagctgccgagtttctggctgagtgaagctattgtctcccctccccaggcccacctgcccttctctggatagattcctgtgctaagaccagcagagtaggggtctccatggaagaggaagagacagtgtccaaggggtgccaggcttccatagtgatgggggcgggccaaggtgcagtggtcttagctggactccatcattggaggacactttgcccacagcccaggagctacaggtcctgagtcagggactggcactgggaaagggagcagaggcttatggcatccattgaaaattctgaagccatgctcccatgaaaggctggggagtccatttgcctcccatgggctcccccacctcccgctccaccccagcccatgtgtgaggagcggaggtagctttgctcagagtgcaaacccgtgaccccttctgctccagccccactccccgctgggcagccagccctctgtgcccctctccaagctccacccaggtcccagctctcctggcaaggcaaagggaaggaagggaggactccccctgt

SEQ ID NO: 388682 - DNA, 416 bp, Homo sapiens
atcctagattcccttatcctttttcttggatcagatctcctgtttcctgagttcacatattcctcattttgtggtttaccccctcagtttgatggtgtacttcctttagtattttcctgagagaatgtatgaagaagtgagaattttttagatttgtaacccttaaatgccttcaatcttgtctctcatttttgacattatgggcatgtaattcaagaatagaaattctaggccgggcgcagtggctcacacctgtaatctaagcactttaagaggccgaggcgggtggatcacttgaggtcaggagttcgagactagcctgaccaacatggtggaatcccgtctctactagaaatacaaaaattagctaggcgtggtagcaggcgcctgtaatctcagctacttgggaggctgag

SEQ ID NO: 388683 - DNA, 531 bp, Homo sapiens
gcgtccctactactactaaattcgcggccgctcgaccaagagaatagtgacaagtggggagaaagccactttgtttctcatttcttttttcttcttctttaactcccctgtaataggaaataaagtatttttgtgatgaggaaatccctaaacaaaattagttgccataaaatatgacaactgctttatggtttcttttggaagagacagattgaaaaatcatgaatggaatctaaacagaaatgtcagatgaacgtatttcctgttttcatagactattcaaatgttttgaccatgaagttgtattatacatattttaaattgtttatagtaagttgatatttttttaatttttaaatttaatatagcaaacttaaaatgaatttaaacttaagcaagcaagcgtgtattttccttgtctgctgctatttgaagtaattagtacagctgcagatctctctgtgtatatctatctatatatatattttttattacttgggagaatgaattttaaaatgtcagtgctagtgt

SEQ ID NO: 388684 - DNA, 339 bp, Homo sapiens
gcgtccctactactactaaattcgcggccgctcgacctgggaagagaaaacattgatatagatgcttttgataaagagtacaagatggcatacgatcgtctcacacctagtcaagtcaagagtacacacaactgtgatagaccaccaagtacaggggtgatggaatgtcgaaaaacctttggagaaccttatctttaagatgtatttgtatgtgtaaacattcaatgtatattgtatagtcagtgtataaaataacacttttagactctaaatattttttttttaaccatttacaaattgtattttcaaaaattgaagaaagtcgacgcggccgcgaat

SEQ ID NO: 388685 - DNA, 1111 bp, Homo sapiens
ggagtgacaacaacggctaggtgcgaggctgggtggcgggtatttcagacgtcttgacttgcccagtaacttacctggattgattctttcttctgagcactgtaacaagtattcaaagattccccgccactgtatgtctgaagatagcaaatatgttttaatacaaatgttatgggacaatatgaagttacatcaggatccgggacagcccttgtacattctctggaatgcacacacccaaaaatatccaatggtccatttattgcaaaaaagtgataactcatttaaccaggaactgttgaaaagtatggtaaaaagcattaaaatgaatgatgtctatggaccaatgagtcagattttagagacactgaataagtgtccacattttaaaagacagaggagtttatacagagaaatactatttctctcacttgtggcactgggaagagaaaacattgatatagatgcttttgataaagagtacaagatggcatacgatcgtctcacacctagtcaagtcaagagtacacacaactgtgatagaccaccaagtacaggggtgatggaatgtcgaaaaacctttggagaaccttatctttaagatgtatttgtatgtgtaaacattcaatgtatattgtatagtcagtgtataaaataacacttttagactctaaatattttttcttcaatttttgaaaatacaatttgtaaatggttcaaaagactcagacagcttatgtacagaatgtttgaagaagagaatagtgacaagtggggagaaagccactttgtttctcatttcttttttcttcttctttaactcccctgtaataggaaataaagtatttttgtgatgaggaaatccctaaacaaaattagttgccataaaatatgacaactgctttatggtttcttttggaagagacagattgaaaaatcatgaatggaatctaaacagaaatgtcagatgaacgtatttcctgttttcatagactattcaaatgttttgaccatgaagttgtattatacatattttaaattgtttatagtaagttgatatttttttaatttttaaatttaatatagcaaacttaaaatgaatttaaactta

SEQ ID NO: 388686 - DNA, 868 bp, Homo sapiens
ggagtgacaacaacggctaggtgcgaggctgggtggcgggtatttcagacgtcttgacttgcccagtaacttacctggattgattctttcttctgagcactgtaacaagtattcaaagattccccgccactgtatgtctgaagatagcaaatatgttttaatacaaatgttatgggacaatatgaagttacatcaggatccgggacagcccttgtacattctctggaatgcacacacccaaaaatatccaatggtccatttattgcaaaaaagtgataactcatttaaccaggaactgttgaaaagtatggtaaaaagcattaaaatgaatgatgtctatggaccaatgagtcagattttagagacactgaataagtgtccacattttaaaagacagaggagtttatacagagaaatactatttctctcacttgtggcactgggaagagaaaacattgatatagatgcttttgataaagagtacaagatggcatacgatcgtctcacacctagtcaagtcaagagtacacacaactgtgatagaccaccaagtacaggggtgatggaatgtcgaaaaacctttggagaaccttatctttaagatgtatttgtatgtgtaaacattcaatgtatattgtatagtcagtgtataaaataacacttttagactctaaatattttttcttcaatttttgaaaatacaatttgtaaatggttcaaaagactcagacagcttatgtacagaatgtttgaagaagagaatagtgacaagtggggagaaagccactttgtttctcatttcttttttcttcttctttaactcccctgtaataggaaataaagtatttttgtgatgaggaaatcccta

SEQ ID NO: 388687 - DNA, 1249 bp, Homo sapiens
ggagtgacaacaacggctaggtgcgaggctgggtggcgggtatttcagacgtcttgacttgcccagtaacttacctggattgattctttcttctgagcactgtaacaagtattcaaagattccccgccactgtatgtctgaagatagcaaatatgttttaatacaaatgttatgggacaatatgaagttacatcaggatccgggacagcccttgtacattctctggaatgcacacacccaaaaatatccaatggtccatttattgcaaaaaagtgataactcatttaaccaggaactgttgaaaagtatggtaaaaagcattaaaatgaatgatgtctatggaccaatgagtcagattttagagacactgaataagtgtccacattttaaaagacagaggagtttatacagagaaatactatttctctcacttgtggcactgggaagagaaaacattgatatagatgcttttgataaagagtacaagatggcatacgatcgtctcacacctagtcaagtcaagagtacacacaactgtgatagaccaccaagtacaggggtgatggaatgtcgaaaaacctttggagaaccttatctttaagatgtatttgtatgtgtaaacattcaatgtatattgtatagtcagtgtataaaataacacttttagactctaaatattttttcttcaatttttgaaaatacaatttgtaaatggttcaaaagactcagacagcttatgtacagaatgtttgaagaagagaatagtgacaagtggggagaaagccactttgtttctcatttcttttttcttcttctttaactcccctgtaataggaaataaagtatttttgtgatgaggaaatccctaaacaaaattagttgccataaaatatgacaactgctttatggtttcttttggaagagacagattgaaaaatcatgaatggaatctaaacagaaatgtcagatgaacgtatttcctgttttcatagactattcaaatgttttgaccatgaagttgtattatacatattttaaattgtttatagtaagttgatatttttttaatttttaaatttaatatagcaaacttaaaatgaatttaaacttaagcaagcaagcgtgtattttccttgtctgctgctatttgaagtaattagtacagctgcagatctctctgtgtatatctatctatatatatattttttattacttgggagaatgaattttaaaatgtcagtgctagtgt

SEQ ID NO: 388688 - DNA, 393 bp, Homo sapiens
cactctgattctgggaccagtacttctggattccagtttttcctctcattccccaagagacagagtaaccagttgtaataattaatgatgctggaagtaccagcttgcaagactctttcagtaacctctggaagccacctgtttatacctctctgattattactatattgttaaaagcctggatggacacggagtcagtgaatgagttttcagtgtccaagtgtagatctgggacttgaagacagaatttacaaattatggtatctgtggcaagatagcggttgggatagacttgggagaagaaattctttaaaggaaaaattgaatttgttgcaaaagaagtttgtcactgaaacacgttttaattgctcatcgtaaatcagagtgtaaaag

SEQ ID NO: 388689 - DNA, 951 bp, Homo sapiens
caaacaactataattacaccctactactgaagtctagcagaaagcctctctctcactgtctcttactttctcgctcgctctctctctctatatataaatacatatgcctatatatgtacattttttaaatgaagaatgagttctcttaatcagttcccttaattcagggaagtcatgaaaaacaaatatagaaaagttactataattttagatcagtattttttatttatccagcatacaataaagctattatcccataacataattcgttaatgacttgaatattttactgggaaagaatgttacctggagaactacttggtacaaaaatatttgccttctgtttttttatttgttcttgatcatcttcatagtcagcagcttttactttgagtatatctgtcaaaatgaattctttcataaactcttcctcttcactctcagcaacattttgtaaattaacaccaagtgaaaagcatttgggataactacggtttactggtctctgttgaataccaaaaaggaaaataagtttacatgcttgtctccaatgattaatatgcaaataaatgaaatgtactggaaccttactgtgaactgtgcgtctgatcctgccacccacagaacaagttccagttgaacttgtgttacaatgaaatttcactgaatttagaactcatttaaggtttagtattacacaatatgatttttctatagcccatctttgcaattcttcactgaaagactgctgaaatagcccttcctcccctatggaaaatgttctgagatactcaactgtaatatttcaactactgagaatacacagtgtagggcagggtccaaagataccagaccatgtgaccctaaatcctttttttccccatcattcagaaaacagtaccacctaaagtgctgtagagtaggcatgcttttttctacaaggtattcatg

SEQ ID NO: 388690 - DNA, 304 bp, Homo sapiens
cttgttcatggcactttgcactgtctctgtcttaactcccaggtaggctctgaaattgatgacagggatggaagctcattcgttcagtccacagcatgctgagtgctttatgctcttggcctgtgatcctcactagcaccctttaatgtggtgaccatcccattttacagacgaggaaagtgaggctcagagaagtttaaccatttgcccaagcctggccaatcccaggcctgggctctttcaacagcacagtgctgcctctgcaggggctccaccctgggctgggtttttgggaactcaggac

SEQ ID NO: 388691 - DNA, 237 bp, Homo sapiens
gtgatctgggggctggaagcacaaagatatttccaagatcctgggtcagttcaagcagggactaggggcagatgataagcccactcacagtgccaagaagcagggtttaggggagactgggaattggaaaaggcttttcagaaggggtcaatcagaaagcggcaggagagattcccgaggcacccacagcacacacaaaggccctgaggcaggaacagaggggccacaggccacagc

SEQ ID NO: 388692 - DNA, 554 bp, Homo sapiens
agtggcgctgctagccggccggcgcaggctgccgagcgggtgagcgcgcaggccaggccaaagccctggtacccgcgcggtgcgggcctcagtctgcggccatgggggcgtccgcgcggctgctgcgagcggtgatcatgggggccccgggctcgggcaagggcaccgtgtcgtcgcgcatcactacacacttcgagctgaagcacctctccagcggggacctgctccgggacaacatgctgcggggcacaggtgggagctctgggcccagggccggccgtgcgctgtcacccgggtcggacttcgcgggcgaggggccgaagctgggcacgcgggtccctggctgcgggcgcggcatttccctcccgccgcccgggacagagacctcgggctgctgagcgactgcgccccaaaacctccggcctccgtgggccgcttcgggcgggttatggggtggcggtgggggaagggactggaaagttaggtcgagctcgaagttcagagatgaaaggaaaccaccgggctttgtttcagaggcccgagtcctcccagtg

SEQ ID NO: 388693 - DNA, 360 bp, Homo sapiens
tgagcgtcccatttgtgtggggtgagcacagaggtcaggagggcagtgcaggaacaacttccctcttaggccaagaaatctgaaactgggaaggcagtggggagccttagtgtgttttttagctgaagtagagtcacgctttagggagattggatttgactggaatatctaagataggttggagctgggagagaccctgggatgccattgttgactaatattctgttcttgtccatggtgtcttgtgtttctgagggtgcactagatgtgggtaagacagttaaggagcagaggggatactgttttgcctcaggaagggcttgcccctctcctgtcagcagctgggttgatgtgctggtc

SEQ ID NO: 388694 - DNA, 401 bp, Homo sapiens
gcagctgctgccaatgccagcttccaatgccagcttcctccatttgaacaaaactacggagctctttgcacttttaattttttcctcttccctgctagggtagctggcaggagttaataaacaataaaatacaactggaggggtgacaggcaggaactaccggggcctgtggcagaccagatctatggcatggtctgccaccctgtctgtgtgccaggggcaagataagcctaactttccccaagctcgatttcctcatctcatctgaaaatgatgaataaaaatatccacctcagagctattaagaaaactgaacctaaggtaagcaaagtcctgctcctagcacttaaatgtaagctactcttactctagttacacataaagttacttccaaaaacctt

SEQ ID NO: 388695 - DNA, 432 bp, Homo sapiens
cgattttagttcggaaactaagggaagttgtgtagcaggtagctatgtttaaaaaaatgtaatttagacactcccatgcttaaaaatcctttggttttccattgcagttggaatgaaatccagactcattgtgcccacaaggttttccatgtctgaccgttaactactacctttccacgatctcctactgctcacccacttcccttagtacactcacaatatgctggtcttctttcagcttctctatgttccagactcttcccacttcaggccttttcctaactgttctttctcttcctttggtttggggcagggcttgcttaagatcccttcttcaggaggcattgctgattactgtgtcctctttctcccataatctctatatttagacttttttcttctttattcatttgatagagtttataattgttt

SEQ ID NO: 388696 - DNA, 634 bp, Homo sapiens
agtaatgatacgatcgagcgctgtaccgatgagtaatcttggcatgcatatgcttatgttcacaaattggcacttagaaaataattctccatatctcatcacaacaaagaactttggaaaatacatcagtcctccatgggaattctccaaagactttaaaatattaatttctacaacatccttatttcccaaagtagcatacttcctttcccacgtcaggagtacttcccactaatcactgttgtcttattgccttgctcagacacatggaaaatgatttgttgactgctttctacctaagttaaatcaaaactttaactatatcttttccactaacagtatttctcattactattgcaaagtattaatggataactatatctccaataaatgcagcctcctagctaatttcatttctttttagtttcctcttcgatgttgagttacttcttagttttataagtggattttgtcagtgcatctcttctcatcattcattctattatgatattacctattttttaggggcagtttggaaagcatgtatctcaatccttgattaatatatatattaatgtcatgtattcatttccttgtatttctgaaccctactcccacattagaatcacctggg

SEQ ID NO: 388697 - DNA, 311 bp, Homo sapiens
caacaactgaaaccacaacccacagtgaaccttattaacggaaatattttatatattgttattttcatattttcacttatcatttggtaggaataagagcctattgctcatttttattccatggatgtctacagaaaacccaaatcatacgtcaagtgatgattatttccttcatttttgtgaaggatatctaaaatttatataaggccagatatatctctctttgaacatgatggttttaaacaagtcaactttaaaacatgtaataagcagaaaatttgccatcttgattttttagatgaggaaatcta

SEQ ID NO: 388698 - DNA, 445 bp, Homo sapiens
ggtggcaggcacctgtagtcctggctactcaggaggctgaggcaggagaaccgcttgaacccgggaggcggaggttgcagtgagctaagattgtgccactgcactccagcctgggcaacagagaaagactccatttcaaaaaataaaaaataaataatctattgattgagaaaatggagactatgagaaatgataaatgctgtgatgagatgcttttaaatgaactcataacaacatctgtgggaatgtgaaaagtgaggcatctagaatgtagttctttattcagtctgtgcacaatgcttgactccaaatggaatcctggacccctggatcactgtgtggttcttaaataatccactgctgaggggcaattaaaagggaagtagagaagaaataactcacctgtgctctcccaggaacactggtagaatcctagtccattctc

SEQ ID NO: 388699 - DNA, 239 bp, Homo sapiens
tagaggatccgtaggttaagggctacctgtttcagactatttcttctggaatattgcatgaactgtcaatctcaagctttctgggagactgtaaaaactcaaggtatagagagggtaaaggaaaggggccttaaataaggaaagagaaatggtcacataggtttcagagtctgaaaaccaaaacagaagccctaaggtaacagagagaatagcttcagaaatgggtagcccttaaactg

SEQ ID NO: 388700 - DNA, 458 bp, Homo sapiens
gccacagtgccatattaatttttaagcaaggcctctcctgtatatcaacagatgtatataactacttctcctttcctataccattattcatattctaaatttgttttgtttatttgcttctataaacagcatcttcatactatagttttattcttattttagaaacatttcctaataggatttttagaacaaagtgtattaatatttttatgacttttgataatactgccaaagagctttccaaaaggactgttagaatttacaatgccctcaccaatctctgcaggattatcattaaacctgaaaggacagccaacactcaccatctctaatttcttgcctcacattcatttctacttttaaaaattcattacaatctggtttctttttcaagcaaactccagaagctacatttactaatattacacatgaccttccaaatggccaaatttgactat

SEQ ID NO: 388701 - DNA, 424 bp, Homo sapiens
ccccccggagcagatggaaacacgtttgtatgctgagagagtctgcagatttaagatgacagttgctcttagcctgcacctgagtatattccagctctgcaattcggagttgggcacttgaaaagctaggcctgcccttgctgaggaagggcaagacaatgaaagccatatccaacattgcttaacagccactgtataccgagccctgtgctaaactcccagcagcaactcttaaggtccttgttctactgatgagaaaattgggtctcagaggatcccagaggaggaaaactggggcttagagaatcccagaggatctcagaggagtcctggagtccagtgtacttcctaactcactgtgtgacctcaggcaagtcgcttgccctctctgagcctccatctcctcatttccacccatctgttg

SEQ ID NO: 388702 - DNA, 413 bp, Homo sapiens
cattttcaaacaatgacaaatttccagttttcttttaggtgtaagaacttccctctctaagatataatgtaaataaaacactaattagaacttaaatgtaactttgagaaaaaaaaagttaggtatcatatagtaagactaatttccctaaaatataattctagttatgactacaattagtgttagaattttacaagaaaatgttttactgagtcaagatctaacctgcattcatgtaattaaatttcccaagtggttgtgagaggatgtttttactgaggcaggtggttacttactgctctctgatcccatcttctcaattgctaggacatggggcaggatatgaggtactttctctacaaatgacttggggaaatatttgcttaaatagtcactgacatgtgaacattgtg

SEQ ID NO: 388703 - DNA, 361 bp, Homo sapiens
aaaatatcaccttttcttccctagaaggtgatcaaaatttgccccaattttggttatttgtggagtcttcattgttaagctgttttcctccaccttgattatcatttctaaactctgttaagatctcattgaacattattaatttggaattcacaataattcatatgtgggagtccaggtaagagctgtgttgccaactttcaatgtgcagtcatttttgcaagagaattgctggcagtcctagagaaatttgtaagtgcttagaagaatacatgtcatttaattcagactaatttgcaattggcacattagttatttatgacacagaaattcatggagattaagatttgattagcttgtt

SEQ ID NO: 388704 - DNA, 834 bp, Homo sapiens
agagacagggtttgccatgctagccaggctggtctcgaactcctgacctcaagtgatcctcctgcctcagcctcccaaagtgctaagattacaagcatgagccaccatgccctgcccctattttctaataaggtcacattctgggattcctggtgaatgtgaatttttggaagacagtattcagtctagcaaaaggcagaacatcctcattttcttccctacctcagaaataaagaagttaacttcaacccctctgagagagagaggcttcctgagcttccaacaatcaattatccaaatattagtcacagaaggacactaagggttgtgcacagcacgtggccagcccattctctgagtctgtcaagtttaaggtgaacgctaatcctgaatgagtcttaaaatgtacttggcatatcctgttcattgtaaaatgttctcacattgtgatggctggggcttccctctcaggtgtaatctgcgaagtcagacgtgacacagcctgggtgaggtgggccaagccgggaactgggttaggagggaagctggggaatgatctccaaggtctcagatcccaaactggctttagccagattcacccagagggatctcataaaaaatgcacattccggggcccaccccagacctaatgaatcagaattacctgggaaggagcctggggagctctgttttcagaagcagcccagccgaatcctacggtcagacagggctaggaatcgaaactcagtctagcgcggtagttcccaaactcgtctgtgcttcaaaaaatacagatgctgatgtccagacatggtggctcatgcctataatccc

SEQ ID NO: 388705 - DNA, 399 bp, Homo sapiens
ttttttaaagcgaatcatggtgtaatggaaaacgcacagtacttgtcatcagaacactgccactcttgccacttgctgggtgtgccacttaactgcctcatgggcctcagtttcctcagcagttgaatgagtgggttgaagtagatgctctccaaggccccttcccgcattaggaactcggatttggtccagaagctgttctgccaactctgctaactgaagaaacatctgtgttcccaattcagttcccttaaaatacagctcctgcacagacttaagtcccctttgaaatggatttgtccatgcagattttgcagaccagagacttcttaggctggagttatacctctctggtattcatgactctttctgtagcactgctcttactgtgcagtgtcc

SEQ ID NO: 388706 - DNA, 259 bp, Homo sapiens
ttgttctttttctggttgtggtggttgcagaaatctatacatgcgttaaataggaccatacaacaacaacaaaaataagtttcagtatatgttaatttttaaattaaatcagaagactgagggttttgagatcagatgaccagggtttgatcccagctctccagcccgctaagactgtgatattggtaaagtcacttgacctccatgaacctcagtttctcctagacatttagattgctcaggattgaatgtagaaccc

SEQ ID NO: 388707 - DNA, 385 bp, Homo sapiens
ctagagaaaaccccgctacctggcatttagtaaatggtgactatagtagttattggggatgttattatgattaccatatttctcattatgcaaataattctctttgaggactaagcttgtcttatatttagtttatgtcctctacaacactgtaatactaccagccacgtgctaagacatgaatgaatacatgaataaaatattttcagaaattcttcataaatctacgttagcaggtgagtaactgcaaggtgaatatctcattttattgtaagtgatttttcaataccggtcatcattaggatcaggtccccctggggcctctcactactgaccatggcccctctagctagtggcacttttaagagtcttttgctttatgata

SEQ ID NO: 388708 - DNA, 450 bp, Homo sapiens
  misc_feature (92)..(92): n is a, c, g, or t
catcgagcatgccgagttctcggggaacctgtatggcacgagcaaggtgccggtgcaggctgtgcaggccatgaaccgcatctgtgtgctgnacgtggacctgcagggtgtgttctgaaaagtgttcgtgaagggctgggtttgtatgactgaagaatcgtgctgtaccactgggtccggagctgctatgccttagctggtttggcaccagccacctcctcatgaaccccaactggaaactccacttccatgaccgaacaaaaaggaccagatttccaaagggacacagctagaggaaatggagccaatactaactttatatggccaatgcattcatcactggttcaaaccggtacccagtcagtgaatccgccagcctgattttgcccatgtatgaccctactcccagcgcaatcacataaatgcccccaaacgttgagttggagtatt

SEQ ID NO: 388709 - DNA, 190 bp, Homo sapiens
cctgggctccagagatcaacccacctcagcctcgcaaagtgctgggattacagatgtgagcatggcacccagcctcattattcattttttacatctcttttttaaaaatgatttttctcacaacacatgcaatttctcttattccatcccaattcaattcttttttttttttcttttctttttttttttt

SEQ ID NO: 388710 - DNA, 238 bp, Homo sapiens
cagtgatacagtaagcattattgatattatatgaaactctctaaaatccatctttcattcattatattttaaaacatctttgaacttggaagctacgttccactcaagccagtgattcatgccattctggattgtgtgtattgcatgggaatattacaataatatatttattttaaaatatttatattcttgggatattgtaactggaagtgtgtgtcaaacagaaactggctagcag

SEQ ID NO: 388711 - DNA, 309 bp, Homo sapiens
tgggtctcatttttctcatctctaaagtgggggttgggctaaaaatcctccaaggcccctttcagcttgtgataagacttcaagtcgccttttcaccctgaaggagtccatttcagtctgcaccaacagtttattttctgagtcacagcttatttctccatgcttatcctaaaaatgttgtgcccaaatagttctaagctctcgagatttattcccactcagaaagaaatggtctttcaagacccactaacaaaatgtttcaaaaggatttaaaaaggtaaaattagtttacttaagtataaaggcaaa

SEQ ID NO: 388712 - DNA, 299 bp, Homo sapiens
gcggcgccggacccggctgcgcgcggaccgttagctactgcggccgggacgcggccccgcccaggcgagcggcgggtggctcttaccagcgggaacgccatggggccggtgtggccctgcggggctgacgggctgaccggccagccggcgggcgagagacgcgcacgcacgtgggcactatttttgcagcgggccgcgcgcagccccgcaccccggcagcttatgaagctcctacgagccgctcctcggagccgccccccggccggatgcggagcacctgtgtcggccccgcccgggcc

SEQ ID NO: 388713 - DNA, 426 bp, Homo sapiens
gatcacttgaggtcaggagtttgaccagcctgaccaacatggggaaaccccttctttactaaaaatacaaaaattagccaggcacggtggcacttgcctgtaatcccagctactagggaggctgaggcagaggtttcagtgaaccgagattgcaccactgcactccagcctgggcaacagaacaagactccatttcaaaaaaaaaaaaaaaaaaattcatgaagtctgtgatcgttatacaaatgcatgacaaacaattgtagaaaatcaattgactctacgtgtataggtctatttctgttctcttattctgtccattggtctttatgtctattctggtttttttgtttgttttgttttgttttgagtcagggtctcgctctgctgcccaggctggaagtggtgcaatctcagctcactgcaacc

SEQ ID NO: 388714 - DNA, 340 bp, Homo sapiens
tgtgtggcagatatttaaataggaaactatgtagggcctagttgattgcctatatagaatccagtaccctgtctatgccccttcactgcccaagcatgtcacaaggaactgccctattccaagctccagaggacctgctgagtaggtgcttttcaggagcttgaaaagactgtttccaggtctacccccaggggttaatttaattggtctggggagaggcctaagtatcagtttttttgttttgttttagttttttagtaaggagagactttattgaaaaggatttttgcaaggaggggaaaacgactgttgaaatagggaggacactctgaccataagg

SEQ ID NO: 388715 - DNA, 314 bp, Homo sapiens
taggctacgcagttcatctgtgagtttttccaaactatcacaaatctccaaagtattttccaatatatttattgaaaaaaatccatgtataagtggatccacacagttcaaatccgtgatgttcaagggtcaactgtattttgctataccagtaatgaacaatcagaaattaaaagttaaaaatcaacagcattggccgggtgctgtgacttacgcctgtaataccaggactttggaagaccgaggcaggtggatcacttgaggccaggagttcaagaccagcctggacaacatggtgaaacctcgtctctacc

SEQ ID NO: 388716 - DNA, 744 bp, Homo sapiens
tgggaaggccagtctcccaacgacggcggcttggatgcttatggctgaggccaaggtcccactgcctggacggaagttccggctgagaccaacgtcccatggcctggagggaagttccggtgggtgggtgaggggttgctctagcagctgcttctttaaccgtgggtggtcgcggagcctgcaaggcgggggaggagcatctgggggcgtcaggtccagtttcacactctagctcctgccctaggcccctaggcacctccacatcacaggctgctcagctgcttcactggctgagcctggagacttcaacacaggaattaggggttcacactgtcagcaggatcattggatataaaatttcactgcaggcctttctgaagccaaacataagtgttccccagccaagaattagccatttgatgcaaaatgtaggtgggcgtggtggcgcacacctgtagtcccagctactcaggaggctgaggcaggagaatcgcttgaacctgggaggaagaggctgcagtgaactgagattgcgccactgcactccagcctgggcaacagagcgagactctgcctcaaaaaataaataaataattttttttaagaaaatagccatttgatactctgcctttttcccccctaagaagggattttgagttaattcatacaaataagacaagataacaattgtttaaagtgaagagctagagatcaagagacataggaaaaataagataaagacag

SEQ ID NO: 388717 - DNA, 405 bp, Homo sapiens
gtagtgtatgtgggagacatttattaggagtaaaaaacattgatgatgaagcaatttatacttctgggtaggcataattattgcttaaattgtaacattaatcatagtcgtattttcatataaattgagattttttgttaaagtttcatgggcccttggctttacatttttgaaagtaaataatacatttattggatttttaaattcagattaaattgcattttgtaaaataaggtcacctgtttcaaaacaaaatcaacccttccataaccagaattataactagtaccttagctactccagtaatattgtttttctctaaaagttttttcttaaattcatttaaacccaaaatttttttcttcctaacttcttagcgacatatatccttatagttctagatgt

SEQ ID NO: 388718 - DNA, 4499 bp, Homo sapiens
agcggggagggccccgagcggcgcagatagggacgttggggctgtgccccgcggcgcggcgcctgccactgcgcaggcgcctcaggaagagctcggcatcgcccctcttcctccaggtcccccttccccgcaacttcccacgagtgccaggtgccgcgagcgccgagttccgcgcattggaaagaagcgaccgcggcggctggaaccctgattgctgtccttcaacgtgttcattatgaagttattagtaatacttttgttttctggacttataactggttttagaagtgactcttcctctagtttgccacctaagttactactagtatcctttgatggcttcagagctgattatctgaagaactatgaatttcctcatctccagaattttatcaaagaaggtgttttggtagagcatgttaaaaatgtttttatcacaaaaacatttccaaaccactacagtattgtgacaggcttgtatgaagaaagccatggcattgtggctaattccatgtatgatgcagtcacaaagaaacacttttctgactctaatgacaaggatcctttttggtggaatgaggcagtacctatttgggtgaccaatcagcttcaggaaaacagatcaagtgctgctgctatgtggcctggtactgatgtacccattcacgataccatctcttcctattttatgaattacaactcctcagtgtcatttgaggaaagactaaataatattactatgtggctaaacaattcgaacccaccagtcacctttgcaacactatattgggaagaaccagatgcaagtggccacaaatacggacctgaagataaagaaaacatgagcagagtgttgaaaaaaatagatgatcttatcggtgacttagtccaaagactcaagatgttagggctatgggaaaatcttaatgtgatcattacaagtgatcatgggatgacccagtgttctcaggacagactgataaacctggattcctgcatcgatcattcatactacactcttatagatttgagcccagttgctgcaatacttcccaaaataaatagaacagaggtttataacaaactgaaaaactgtagccctcatatgaatgtttatctcaaagaagacattcctaacagattttattaccaacataatgatcgaattcagcccattattttggttgccgatgaaggctggacaattgtgctaaatgaatcatcacaaaaattaggtgaccatggttatgataattctttgcctagtatgcatccatttctagctgcccacggacctgcatttcacaaaggctacaagcatagcacaattaacattgtggatatttatccaatgatgtgccacatcctgggattaaaaccacatcccaataatgggacctttggtcatactaagtgcttgttagttgaccagtggtgcattaatctcccagaagccatcgcgattgttatcggttcactcttggtgttaaccatgctaacatgcctcataataatcatgcagaatagactttctgtacctcgtccattttctcgacttcagctacaagaagatgatgatgatcctttaattgggtgacatgtgctagggcttatacaaagtgtctttgattaatcacaaaactaagaatacatccaaagaatagtgttgtaactatgaaaaagaatactttgaaagacaaagaacttagactaagcatgttaaaattattactttgttttccttgtgttttgtttcggtgcatttgctaataagataacgctgaccatagtaaaattgttagtaaatcattaggtaacatcttgtggtaggaaatcattaggtaacatcaatcctaactagaaatactaaaaatggcttttgagaaaaatacttcctctgcttgtattttgcgatgaagatgtgatacatctttaaatgaaaatataccaaaatttagtaggcatgtttttctaataaatttatatatttgtaaagaaaacaacagaaatctttatgcaatttgtgaattttgtatattagggaggaaaagcttcctatatttttatatttacctttaattagtttgtatctcaagtaccctcttgaggtaggaaatgctctgtgatggtaaataaaattggagcagacagaaaagatatagcaaatgaagaaatattttaaggaaacctatttgaaaaaaaaagcaaagaccatttgataaaagcctgagttgtcaccattatgtcttaagctgttagtcttaaagattattgttaaaaaattcagaagaaaagagagacaagtgctcttctctctatctatgcttaatgcctttatgtaagttacttagttgtttgcgtgtgcctgtgcaagtgtgtttgtgtgtggttgtgtggacattatgtgatttactatataaggaggtcagagatggactgtggccaggcttccacattcctgaagcacacagatctcaggaaaggttatttttgcacttcatatttgtttactttctcctaactcacaagttaaaatcataacttaatttcattaacttttatcatttaactctctcatgtttgttgtaacctgaggtatccaaatgctacagaaaaatttatgacccaaatacaaatctcaatttgactgggacagaatgaggaatggagatttttgtatttatctttgggactttatgccttactttttaggctatagaatagttaagaaattttaaacaaaatttagtatcttttggtctttcacaccattcatatgttaagtggcagaatagccttagtgctacctccacttttttctccagtatttgcatcacagaaataatccctctgtttaacatgtttgttcagagccaagggtttattgtgaagaactgtcatcctgcctttgctagctggtaccttctagtaatcaaaattaatatgaagaaactaggttgtgacagactagattatatttagtaggggaaaaattgggctcaagaaccattcatcagtacgtgagacaagcagttaatagtatgatctttaaagttttgacaatataaaataaacttggtaactgttttacaaatataaaagtataataaatatgcagcccagttaaatattgattatctgtgatggtaaagaacaacagtggtgccagtcatcaaacatacagtgcgtcctattgagtcactgctaatttcttgagcctggtatttgctgcctattgtatttgtggttgttgagaggcattttcaaaccctgtataaataatccatgctgttggtcataagttaactgtattaagaacagtaaaataaataaaaaccaatagtactaattttgctttaaaaaaatttctaatttttttcacataaaacaattatcctaaaggttaatagttgatcgaaacagaataatagaaaaattcttctttaatttccattaaaaagcaaatagcattgacacatttaaagcttttcatttaaagtagtggatgtttttgaagtatctaaaatagtagcagaatattttatacttggtccttgcaatggtgtgagttttaatgattgcattatcgtgattggtggttatgagtttcagaaatctatacttggcatccaactcatgagtggattttatataggatggaacaggaaggtatgtcctgtcagtatcttaaccctttcaacaagacatttacctatttgtctttccttacgttctcaaaatattaactcgaattgtaaattaagcaaaaatgtaaaaagtatatgttgatgggacaagaagaatagtatttatttaataaaacatatattatattgaactatgtgttaattcatttgtatcttttaaaaaattatcactgttaaagccattgactcctttagtacactgagaaaaatcttatagtaaaactagcctttcacattaaggttttggtgtgtattttgttaaataactaacatgctgctctattttctgggtgtagaaagtatttggctctaggaaacatttacttgtttgtgaaaacaataccccaaggtaataggaaaagtttgagttaagtgtttttaattcagtcagtgaattcagaataagtacattcatgtataacatagggacagttctgctgctgttatttatatgcaattcttctggtaaatagcaatagaataaaacatatttcaatgtttgtgtataggttttatattattattccactaggaatggcataagaatttatagataaattcttgtaacattaaaggattaaaatgtttttacattgtttttgggtgtctccttcttgtgcccatatctgataagctttatggattattgcatttaattccttttatttggagggttttacttccttgttaacatataaagttataaatgaaggacaaggaggagatggaaaatgtgtatttattgttaattcttaaaatagtgtgtaaataaaataacatcagtgtgcttta

SEQ ID NO: 388719 - DNA, 4605 bp, Homo sapiens
agcggggagggccccgagcggcgcagatagggacgttggggctgtgccccgcggcgcggcgcctgccactgcgcaggcgcctcaggaagagctcggcatcgcccctcttcctccaggtcccccttccccgcaacttcccacgagtgccaggtgccgcgagcgccgagttccgcgcattggaaagaagcgaccgcggcggctggaaccctgattgctgtccttcaacgtgttcattatgaagttattagtaatacttttgttttctggacttataactggttttagaagtgactcttcctctagtttgccacctaagttactactagtatcctttgatggcttcagagctgattatctgaagaactatgaatttcctcatctccagaattttatcaaagaaggtgttttggtagagcatgttaaaaatgtttttatcacaaaaacatttccaaaccactacagtattgtgacaggcttgtatgaagaaagccatggcattgtggctaattccatgtatgatgcagtcacaaagaaacacttttctgactctaatgacaaggatcctttttggtggaatgaggcagtacctatttgggtgaccaatcagcttcaggataccatctcttcctattttatgaattacaactcctcagtgtcatttgaggaaagactaaataatattactatgtggctaaacaattcgaacccaccagtcacctttgcaacactatattgggaagaaccagatgcaagtggccacaaatacggacctgaagataaagaaaacatgagcagagtgttgaaaaaaatagatgatcttatcggtgacttagtccaaagactcaagatgttagggctatgggaaaatcttaatgtgatcattacaagtgatcatgggatgacccagtgttctcaggacagactgataaacctggattcctgcatcgatcattcatactacactcttatagatttgagcccagttgctgcaatacttcccaaaataaatagaacagaggtttataacaaactgaaaaactgtagccctcatatgaatgtttatctcaaagaagacattcctaacagattttattaccaacataatgatcgaattcagcccattattttggttgccgatgaaggctggacaattgtgctaaatgaatcatcacaaaaattaggtgaccatggttatgataattctttgcctagtatgcatccatttctagctgcccacggacctgcatttcacaaaggctacaagcatagcacaattaacattgtggatatttatccaatgatgtgccacatcctgggattaaaaccacatcccaataatgggacctttggtcatactaagtgcttgttagttgaccagtggtgcattaatctcccagaagccatcgcgattgttatcggttcactcttggtgttaaccatgctaacatgcctcataataatcatgcagaatagactttctgtacctcgtccattttctcgacttcagctacaagaagatgatgatgatcctttaattgggtgacatgtgctagggcttatacaaagtgtctttgattaatcacaaaactaagaatacatccaaagaatagtgttgtaactatgaaaaagaatactttgaaagacaaagaacttagactaagcatgttaaaattattactttgttttccttgtgttttgtttcggtgcatttgctaataagataacgctgaccatagtaaaattgttagtaaatcattaggtaacatcttgtggtaggaaatcattaggtaacatcaatcctaactagaaatactaaaaatggcttttgagaaaaatacttcctctgcttgtattttgcgatgaagatgtgatacatctttaaatgaaaatataccaaaatttagtaggcatgtttttctaataaatttatatatttgtaaagaaaacaacagaaatctttatgcaatttgtgaattttgtatattagggaggaaaagcttcctatatttttatatttacctttaattagtttgtatctcaagtaccctcttgaggtaggaaatgctctgtgatggtaaataaaattggagcagacagaaaagatatagcaaatgaagaaatattttaaggaaacctatttgaaaaaaaaagcaaagaccatttgataaaagcctgagttgtcaccattatgtcttaagctgttagtcttaaagattattgttaaaaaattcagaagaaaagagagacaagtgctcttctctctatctatgcttaatgcctttatgtaagttacttagttgtttgcgtgtgcctgtgcaagtgtgtttgtgtgtggttgtgtggacattatgtgatttactatataaggaggtcagagatggactgtggccaggcttccacattcctgaagcacacagatctcaggaaaggttatttttgcacttcatatttgtttactttctcctaactcacaagttaaaatcataacttaatttcattaacttttatcatttaactctctcatgtttgttgtaacctgaggtatccaaatgctacagaaaaatttatgacccaaatacaaatctcaatttgactgggacagaatgaggaatggagatttttgtatttatctttgggactttatgccttactttttaggctatagaatagttaagaaattttaaacaaaatttagtatcttttggtctttcacaccattcatatgttaagtggcagaatagccttagtgctacctccacttttttctccagtatttgcatcacagaaataatccctctgtttaacatgtttgttcagagccaagggtttattgtgaagaactgtcatcctgcctttgctagctggtaccttctagtaatcaaaattaatatgaagaaactaggttgtgacagactagattatatttagtaggggaaaaattgggctcaagaaccattcatcagtacgtgagacaagcagttaatagtatgatctttaaagttttgacaatataaaataaacttggtaactgttttacaaatataaaagtataataaatatgcagcccagttaaatattgattatctgtgatggtaaagaacaacagtggtgccagtcatcaaacatacagtgcgtcctattgagtcactgctaatttcttgagcctggtatttgctgcctattgtatttgtggttgttgagaggcattttcaaaccctgtataaataatccatgctgttggtcataagttaactgtattaagaacagtaaaataaataaaaaccaatagtactaattttgctttaaaaaaatttctaatttttttcacataaaacaattatcctaaaggttaatagttgatcgaaacagaataatagaaaaattcttctttaatttccattaaaaagcaaatagcattgacacatttaaagcttttcatttaaagtagtggatgtttttgaagtatctaaaatagtagcagaatattttatacttggtccttgcaatggtgtgagttttaatgattgcattatcgtgattggtggttatgagtttcagaaatctatacttggcatccaactcatgagtggattttatataggatggaacaggaaggtatgtcctgtcagtatcttaaccctttcaacaagacatttacctatttgtctttccttacgttctcaaaatattaactcgaattgtaaattaagcaaaaatgtaaaaagtatatgttgatgggacaagaagaatagtatttatttaataaaacatatattatattgaactatgtgttaattcatttgtatcttttaaaaaattatcactgttaaagccattgactcctttagtacactgagaaaaatcttatagtaaaactagcctttcacattaaggttttggtgtgtattttgttaaataactaacatgctgctctattttctgggtgtagaaagtatttggctctaggaaacatttacttgtttgtgaaaacaataccccaaggtaataggaaaagtttgagttaagtgtttttaattcagtcagtgaattcagaataagtacattcatgtataacatagggacagttctgctgctgttatttatatgcaattcttctggtaaatagcaatagaataaaacatatttcaatgtttgtgtataggttttatattattattccactaggaatggcataagaatttatagataaattcttgtaacattaaaggattaaaatgtttttacattgtttttgggtgtctccttcttgtgcccatatctgataagctttatggattattgcatttaattccttttatttggagggttttacttccttgttaacatataaagttataaatgaaggacaaggaggagatggaaaatgtgtatttattgttaattcttaaaatagtgtgtaaataaaataacatcagtgtgctttaaagaaatgtgtatgtagtgccttaatttaaattaaaatatttttgactgttacttgagttcagaattaatgactttgttcatgatttttaaaatgtgtgtgaataaaatctaccaaaaaattcttactgtaattattaaatataaagttcagtgtcactg

SEQ ID NO: 388720 - DNA, 3648 bp, Homo sapiens
agggtatgaccagttgggaaaaggggcatatgtgtgtgtttgtgtgtgtatgtgagagagagagagagagagggaaatatggaacatagctgagttgaagaaatagaaatttttatttctagtccctttctgaaagaattgaatgtttatatactagaagcaagttattttgtcctaaaaagtctgatcttattgactgatgttgttttgttctttttcagtaggtgaccatggttatgataattctttgcctagtatgcatccatttctagctgcccacggacctgcatttcacaaaggctacaagcatagcacaattaacattgtggatatttatccaatgatgtgccacatcctgggattaaaaccacatcccaataatgggacctttggtcatactaagtgcttgttagttgaccagtggtgcattaatctcccagaagccatcgcgattgttatcggttcactcttggtgttaaccatgctaacatgcctcataataatcatgcagaatagactttctgtacctcgtccattttctcgacttcagctacaagaagatgatgatgatcctttaattgggtgacatgtgctagggcttatacaaagtgtctttgattaatcacaaaactaagaatacatccaaagaatagtgttgtaactatgaaaaagaatactttgaaagacaaagaacttagactaagcatgttaaaattattactttgttttccttgtgttttgtttcggtgcatttgctaataagataacgctgaccatagtaaaattgttagtaaatcattaggtaacatcttgtggtaggaaatcattaggtaacatcaatcctaactagaaatactaaaaatggcttttgagaaaaatacttcctctgcttgtattttgcgatgaagatgtgatacatctttaaatgaaaatataccaaaatttagtaggcatgtttttctaataaatttatatatttgtaaagaaaacaacagaaatctttatgcaatttgtgaattttgtatattagggaggaaaagcttcctatatttttatatttacctttaattagtttgtatctcaagtaccctcttgaggtaggaaatgctctgtgatggtaaataaaattggagcagacagaaaagatatagcaaatgaagaaatattttaaggaaacctatttgaaaaaaaaagcaaagaccatttgataaaagcctgagttgtcaccattatgtcttaagctgttagtcttaaagattattgttaaaaaattcagaagaaaagagagacaagtgctcttctctctatctatgcttaatgcctttatgtaagttacttagttgtttgcgtgtgcctgtgcaagtgtgtttgtgtgtggttgtgtggacattatgtgatttactatataaggaggtcagagatggactgtggccaggcttccacattcctgaagcacacagatctcaggaaaggttatttttgcacttcatatttgtttactttctcctaactcacaagttaaaatcataacttaatttcattaacttttatcatttaactctctcatgtttgttgtaacctgaggtatccaaatgctacagaaaaatttatgacccaaatacaaatctcaatttgactgggacagaatgaggaatggagatttttgtatttatctttgggactttatgccttactttttaggctatagaatagttaagaaattttaaacaaaatttagtatcttttggtctttcacaccattcatatgttaagtggcagaatagccttagtgctacctccacttttttctccagtatttgcatcacagaaataatccctctgtttaacatgtttgttcagagccaagggtttattgtgaagaactgtcatcctgcctttgctagctggtaccttctagtaatcaaaattaatatgaagaaactaggttgtgacagactagattatatttagtaggggaaaaattgggctcaagaaccattcatcagtacgtgagacaagcagttaatagtatgatctttaaagttttgacaatataaaataaacttggtaactgttttacaaatataaaagtataataaatatgcagcccagttaaatattgattatctgtgatggtaaagaacaacagtggtgccagtcatcaaacatacagtgcgtcctattgagtcactgctaatttcttgagcctggtatttgctgcctattgtatttgtggttgttgagaggcattttcaaaccctgtataaataatccatgctgttggtcataagttaactgtattaagaacagtaaaataaataaaaaccaatagtactaattttgctttaaaaaaatttctaatttttttcacataaaacaattatcctaaaggttaatagttgatcgaaacagaataatagaaaaattcttctttaatttccattaaaaagcaaatagcattgacacatttaaagcttttcatttaaagtagtggatgtttttgaagtatctaaaatagtagcagaatattttatacttggtccttgcaatggtgtgagttttaatgattgcattatcgtgattggtggttatgagtttcagaaatctatacttggcatccaactcatgagtggattttatataggatggaacaggaaggtatgtcctgtcagtatcttaaccctttcaacaagacatttacctatttgtctttccttacgttctcaaaatattaactcgaattgtaaattaagcaaaaatgtaaaaagtatatgttgatgggacaagaagaatagtatttatttaataaaacatatattatattgaactatgtgttaattcatttgtatcttttaaaaaattatcactgttaaagccattgactcctttagtacactgagaaaaatcttatagtaaaactagcctttcacattaaggttttggtgtgtattttgttaaataactaacatgctgctctattttctgggtgtagaaagtatttggctctaggaaacatttacttgtttgtgaaaacaataccccaaggtaataggaaaagtttgagttaagtgtttttaattcagtcagtgaattcagaataagtacattcatgtataacatagggacagttctgctgctgttatttatatgcaattcttctggtaaatagcaatagaataaaacatatttcaatgtttgtgtataggttttatattattattccactaggaatggcataagaatttatagataaattcttgtaacattaaaggattaaaatgtttttacattgtttttgggtgtctccttcttgtgcccatatctgataagctttatggattattgcatttaattccttttatttggagggttttacttccttgttaacatataaagttataaatgaaggacaaggaggagatggaaaatgtgtatttattgttaattcttaaaatagtgtgtaaataaaataacatcagtgtgctttaaagaaatgtgtatgtagtgccttaatttaaattaaaatatttttgactgttacttgagttcagaattaatgactttgttcatgatttttaaaatgtgtgtgaataaaatctaccaaaaaattcttactgtaattattaaatataaagttcagtgtcactg

SEQ ID NO: 388721 - DNA, 3669 bp, Homo sapiens
  misc_feature (3431)..(3434): n is a, c, g, or t
agcggggagggccccgagcggcgcagatagggacgttggggctgtgccccgcggcgcggcgcctgccactgcgcaggcgcctcaggaagagctcggcatcgcccctcttcctccaggtcccccttccccgcaacttcccacgagtgccaggtgccgcgagcgccgagttccgcgcattggaaagaagcgaccgcggcggctggaaccctgattgctgtccttcaacgtgttcattatgaagttattagtaatacttttgttttctggacttataactggttttagaagtgactcttcctctagtttgccacctaagttactactagtatcctttgatggcttcagagctgattatctgaagaactatgaatttcctcatctccagaattttatcaaagaaggtgttttggtagagcatgttaaaaatgtttttatcacaaaaacatttccaaaccactacagtattgtgacaggcttgtatgaagaaagccatggcattgtggctaattccatgtatgatgcagtcacaaagaaacacttttctgactctaatgacaaggatcctttttggtggaatgaggcagtacctatttgggtgaccaatcagcttcaggaaaacagatcaagtgctgctgctatgtggcctggtactgatgtacccattcacgataccatctcttcctattttatgaattacaactcctcagtgtcatttgaggaaagactaaataatattactatgtggctaaacaattcgaacccaccagtcacctttgcaacactatattgggaagaaccagatgcaagtggccacaaatacggacctgaagataaagaaaacatgagcagagtgttgaaaaaaatagatgatcttatcggtgacttagtccaaagactcaagatgttagggctatgggaaaatcttaatgtgatcattacaagtgatcatgggatgacccagtgttctcaggacagactgataaacctggattcctgcatcgatcattcatactacactcttatagatttgagcccagttgctgcaatacttcccaaaataaatagaacagaggtttataacaaactgaaaaactgtagccctcatatgaatgtttatctcaaagaagacattcctaacagattttattaccaacataatgatcgaattcagcccattattttggttgccgatgaaggctggacaattgtgctaaatgaatcatcacaaaaattaggtgaccatggttatgataattctttgcctagtatgcatccatttctagctgcccacggacctgcatttcacaaaggctacaagcatagcacaattaacattgtggatatttatccaatgatgtgccacatcctgggattaaaaccacatcccaataatgggacctttggtcatactaagtgcttgttagttgaccagtggtgcattaatctcccagaagccatcgcgattgttatcggttcactcttggtgttaaccatgctaacatgcctcataataatcatgcagaatagactttctgtacctcgtccattttctcgacttcagctacaagaagatgatgatgatcctttaattgggtgacatgtgctagggcttatacaaagtgtctttgattaatcacaaaactaagaatacatccaaagaatagtgttgtaactatgaaaaagaatactttgaaagacaaagaacttagactaagcatgttaaaattattactttgttttccttgtgttttgtttcggtgcatttgctaataagataacgctgaccatagtaaaattgttagtaaatcattaggtaacatcttgtggtaggaaatcattaggtaacatcaatcctaactagaaatactaaaaatggcttttgagaaaaatacttcctctgcttgtattttgcgatgaagatgtgatacatctttaaatgaaaatataccaaaatttagtaggcatgtttttctaataaatttatatatttgtaaagaaaacaacagaaatctttatgcaatttgtgaattttgtatattagggaggaaaagcttcctatatttttatatttacctttaattagtttgtatctcaagtaccctcttgaggtaggaaatgctctgtgatggtaaataaaattggagcagacagaaaagatatagcaaatgaagaaatattttaaggaaacctatttgaaaaaaaaagcaaagaccatttgataaaagcctgagttgtcaccattatgtcttaagctgttagtcttaaagattattgttaaaaaattcagaagaaaagagagacaagtgctcttctctctatctatgcttaatgcctttatgtaagttacttagttgtttgcgtgtgcctgtgcaagtgtgtttgtgtgtggttgtgtggacattatgtgatttactatataaggaggtcagagatggactgtggccaggcttccacattcctgaagcacacagatctcaggaaaggttatttttgcacttcatatttgtttactttctcctaactcacaagttaaaatcataacttaatttcattaacttttatcatttaactctctcatgtttgttgtaacctgaggtatccaaatgctacagaaaaatttatgacccaaatacaaatctcaatttgactgggacagaatgaggaatggagatttttgtatttatctttgggactttatgccttactttttaggctatagaatagttaagaaattttaaacaaaatttagtatcttttggtctttcacaccattcatatgttaagtggcagaatagccttagtgctacctccacttttttctccagtatttgcatcacagaaataatccctctgtttaacatgtttgttcagagccaagggtttattgtgaagaactgtcatcctgcctttgctagctggtaccttctagtaatcaaaattaatatgaagaaactaggttgtgacagactagattatatttagtaggggaaaaattgggctcaagaaccattcatcagtacgtgagacaagcagttaatagtatgatctttaaagttttgacaatataaaataaacttggtaactgttttacaaatataaaagtataataaatatgcagcccagttaaatattgattatctgtgatggtaaagaacaacagtggtgccagtcatcaaacatacagtgcgtcctattgagtcactgctaatttcttgagcctggtatttgctgcctattgtatttgtggttgttgagaggcattttcaaaccctgtataaataatccatgctgttggtcataagttaactgtattaagaacagtaaaataaataaaaaccaatagtactaaaaaaaaaaaaaaaaaaaaaaaaaaaaaaaaaaaaaaaaaaaaaaaaaaaaaaaaaaaaaaaaaaaaaaaaaaaaaaaaaaannnnaaaaagggaaaaaaaaaacataaaaaaaaaaaaaaaaaattgtgggccgctttggcccaaggcgtttttaatttgggccagttttttctttgggcccgattttgggccaatttggccaatttccccttatggggggcgtttaaaattaaatggccggggttttaaacggttcggattgggaaaaccctggggtttccccaattatacgctttgaaccccttttttcctttggctg

SEQ ID NO: 388722 - DNA, 4659 bp, Homo sapiens
agcggggagggccccgagcggcgcagatagggacgttggggctgtgccccgcggcgcggcgcctgccactgcgcaggcgcctcaggaagagctcggcatcgcccctcttcctccaggtcccccttccccgcaacttcccacgagtgccaggtgccgcgagcgccgagttccgcgcattggaaagaagcgaccgcggcggctggaaccctgattgctgtccttcaacgtgttcattatgaagttattagtaatacttttgttttctggacttataactggttttagaagtgactcttcctctagtttgccacctaagttactactagtatcctttgatggcttcagagctgattatctgaagaactatgaatttcctcatctccagaattttatcaaagaaggtgttttggtagagcatgttaaaaatgtttttatcacaaaaacatttccaaaccactacagtattgtgacaggcttgtatgaagaaagccatggcattgtggctaattccatgtatgatgcagtcacaaagaaacacttttctgactctaatgacaaggatcctttttggtggaatgaggcagtacctatttgggtgaccaatcagcttcaggaaaacagatcaagtgctgctgctatgtggcctggtactgatgtacccattcacgataccatctcttcctattttatgaattacaactcctcagtgtcatttgaggaaagactaaataatattactatgtggctaaacaattcgaacccaccagtcacctttgcaacactatattgggaagaaccagatgcaagtggccacaaatacggacctgaagataaagaaaacatgagcagagtgttgaaaaaaatagatgatcttatcggtgacttagtccaaagactcaagatgttagggctatgggaaaatcttaatgtgatcattacaagtgatcatgggatgacccagtgttctcaggacagactgataaacctggattcctgcatcgatcattcatactacactcttatagatttgagcccagttgctgcaatacttcccaaaataaatagaacagaggtttataacaaactgaaaaactgtagccctcatatgaatgtttatctcaaagaagacattcctaacagattttattaccaacataatgatcgaattcagcccattattttggttgccgatgaaggctggacaattgtgctaaatgaatcatcacaaaaattaggtgaccatggttatgataattctttgcctagtatgcatccatttctagctgcccacggacctgcatttcacaaaggctacaagcatagcacaattaacattgtggatatttatccaatgatgtgccacatcctgggattaaaaccacatcccaataatgggacctttggtcatactaagtgcttgttagttgaccagtggtgcattaatctcccagaagccatcgcgattgttatcggttcactcttggtgttaaccatgctaacatgcctcataataatcatgcagaatagactttctgtacctcgtccattttctcgacttcagctacaagaagatgatgatgatcctttaattgggtgacatgtgctagggcttatacaaagtgtctttgattaatcacaaaactaagaatacatccaaagaatagtgttgtaactatgaaaaagaatactttgaaagacaaagaacttagactaagcatgttaaaattattactttgttttccttgtgttttgtttcggtgcatttgctaataagataacgctgaccatagtaaaattgttagtaaatcattaggtaacatcttgtggtaggaaatcattaggtaacatcaatcctaactagaaatactaaaaatggcttttgagaaaaatacttcctctgcttgtattttgcgatgaagatgtgatacatctttaaatgaaaatataccaaaatttagtaggcatgtttttctaataaatttatatatttgtaaagaaaacaacagaaatctttatgcaatttgtgaattttgtatattagggaggaaaagcttcctatatttttatatttacctttaattagtttgtatctcaagtaccctcttgaggtaggaaatgctctgtgatggtaaataaaattggagcagacagaaaagatatagcaaatgaagaaatattttaaggaaacctatttgaaaaaaaaagcaaagaccatttgataaaagcctgagttgtcaccattatgtcttaagctgttagtcttaaagattattgttaaaaaattcagaagaaaagagagacaagtgctcttctctctatctatgcttaatgcctttatgtaagttacttagttgtttgcgtgtgcctgtgcaagtgtgtttgtgtgtggttgtgtggacattatgtgatttactatataaggaggtcagagatggactgtggccaggcttccacattcctgaagcacacagatctcaggaaaggttatttttgcacttcatatttgtttactttctcctaactcacaagttaaaatcataacttaatttcattaacttttatcatttaactctctcatgtttgttgtaacctgaggtatccaaatgctacagaaaaatttatgacccaaatacaaatctcaatttgactgggacagaatgaggaatggagatttttgtatttatctttgggactttatgccttactttttaggctatagaatagttaagaaattttaaacaaaatttagtatcttttggtctttcacaccattcatatgttaagtggcagaatagccttagtgctacctccacttttttctccagtatttgcatcacagaaataatccctctgtttaacatgtttgttcagagccaagggtttattgtgaagaactgtcatcctgcctttgctagctggtaccttctagtaatcaaaattaatatgaagaaactaggttgtgacagactagattatatttagtaggggaaaaattgggctcaagaaccattcatcagtacgtgagacaagcagttaatagtatgatctttaaagttttgacaatataaaataaacttggtaactgttttacaaatataaaagtataataaatatgcagcccagttaaatattgattatctgtgatggtaaagaacaacagtggtgccagtcatcaaacatacagtgcgtcctattgagtcactgctaatttcttgagcctggtatttgctgcctattgtatttgtggttgttgagaggcattttcaaaccctgtataaataatccatgctgttggtcataagttaactgtattaagaacagtaaaataaataaaaaccaatagtactaattttgctttaaaaaaatttctaatttttttcacataaaacaattatcctaaaggttaatagttgatcgaaacagaataatagaaaaattcttctttaatttccattaaaaagcaaatagcattgacacatttaaagcttttcatttaaagtagtggatgtttttgaagtatctaaaatagtagcagaatattttatacttggtccttgcaatggtgtgagttttaatgattgcattatcgtgattggtggttatgagtttcagaaatctatacttggcatccaactcatgagtggattttatataggatggaacaggaaggtatgtcctgtcagtatcttaaccctttcaacaagacatttacctatttgtctttccttacgttctcaaaatattaactcgaattgtaaattaagcaaaaatgtaaaaagtatatgttgatgggacaagaagaatagtatttatttaataaaacatatattatattgaactatgtgttaattcatttgtatcttttaaaaaattatcactgttaaagccattgactcctttagtacactgagaaaaatcttatagtaaaactagcctttcacattaaggttttggtgtgtattttgttaaataactaacatgctgctctattttctgggtgtagaaagtatttggctctaggaaacatttacttgtttgtgaaaacaataccccaaggtaataggaaaagtttgagttaagtgtttttaattcagtcagtgaattcagaataagtacattcatgtataacatagggacagttctgctgctgttatttatatgcaattcttctggtaaatagcaatagaataaaacatatttcaatgtttgtgtataggttttatattattattccactaggaatggcataagaatttatagataaattcttgtaacattaaaggattaaaatgtttttacattgtttttgggtgtctccttcttgtgcccatatctgataagctttatggattattgcatttaattccttttatttggagggttttacttccttgttaacatataaagttataaatgaaggacaaggaggagatggaaaatgtgtatttattgttaattcttaaaatagtgtgtaaataaaataacatcagtgtgctttaaagaaatgtgtatgtagtgccttaatttaaattaaaatatttttgactgttacttgagttcagaattaatgactttgttcatgatttttaaaatgtgtgtgaataaaatctaccaaaaaattcttactgtaattattaaatataaagttcagtgtcactg

SEQ ID NO: 388723 - DNA, 3901 bp, Homo sapiens
  misc_feature (3431)..(3434): n is a, c, g, or t
agcggggagggccccgagcggcgcagatagggacgttggggctgtgccccgcggcgcggcgcctgccactgcgcaggcgcctcaggaagagctcggcatcgcccctcttcctccaggtcccccttccccgcaacttcccacgagtgccaggtgccgcgagcgccgagttccgcgcattggaaagaagcgaccgcggcggctggaaccctgattgctgtccttcaacgtgttcattatgaagttattagtaatacttttgttttctggacttataactggttttagaagtgactcttcctctagtttgccacctaagttactactagtatcctttgatggcttcagagctgattatctgaagaactatgaatttcctcatctccagaattttatcaaagaaggtgttttggtagagcatgttaaaaatgtttttatcacaaaaacatttccaaaccactacagtattgtgacaggcttgtatgaagaaagccatggcattgtggctaattccatgtatgatgcagtcacaaagaaacacttttctgactctaatgacaaggatcctttttggtggaatgaggcagtacctatttgggtgaccaatcagcttcaggaaaacagatcaagtgctgctgctatgtggcctggtactgatgtacccattcacgataccatctcttcctattttatgaattacaactcctcagtgtcatttgaggaaagactaaataatattactatgtggctaaacaattcgaacccaccagtcacctttgcaacactatattgggaagaaccagatgcaagtggccacaaatacggacctgaagataaagaaaacatgagcagagtgttgaaaaaaatagatgatcttatcggtgacttagtccaaagactcaagatgttagggctatgggaaaatcttaatgtgatcattacaagtgatcatgggatgacccagtgttctcaggacagactgataaacctggattcctgcatcgatcattcatactacactcttatagatttgagcccagttgctgcaatacttcccaaaataaatagaacagaggtttataacaaactgaaaaactgtagccctcatatgaatgtttatctcaaagaagacattcctaacagattttattaccaacataatgatcgaattcagcccattattttggttgccgatgaaggctggacaattgtgctaaatgaatcatcacaaaaattaggtgaccatggttatgataattctttgcctagtatgcatccatttctagctgcccacggacctgcatttcacaaaggctacaagcatagcacaattaacattgtggatatttatccaatgatgtgccacatcctgggattaaaaccacatcccaataatgggacctttggtcatactaagtgcttgttagttgaccagtggtgcattaatctcccagaagccatcgcgattgttatcggttcactcttggtgttaaccatgctaacatgcctcataataatcatgcagaatagactttctgtacctcgtccattttctcgacttcagctacaagaagatgatgatgatcctttaattgggtgacatgtgctagggcttatacaaagtgtctttgattaatcacaaaactaagaatacatccaaagaatagtgttgtaactatgaaaaagaatactttgaaagacaaagaacttagactaagcatgttaaaattattactttgttttccttgtgttttgtttcggtgcatttgctaataagataacgctgaccatagtaaaattgttagtaaatcattaggtaacatcttgtggtaggaaatcattaggtaacatcaatcctaactagaaatactaaaaatggcttttgagaaaaatacttcctctgcttgtattttgcgatgaagatgtgatacatctttaaatgaaaatataccaaaatttagtaggcatgtttttctaataaatttatatatttgtaaagaaaacaacagaaatctttatgcaatttgtgaattttgtatattagggaggaaaagcttcctatatttttatatttacctttaattagtttgtatctcaagtaccctcttgaggtaggaaatgctctgtgatggtaaataaaattggagcagacagaaaagatatagcaaatgaagaaatattttaaggaaacctatttgaaaaaaaaagcaaagaccatttgataaaagcctgagttgtcaccattatgtcttaagctgttagtcttaaagattattgttaaaaaattcagaagaaaagagagacaagtgctcttctctctatctatgcttaatgcctttatgtaagttacttagttgtttgcgtgtgcctgtgcaagtgtgtttgtgtgtggttgtgtggacattatgtgatttactatataaggaggtcagagatggactgtggccaggcttccacattcctgaagcacacagatctcaggaaaggttatttttgcacttcatatttgtttactttctcctaactcacaagttaaaatcataacttaatttcattaacttttatcatttaactctctcatgtttgttgtaacctgaggtatccaaatgctacagaaaaatttatgacccaaatacaaatctcaatttgactgggacagaatgaggaatggagatttttgtatttatctttgggactttatgccttactttttaggctatagaatagttaagaaattttaaacaaaatttagtatcttttggtctttcacaccattcatatgttaagtggcagaatagccttagtgctacctccacttttttctccagtatttgcatcacagaaataatccctctgtttaacatgtttgttcagagccaagggtttattgtgaagaactgtcatcctgcctttgctagctggtaccttctagtaatcaaaattaatatgaagaaactaggttgtgacagactagattatatttagtaggggaaaaattgggctcaagaaccattcatcagtacgtgagacaagcagttaatagtatgatctttaaagttttgacaatataaaataaacttggtaactgttttacaaatataaaagtataataaatatgcagcccagttaaatattgattatctgtgatggtaaagaacaacagtggtgccagtcatcaaacatacagtgcgtcctattgagtcactgctaatttcttgagcctggtatttgctgcctattgtatttgtggttgttgagaggcattttcaaaccctgtataaataatccatgctgttggtcataagttaactgtattaagaacagtaaaataaataaaaaccaatagtactaaaaaaaaaaaaaaaaaaaaaaaaaaaaaaaaaaaaaaaaaaaaaaaaaaaaaaaaaaaaaaaaaaaaaaaaaaaaaaaaaaannnnaaaaagggaaaaaaaaaaactccaaacaaaaagtgctgttagcccaatgttatttttatacagataatataaattcttgtaacattaaaggattaaaatgtttttacattgtttttgggtgtctccttcttgtgcccatatctgataagctttatggattattgcatttaattccttttatttggagggttttacttccttgttaacatataaagttataaatgaaggacaaggaggagatggaaaatgtgtatttattgttaattcttaaaatagtgtgtaaataaaataacatcagtgtgctttaaagaaatgtgtatgtagtgccttaatttaaattaaaatatttttgactgttacttgagttcagaattaatgactttgttcatgatttttaaaatgtgtgtgaataaaatctaccaaaaaattcttactgtaattattaaatataaagttcagtgtcactg

SEQ ID NO: 388724 - DNA, 1581 bp, Homo sapiens
agcggggagggccccgagcggcgcagatagggacgttggggctgtgccccgcggcgcggcgcctgccactgcgcaggcgcctcaggaagagctcggcatcgcccctcttcctccaggtcccccttccccgcaacttcccacgagtgccaggtgccgcgagcgccgagttccgcgcattggaaagaagcgaccgcggcggctggaaccctgattgctgtccttcaacgtgttcattatgaagttattagtaatacttttgttttctggacttataactggttttagaagtgactcttcctctagtttgccacctaagttactactagtatcctttgatggcttcagagctgattatctgaagaactatgaatttcctcatctccagaattttatcaaagaaggtgttttggtagagcatgttaaaaatgtttttatcacaaaaacatttccaaaccactacagtattgtgacaggcttgtatgaagaaagccatggcattgtggctaattccatgtatgatgcagtcacaaagaaacacttttctgactctaatgacaaggatcctttttggtggaatgaggcagtacctatttgggtgaccaatcagcttcaggaaaacagatcaagtgctgctgctatgtggcctggtactgatgtacccattcacgataccatctcttcctattttatgaattacaactcctcagtgtcatttgaggaaagactaaataatattactatgtggctaaacaattcgaacccaccagtcacctttgcaacactatattgggaagaaccagatgcaagtggccacaaatacggacctgaagataaagaaaacatgagcagagtgttgaaaaaaatagatgatcttatcggtgacttagtccaaagactcaagatgttagggctatgggaaaatcttaatgtgatcattacaagtgatcatgggatgacccagtgttctcaggacagactgataaacctggattcctgcatcgatcattcatactacactcttatagatttgagcccagttgctgcaatacttcccaaaataaatagaacagaggtttataacaaactgaaaaactgtagccctcatatgaatgtttatctcaaagaagacattcctaacagattttattaccaacataatgatcgaattcagcccattattttggttgccgatgaaggctggacaattgtgctaaatgaatcatcacaaaaatgtaagtatttagttgagatatttctgttgtatcctaggaacaaatcataccttgtgatactgttgtgttaagagggtacttcgatttaaagaagttcacacagaataattagttcaattttcaaccagataattcccaggtcttcatttaatagcaatttacagtaatcacaatttcacctttaaattagaaagtaaatttaagagtgaaggcaaagtcctactttctttccaaaactgcaattactgtcagtaattttcaagattcattctcttgatttatacaaaatagagaagtaaagaaacagtaaaaggggagagattagctaatccttgttcttttgtgtgtt

SEQ ID NO: 388725 - DNA, 214 bp, Homo sapiens
aggcaggaatcatggggggctcctggaggctggaggacaccctcactgaatcacacccaggaatccatttctttctttttttcttttcttttctttcttccttccttccttccttccttccttccttccttccttccttccttttttttttgggagtctctctctgcacttcagcctgggcacattgcaagaccttttctctaaaaaaaaaaaa

SEQ ID NO: 388726 - DNA, 1110 bp, Homo sapiens
tgtgagacttgaatggggaatctgacagaactcagtgttctgaggagtcttgtcaggctgctggaaatttttgatattctaggttagtttacctcaacacatcctatcacaaacagaaggggttggcttatatatgtgaagaagataagagacatgtagataggtgtgcgtagtaagaaacattgcaatggagaaagcatcttaattcttacttatttttcacaggtcatgaacaacactgaagaaacgtcaaagtgaaccaaatcattgtttttattttacaaaggcagaaaatgaaacaccactaggtaaaagaattaaaaatctaatcctttatttcttaaataaaacgcttgtgtaactcgtatcatgaaccataatccattctgctgcaaggtgtgtgtgcttctgtaatgtgcatcagtccatcggcaactgctaagtagggggtgataccagtataattcgaagtcacattggttcaacatgactctccccagaaagctgatgtgctgaagcaaccagaggcaaatgttcacacacctagagagaaaccctaagggatatatgaagatcttatgaaaaaggatgaaaaccctttaaatgcaaggagtagctggcttagtggcttcaaaaccacctcattcctgctgttatctgagaagctgcaagtactgatgaaaaaactgagaagacatttcacctggcaattagaaaaaagcgctgactgatagatacctctgtatcattctttcaatattgatgaaaatgctttctactagaagtgactgatttcaaggatctgtctctcaaaggaagaaacaaaaacccaaaattttgactgcaaaagattgactaattctaggtgcaaataactggaaatttaggattgttattgtactacacaggtcacaaagttccaaacctatttcccttgtaatttttagtgcatgatttttcagaatgcagtttctatctttttaggtgcaatattaagaactgattaggtcagaacaatttagtttctccagttttttctacctaagttacatgggggaaaaaaaagcaatagtaactttaaggaagtatgaaaataaagtcttggagcag

SEQ ID NO: 388727 - DNA, 1289 bp, Homo sapiens
gttgtctgcggtattcaaaaacttttgaaacactgcatgtccaacaaaatttattttttgtgtgaatgtaagtttttattgagggtactgtttttcaaccctactctcttgaccaagaatgaaactatttacaaattaagatgccaacagatcacgaagagccctgtggtcccagtcacaagtcgttttgcctgaatggggggctttgttatgtgatacctactattcccagcccattttgtaggaagtgaactgatgctggcttctctttgtcttattccaagttgggcatgagattttccctgcattagaaggttgttgagacctgaagcctgggaaggtgcgttgaaaactatacaggagctcgttgtgaagaggtttttctcccaggctccagcatccaaactaaaagtaacctgtttgaagcttttgtggcattggcggtcctagtaacacttatcattggagccttctacttcctttgcaggaaaggccactttcagagagccagttcagtccagtatgatatcaacctggtagagacgagcagtaccagtgcccaccacagtcatgaacaacactgaagaaacgtcaaagtgaaccaaatcattgtttttattttacaaaggcagaaaatgaaacaccactaggtaaaagaattaaaaatctaatcctttatttcttaaataaaacgcttgtgtaactcgtatcatgaaccataatccattctgctgcaaggtgtgtgtgcttctgtaatgtgcatcagtccatcggcaactgctaagtagggggtgataccagtataattcgaagtcacattggttcaacatgactctccccagaaagctgatgtgctgaagcaaccagaggcaaatgttcacacacctagagagaaaccctaagggatatatgaagatcttatgaaaaaggatgaaaaccctttaaatgcaaggagtagctggcttagtggcttcaaaaccacctcattcctgctgttatctgagaagctgcaagtactgatgaaaaaactgagaagacatttcacctggcaattagaaaaaagcgctgactgatagatacctctgtatcattctttcaatattgatgaaaatgctttctactagaagtgactgatttcaaggatctgtctctcaaaggaagaaacaaaaacccaaaattttgactgcaaaagattgactaattctaggtgcaaataactggaaatttaggattgttattgtactacacaggtcacaaagttccgttgaagcctcgggatcctctagtca

SEQ ID NO: 388728 - DNA, 1452 bp, Homo sapiens
gttgtctgcggtattcaaaaacttttgaaacactgcatgtccaacaaaatttattttttgtgtgaatgtaagtttttattgagggtactgtttttcaaccctactctcttgaccaagaatgaaactatttacaaattaagatgccaacagatcacgaagagccctgtggtcccagtcacaagtcgttttgcctgaatggggggctttgttatgtgatacctactattcccagcccattttgtaggaagtgaactgatgctggcttctctttgtcttattccaagttgggcatgagattttccctgcattagaaggttgttgagacctgaagcctgggaaggtgcgttgaaaactatacaggagctcgttgtgaagaggtttttctcccaggctccagcatccaaactaaaagtaacctgtttgaagcttttgtggcattggcggtcctagtaacacttatcattggagccttctacttcctttgcaggaaaggccactttcagagagccagttcagtccagtatgatatcaacctggtagagacgagcagtaccagtgcccaccacagtcatgaacaacactgaagaaacgtcaaagtgaaccaaatcattgtttttattttacaaaggcagaaaatgaaacaccactaggtaaaagaattaaaaatctaatcctttatttcttaaataaaacgcttgtgtaactcgtatcatgaaccataatccattctgctgcaaggtgtgtgtgcttctgtaatgtgcatcagtccatcggcaactgctaagtagggggtgataccagtataattcgaagtcacattggttcaacatgactctccccagaaagctgatgtgctgaagcaaccagaggcaaatgttcacacacctagagagaaaccctaagggatatatgaagatcttatgaaaaaggatgaaaaccctttaaatgcaaggagtagctggcttagtggcttcaaaaccacctcattcctgctgttatctgagaagctgcaagtactgatgaaaaaactgagaagacatttcacctggcaattagaaaaaagcgctgactgatagatacctctgtatcattctttcaatattgatgaaaatgctttctactagaagtgactgatttcaaggatctgtctctcaaaggaagaaacaaaaacccaaaattttgactgcaaaagattgactaattctaggtgcaaataactggaaatttaggattgttattgtactacacaggtcacaaagttccaaacctatttcccttgtaatttttagtgcatgatttttcagaatgcagtttctatctttttaggtgcaatattaagaactgattaggtcagaacaatttagtttctccagttttttctacctaagttacatgggggaaaaaaaagcaatagtaactttaaggaagtatgaaaataaagtcttggagcag

SEQ ID NO: 388729 - DNA, 1254 bp, Homo sapiens
gttgtctgcggtattcaaaaacttttgaaacactgcatgtccaacaaaatttattttttgtgtgaatgtaagtttttattgagggtactgtttttcaaccctactctcttgaccaagaatgaaactatttacaaattaagatgccaacagatcacgaagagccctgtggtcccagtcacaagtcgttttgcctgaatggggggctttgttatgtgatacctactattcccagcccattttgtaggaagtgaactgatgctggcttctctttgtcttattccaagttgggcatgagattttccctgcattagaaggttgttgagacctgaagcctgggaaggtgcgttgaaaactatacaggagctcgttgtgaagaggtttttctcccaggctccagcatccaaactaaaagtaacctgtttgaagcttttgtggcattggcggtcctagtaacacttatcattggagccttctacttcctttgcaggaaaggccactttcagagagccagttcagtccagtatgatatcaacctggtagagacgagcagtaccagtgcccaccacagtcatgaacaacactgaagaaacgtcaaagtgaaccaaatcattgtttttattttacaaaggcagaaaatgaaacaccactaggattttcattaagccaactcatacccagtttctacaaatgaaaaccaagtcaatcatctaaaatttcatgatttcttcccatcaagaggatctggagtcttctgttcccattaaaactgaatttatggcagtgcaaacctgggccagactgggtataaaatgacaaaagcatatttatattcttaaaaatttctgcagattgcatagaaagttctcagatttgtggctgggcgcagtggctcatgcctgtaatcccagcactttgggaggccgaggcgggcggatcacaaggtcaggagatcgagaccatcttggctaacacggtgaaaccccgtctctactaaaaatacaaaaaattagccgggcgcggtggcgggcgcctgtagtcccagctactcgggaggctgaggcaggagaatggcgtgaacctgggaggcggagcttgcagtgagccaagattgtgccattgcaatccggcctgggctaaagagcgggactccgtctcaaaaaaaaagaaagttctcagatttgtaaaagtttatttctattgtaattctttgcatgttcactttgttaaatttgcaatataaaccagttgcacgtc

SEQ ID NO: 388730 - DNA, 119 bp, Homo sapiens
gatccacatccctgatgctgaaccagagagccccacatccctcctcccagtacttaggcagcgccttctgtgtgcactgcctcttgccgggcactgggtaggtgcacacgaggaccggg

SEQ ID NO: 388731 - DNA, 1073 bp, Homo sapiens
agtagagacagggtttcacctgttgttcaggctggtctcaaactcctgggctcaaatgatctgtctgtcttggcctcccaaaatgttgggattacaggcatgagccactttttatcatgttctatgaggtgataaaaaataaagtagataaggacatcctaaaacaacatcatactagaaaacagatttattggttatcaaactccattttaaagactttttaaacctaagagctacaactctgaaatatttttgagaataaattatttttaaaagctatatattttttatatacttgcaaggctgacatgggttaattgcaaagcagaaaacagtaattgcctgtaaacagtttgatcactattgttatatcccatgaaaacctaggattgccattaattctctgttcattaccatgtcacttgcaatggcaaagtatttgtataatgcatattttttggtacctctttcctctgtgaaattttgacactattttactttagcaacagatctcttacctgtttattaaagaagtacacttgcacctgttttctgccccacaggtattctcaatgggtgaggtaaatactcatggtgaagtgcttatcccaaaggctaaaaacagaattgtggaataagaatacatgcattctttttgagatttctgtaacagaaatctggtgaaatattagtggagaagtgtaaaaattaatcatctcagtatcactgcacagtaatggatgttaagagtactgaactggtaatcaaaagaactgagtttgaatgtataacctcttatttgctgaacagtgatattcgcttaacatctttgggcttcgctttcctcataaacagataataacttctatcttcctcagaggattgttaggagaatgaaaataacattgccatatatgaaaaaaccttcataatcctcacaaatatgcaaatattagtttgtcactagaggaaggtcttttttctttttgtaatatattaatattcacagtaaactataacagagtttatttaggcatttttggaaattgccacataaaccacatgaagttttt

SEQ ID NO: 388732 - DNA, 721 bp, Homo sapiens
aaaagaaaaaaataataatttttgataaagttataacacatctgtaacctcgaactacaatatttgagtaagagctgccaacagggaagttcaaacaggagtgcagggaaatacctatagacatctgtggctgagaatctcagctaactgggaggccaaggtgggcagatcacgagtcaggagatcgagaccatcctggctaacaacggtgaaatcctgtctctactaaaactacaaaaaaattagctgggcatggtggtgggtgcctgtagtcccagctacctgggaggctgaggcaggagaatggcgtggacccggcaggcggagcttgcagagagccgagatcccgccactgcactccagcctgggtgacagggcgagactccgtctcgaaaaaaaaaaaagtctcaactaaaccaggtagagtacagttcaaagtatgtgacacaatatgagaggcaaaaccacaaaccttgtctagaacaatgagaacaggatgcctggtctttagagggagcttatctggaccttctctgagcccagagaacaggcagggaaggtgaggctgaacaaggaaacacacacatttctgagaagcagtgtatccttgaggaagggtgaaggaaatggatctgaattatgagtaatccagcaattgctgatttctttgaactagagaaaaacgaaggttaaaatagtgtacatacacacacacacaccc

SEQ ID NO: 388733 - DNA, 829 bp, Homo sapiens
gccactagtagccaaattgaaacaggaacccacattcttagcttggcttcagtttctttccgggtcttactgagaggtgaagccaggcttctgggtgggtggggacttggagaacttttctgtctagctaaaggattgtaaacacaccaatcagcactctgtgtcaggctaaaggtttgtaattgtaccattcagggctctgtgtctagctaattgggtggggacttggataacttttgtgtctagctaaaggactgtaaacaccccaatcagcactctgtgtctaactgaaggtttgtaaatgcaccagtcagcactcggtcaaaagggaccaatcagctctcagtaaaatggactaatcagcactctgtaaaatggaccaaactgagctctgtataatggaacaatcaacgctctgtaaaatggaacaatcagcaggacatggatgaggccaaataagggagtaaaacctggccacctaagccagcagtggcaacccgcttcattccccttccatgctgtggaagatttttctcttgctcttcaagataaatcttgctgctcctcactctttggggcagcactgcctttatgagctgtaacactcaccatgaaggtctgcagcttcactcctgaagtctgcgataccacgaacccaccagaaggaagaaactcgacacatccgaacatcagaaggaacaaattccggacacaccatgtttaagaactataaaacacaccatgagggcccgcggcttcattcttgaagtcagtgaggccaagaacccccgaattctggacacagtactgctctggtctgagagagcct

SEQ ID NO: 388734 - DNA, 357 bp, Homo sapiens
aacaaatgtaactgtaatggtataccttctccagaaaagcataccaattctttaaatattaccagagatccacatccagtcagggttctgatttccctcaatgctctcttactattgtgttttgttttgttttgagacagggtctcgctctgctgcccagcctggatggtgtccagtagtgcgatcatgattcactgcagccatgaccactaggctcaggcggtcctctcacctcagcctcctgagtaactgggagtataggcgtgccccaccacacccagctaatttttgtattttttgtagagtgggggtttcaccatcttgcccaagcaggtcttgaatttctgattctgatct

SEQ ID NO: 388735 - DNA, 243 bp, Homo sapiens
tacacatcaggacatccggtgtgaattaagtaggtctccacaggagtctacgcatcaggacacccagtgtgaattaagtaggtctccgcaagggtctacacatgaggacactggtgtgaattaagtaggtctccacaagggtctatacatcaggacaccggtgtgaattaggacaccggtgtgaattaagtaggtctccacaggggtttacacgtcaggacaccggtgtgaattaagtaggtc

SEQ ID NO: 388736 - DNA, 323 bp, Homo sapiens
actcccgggatccctcccgcacgccctccgccctccgcactcctccctccccactcccgcccgctccctttgcttcgcccgccctctcctcctgcccggagccccgcagccgcccagggagccgagcctcgggcgcgtccacgtcctctccagctgaggctcttcccgggtccagcccggacctcatcctcccagcggcggggaccgaccaggctggccggggcggggtgggcactgctgctgccgctacccgagcaggacaataggggctttgtctccacagccggagagggccaatttcacgtttaatttgaggctaattc

SEQ ID NO: 388737 - DNA, 463 bp, Homo sapiens
aattcttttcattgttattataagtgggatcttttgtcattatatttcataatataaaattgactaacttatattaggattttggcctctcttcctgctgacttttcgtagtgttaataatagattttcagctgacactcttgaatattccatgtattacaaccataactttttcaaataatattaattttgccttcttttcatttttttaaactttatttctttctttttcctatttctttgatgagtctattccaacaggactaaattacagggtgatgatagactcctctgtgtcccgttccattctaagaagcattttagtgtttcaccgtggacaatgctgacttctgttttggtgtacgagggtctatatttttaagcacattaaagttgcatctgttcttccactattaagagcttacaacataaatgtatattgaactttattaaatgtcttgaa

SEQ ID NO: 388738 - DNA, 162 bp, Homo sapiens
tgtgcggtgtgtgtgaatgtgtgtatatgtgttgcagtgtgcatctgtgagtgtgagtgcctgtgtgtccatgcaagtgtgtatgcttgtgtctgtgtttacatcaggaaagcaggggagggaggcaggagtgaaccggggaggcctcagactttggggcag

SEQ ID NO: 388739 - DNA, 351 bp, Homo sapiens
gatagatggataatgtttctgatcatattgaggaaaagaatccttgcccttagaagccaagactccattcttaacctcatccccgctttctttaagatggggatagaaatcaggccatgattgaaaagtatgagatgacctgagagatccctgggttcattttgatcaaaagctgggacttcttatatatttctgttatttgcaggaaagacctttctacaaaaatctgtctctctttaaagcaacacagacagtttccttgtgacattaatagcttcttctgtgaatgtgacatatcaggtgataatctcctatccctgccagccacatccccaaaacgagcccatggag

SEQ ID NO: 388740 - DNA, 340 bp, Homo sapiens
aacagacttggaacagccttgggtagttctgatcttttgtgacccagcttcaccttagggatttgctgggagcccagttccaggcaggatggccatgagccagtgtctgtggaggcttcctcaagcctgctctggaagggctggaatttctgccctctcccacggagggaatgacgtggttgaggctggggcagccggcgggctgccagaggaaaaatccctgcctaatgtgcagctgaaacagtgatttctatgaggacttgctcaatcttcaggttgctaaagctgtcacagaaagctgtgtggacccccagctgttttttcttctctattcctgaag

SEQ ID NO: 388741 - DNA, 369 bp, Homo sapiens
gcgatgtaggaactgaaggtccaccaaccaaggaaaccacaccattgcaatccacagtgctgtgcatcttcccattcgctggaaacactgccagcatccgggatgacctactggtctgactcaggttgctgttgcgtctctctccgtgtcgtcggggcacaaacaaggaatctctacggctctcgttatcctcaaaggtgctgtgctcatcatctgcgaagtcgttctcagatcccacatcctttgctcgccctctaaagctgaaaaggcttgttctgctatttcgccttggtgaaaatagggagccacggatgctcaacaaagactagaagtttgaaagagcaaacaaataaagtcatattaatatgg

SEQ ID NO: 388742 - DNA, 793 bp, Homo sapiens
tttggcagagtaagaccaggtgccaatccccgaggtgtgtttctgctgctcttatacaccgaggcagacccatcagcttttgagtgttaattacctcttcctgctgttgtcatctgtacttgggagtacgaggcagaaataagctatcatcttctgcagaagacaattactgaactgattttccagagttggaattaaccttctgtggcctaatcaccttcatttctacttgaatccccggaatagtgaaaacaatgaccattgcgtgctgagtacctgctctgtcctggcatcttacaactctgttccaaagtctgtgctgcttccataggactgttctcacttctttccattttgcaagttctcagcctggcggcagtctccctgcccgagtggatggtgccaccacctcttactgaaggagcggtttctgagggagagtgcctgtgctgtgcagctgtctcccgcgaggcgccctttgacaagtgtgtcttctgtctcccctcaatgacactgtggcttcatggagtctcattgcatgcccagcacttagcacagggcatccctgcatggctgcgttgttccctgcatggctgcatttaggctttccttttcctgcaagtgctgcctcgtctttcctttctctcgtctcagcagcaggaagagcaagttctttctctgcctccccgctgcctggctccttcagctatcaccagccatcccctctacccagccctcactctggtgccacaattgctactttcctggcttcttcacggggacctgacatacc

SEQ ID NO: 388743 - DNA, 366 bp, Homo sapiens
gggagtgagggggaaagtaggtacatgtggtggagaaatggaagctctcccaatggttccatcagttccaccacactggcacagattctagaagtttcctatttctggagtaggacgcagacatgatgcatttcctactaagacagatttctatccaggaaacatcatttcaagttgcagtgccaggctcgaggatccttctccgtcattgcttcaagtgtggtgggttcagtacctcctttaatgtaagagctggcccgtcttccctacctacttgggacactttctagttttgaccttaagtagggtatcaggaaaattccgagaaagggaagacactctttttcctgaattacagaatagacc

SEQ ID NO: 388744 - DNA, 383 bp, Homo sapiens
ccaaaccaacacccgttggtctgggtgactgtgcacacagccagctggactgttttgactgaatcgacctaacacttaagcttattttttaatacattaaatttaatctaataaataattaggggaaaaaggagacgttcaactctgtttgattcaatgaattagctcttgaactaacctaaacggttgtttgaattgtttgacaagttcctttgtgtggtgagtgtgtctgtgtgttttcgtacaacttgcctgtcaatgcagtcaaaactgtgtgcaacatagacacagcttgcaaagtgttctgagaactgattactgtcagatttttttaatccattgagtcccagaggtgccatgtaaatagaaattttaattttatt

SEQ ID NO: 388745 - DNA, 807 bp, Homo sapiens
agaagtaaatgagccaccagataagcaaggaggtaataacagcttaaaccaatagccactcatggaagtcagagccacaagatgtgttgctccctatagaaaataaagataacatcttgacataggtccctgagttatttttcagaaactcagacccccgccaaatggaaagtgccaaccaccatcatcacataagggggaactgaagactgaactctgactgacgttcttcattctaaatttcttcctgaggggcctggagacagtgacacccacatgccaaaccttaacattcctttctgctgatcccaagtttctaggcaaagccttgcttccttaaccaatcgcaaatcaaagaatctccgaatcctgcaaccccacttcaagatatcctgccttttgggaccaaaccaatatataacccccacgtattgatgtatgattttgccaataacttctgctttcctagaatatatctctgcctttaaaaaatcttgcttgtaagccattggggaggtcaggttttaagcaatagctatcttattctacttgcttggtgccctgcaaacaaacacccctacttctcttgctacagacgtcagtgtcggtgtttggctttactgcactgggtgagtgtactcaggttcagtttagtaacaccgcaacttaagaaaaataaacctgggccgggggtggtggctcacgcctgtaatcccagcactttgggaggttgaggagggtggatcacaaggttaagagatcaagaccatcctggccaacatggtgaaacctcatctctactaaaaa

SEQ ID NO: 388746 - DNA, 183 bp, Homo sapiens
ttactaaattttgcaacttaacttttattaataacaagttacttgggatatccccacaacacatgttgacccataaatatacgaccacatcatggttgagagctactggtctaaagaataaacttgcttcttcctgctttatagagttcccgtaaaatacccttcaccctggcccccaggatc

SEQ ID NO: 388747 - DNA, 532 bp, Homo sapiens
aatgggggctcagtcccacaaccatgaagaaatggattctgccaacaaccagagccagcttggaaggagaggtttctccagttgagcttccaggcaaggacagagttggctgaacatttgatgtccaccttagcagagaactctgctaaaacatgctggagttctgacccaaggactgtaagattattttgtattgtttgaagccactaagtttgtgataatttgttatacatcaatagaaaatgaatacagtcacttcaggtgttttctttttgaaggtcagtttgccatttatattttcttagaaatcatctgtttcacctataatcttaactttacttgcatagaattgagcaaagtaatctcatttaaattttcctgaaattttaattttttccccattatcatttttgggtatttgtgtgtgtttttttttaatggccacttaaccatttctgatgaatttatctgtctccacatctatctatatctcttattaattatttccttttggccatgtaaactaaaaata

SEQ ID NO: 388748 - DNA, 783 bp, Homo sapiens
gacactgattaattaaatgccttccaacaagaagctataaccagccagacgtgatggctcacacctgtaaactcagcactttgagaggctgaggtgggagggtcacttgcactaggagtgtgagaccaaccaggttaacattgtaagacctcatctccattaaaaaatttaaaaagtagccaggcatggtggcatgcgcctatagtcgcagctagtttggaggccgaggtagaagtatcacttgagcctgtgagttcaagggtgcagtgagctacagtttcaccactgcactccagcctgagctatagaataagaataagaccctgtctcaaaaaaaaaaaagaaaaagaaagaaactataacccttttaaaaatgctttatattgaattctcagaatcccatgaaaggaaaagcaagtaacagtttctctgatatataaatgaagaaactcagatgaaaaaccaagtcctaatcttaatgtcgtggaaaaggtcagttaagtccgagtgtggtggctcacacctgtaatcccagcactttgggaggccagggtgggtggatcacctgagactggcagttcgagactcacctggccaacatgacgaaaccccatctctactaaaaatacaaaacttagctgggcgtggtggcatgcatctgtaatcccagctactcagaaggctaaggaaggagaataacttgagccctggaggctgaggttgcagtgagctgagactgcgccattgcactccagcctgggcaacagagcaagactccatctc

SEQ ID NO: 388749 - DNA, 457 bp, Homo sapiens
gaaatggaagtctcacattctttgtctcagccctcccaaagctaggaactggacactagaattgctgtgatgtttgctgcagaataatcatgtacctccaaaaccaaatttgccacaagaaacagtacaaatgcagccatcagttctgcttttgtaatgttgtgtgggtgtatcaggtttgtcaaagttagcttggtgtggaatttgaattgtaagggaaactgggatatttgagctttagttatccagccactggcatgctgtaagacatgagaaaggcaatttagaatggagttttcagacaatctacaacgtccacaaggagaaagggggacttcgaccttgcatccagacctgagatagatgaaatgtgggcaaaaaccaaaaacaaaataacagcaacaaagaccctaaagatgtagaaataaaataacagaaatggtctccatttgtgcaa

SEQ ID NO: 388750 - DNA, 438 bp, Homo sapiens
tactacattaaagaacagcactccaggaagaaatgaatagcatcagaaagggtatacatgtacataaacataaaagattatgtattatttaaagtaacaataataacaatgccttgtggagttacatgtagaagtaaaatatatgataatagtagaaatgatgggagcagataaatggacctttactcttgtttaattttttgcattatgaagtgctaaggtactaagtaaggaagattgtaataaattaaggatgaagggtttctagagcagggtttcttaaccttgtcacttttgacttttggggctggataattctttgttgtgtatggctaatctttgtattttaagctgtttaatggtatccctggcccctacccactagatgccagtagcaccttccccaaaatgtgacagccaaaaatatctctagacatg

SEQ ID NO: 388751 - DNA, 433 bp, Homo sapiens
tcacccaaatgtgtgggagtttctccccaccaaccaccagttcttcagtagagatcaactgggagtcctacaatttaactctattctgactctatctacctggagaaagcatcagatcacacaggttaagggctcagtcccacaagacttccccccaatgtcagatgccaatcacaagtagtaggttgtcacacctatacttctgaccaactagctataagttgggggtccacaacccccttctcaggttcagttaatttgctaggtaagctcacagaaccacagaaaacacttgcttatatttaccagtttattatattaatgaaggatgtaattagggacacagatgaaaaacagttggaagagatgcaaagggcagagaatgtggaaagggatacagagcttctgtgtcctctctagatacgccaccctc

SEQ ID NO: 388752 - DNA, 83 bp, Homo sapiens
aaagtgaatagtgcaaaatatacagtgctacaactaaaaatttagaaactgactatatgtaatttatataaaataggatgaaa

SEQ ID NO: 388753 - DNA, 426 bp, Homo sapiens
gatataccatgctaatgtttcatagaatttctcagataagggacaaataccaatctagggctgcctatacaaatgataacaattcctgacaatatgcaacagacagacaagtcaaactatacttcagaaatagttttcaagcttgcaagtctttttttctggaaataccagtttaaagtgaagtctttaatgctctttacatctttgaggaattattagcattatcagaaccagaacgcccacctgttcccagggacaacctcaagaatccaggatgaatatgaagaaaactccattcattcgtctaatcaacattcatcaagtcctttcttatatagggcttggcaataagggatcaataaacaaagtacaatgtgcaactatgatgccacaatatgggcaaagcacattttcaacagaggttaa

SEQ ID NO: 388754 - DNA, 348 bp, Homo sapiens
gtagaacctgaatattttcttctaatggaaataaataacaaatgtataggagccaagtgtttaaatatttgttatttcaaatgtaatagtttatctactgcttatgtttgctaagaccgacatattttatctgctggatacatttgctaggacagcattgacttttgtgcatttattttataattggccatgtactgagctgacttagaccgtgactaataggttttcagatggttcttttgagagttcttgctagtcatttacatcatttttatttctcttttacaatatgtatatttcaatctgcttatatattaacccttctgttggtggttttaatgacatctg

SEQ ID NO: 388755 - DNA, 1123 bp, Homo sapiens
atgtgacacatactataaaaattatgtcaccattcaaaaaatccagatgcatatttgaaggactaagtgggaatgataaagacagaatgtaaacaaagtctccagaagtttagctatgaagtgaaagacatgttaagaatgaccacattttgagaaccatactgctatagatcaatttgtgaaaaattgacatcttttcaatccataagcatactgtatccttttaggtacctaggtcttctttaatttctcttggtaatgttttgtagttttctggatagaggtgttacacatttctcattacatgtatttctaggtacttcattttttttatcctattataattttattttccaattgtgactaatatatggaaatactttcatatatttatctttatctaaatacagttgacccttgaacaatgcgagggttaggggcgctaaccccctatgcagtaaaaaaaaaaatctgtgtataacttttgactccccagaagcttaactactaataacctattgttgaccagaagtcttactgataacataaacagtcaattaacgtatattttatgttatatgtattctatactatattgttacaataaagtaagctaaggaaaaggcaatgttattaagaaaaaataaggaagataaaatatatttactatatattaagtggaagtggactatcataaaggtcttcatccttattgagtaggctgaggaagaggaggggttggtcttgctgtctcaggtggcagaggtgaaagaaaataatgtatataagcagacttgcacaattcaagcctgtattcaagagtcaactgtactttgctatattcatccattaattctaatagtacatcagtaaattaacttggattttctgtgtacacaatcttgtcatttgtgaaaaaggagagttttatctccttctaatcctgtatcttatatggatatatgtatgtgtttgcattgactgggacctctttcacaattgtgaataaaagaagtaatagcagacctctttgtcttattcccaatctgagtacttcactattaaatataaacatcctttgtcattggagaaatgaaaataacattacacatccatcaaaatt

SEQ ID NO: 388756 - DNA, 435 bp, Homo sapiens
gaagggatttctttggggctttgaatttgccacatgcaagataaagttgtagattcagaaaagagagtgaatttgttatctgtgcatacctttcttcaataaaaccgatgggaggatagtctggtctcttacttactcttgattccttccctccacaaaactacaatcccttctatatacagttatgcatcacataatgacatttcagtcaatgacagaccacatatacaactgtggtcccataagattacaatgcagctgaaaaattcctattgcctagtgatgtcctagcctttgcaatgcattactcaggtgtttgtggtgatgctgatataataagcctactgctttgccagttgtataaaatataacagatacagttatgtgcagtacatagcactgaataatgataataaacaactatattactggttt

SEQ ID NO: 388757 - DNA, 404 bp, Homo sapiens
cttgaactcctgacctcaggtgatccccccacctcggcctcccggagtgctgagttacaagcgtgagccacttacacccgaccagtaatgataaattctagaaagcaagggacactaagtcactgagatgctttagtggttattcacactttactttttaaatgaactgttttcagttaaaaaaaaagatgattggttgtgtttgtattttaagttatagctagtgtatttttttaatgagatactccattcctattgaaagcgggtgtattttaacaccatgtgactaatgctacacttgtgaataatctcattttttgaattgaaaatataaatgtttaagttttataatttgccactttgaagttctaatgttactcatttgctcatgttgaacagggatt

SEQ ID NO: 388758 - DNA, 225 bp, Homo sapiens
cactgccatttggaactctttcagtacagtgttttcatatttacttaaggacatcttaaccaaataggctaggaaatagtttgctagtataccattttccacaactctttacatggtttttaagtgtttatgtgtaaatactattctttataaaaggttcagtttcatcacatattggggaccatgatgctttacaaattctgttcaaggtaaagtcttaattgt

SEQ ID NO: 388759 - DNA, 594 bp, Homo sapiens
tcctgcccggaaggatgcatggcccggggtctcctgcacctgagggtgggcgggaggcggccccgcgggttgtgttgctggaaaaaggggtctcgatccagaccccaagagagggttcttgggtctacttcagggaagaattggaggcgagtcacagagcgcagtgaaggaagcaagtttattggaatctactccgttagagagtgcaagtcctcagactgcaggaggaggaactcccgtccttcggtagtgtcactacttagaggcaactgtgaggagctgtgattaatcgtggaatgtgctgatgtgcccactaaagaggaataacgccagaaagtgttccagtacaaccagagaaagagagtccatgagaaatctgcccttgtgaagttggaatcccctcaacctcaccccgctgacttgaatgaagcgactgagacgggctatgatggagcagatccggttgctcgaccttctcccttgcaccaacacatgtagttaatagttactggacatgcatattcagtgggttccaggtaccaaacttgtattgaatggtatgtgccagacaccgtcttgagatctggagaataa

SEQ ID NO: 388760 - DNA, 848 bp, Homo sapiens
tcctgcccggaaggatgcatggcccggggtctcctgcacctgagggtgggcgggaggcggccccgcgggttgtgttgctggaaaaaggggtctcgatccagaccccaagagagggttcttgggtctacttcagggaagaattggaggcgagtcacagagcgcagtgaaggaagcaagtttattggaatctactccgttagagagtgcaagtcctcagactgcaggaggaggaactcccgtccttcggtagtgtcactacttagaggcaactgtgaggagctgtgattaatcgtggaatgtgctgatgtgcccactaaagatgcctggtaagcagtggctcctctaacaagtgggcagcttggaactgggaacgagagagccaccgaaacagaatgagggagacaaagaagtgggcatcacccttaactccacaagggcttcccaagggcgctgtaccgtacgcaggcccaggacgaactttatttctcgccccagcatcgctgtccttgtcggtgagaccctggctttagggcagacaggaccacgtttcataagttcatgctgtcccagcagaggaataacgccagaaagtgttccagtacaaccagagaaagagagtccatgagaaatctgcccttgtgaagttggaatcccctcaacctcaccccgctgacttgaatgaagcgactgagacgggctatgatggagcagatccggttgctcgaccttctcccttgcaccaacacatgtagttaatagttactggacatgcatattcagtgggttccaggtaccaaacttgtattgaatggtatgtgccagacaccgtcttgagatctggagaataa

SEQ ID NO: 388761 - DNA, 472 bp, Homo sapiens
gagagtccatgagaaatctgcccttgtgaagttggaatcccctcaacctcaccccgctgacttgaatgaagcgactgagacgggctatgatggagcagatccggttgctcgaccttctcccttgcaccaacacatgtagttaatagttactggacatgcatattcagtgggttccaggtaccaaacttgtattgaatggtatgtgccagacaccgtcttgagatctggagaataaaaaaataaaaaaataaaaacgagacatccagagcacagtagccttgcggtcttcctggaactagagaaaattcagcccttctgctccttgggaagctatgtttgggaaaaaaaaaaaaaagagagagagagagactccaaagagtttgttattaaatttaagttcaaactaggtgtatatagtacaaaagttcttaccatgcatttaatcttaaaatgtgctgatatctagaaccct

SEQ ID NO: 388762 - DNA, 477 bp, Homo sapiens
gacttggtgggagatgtcctgtatggccataaatattgtgtaattataattgttggtcagcttagaatgcggctattttcagacctttagcattaaccttataggtgccttgtgagtgcctagttactcactttaacatgcagtcgctctagccatgttttattaaaccagatgcctggtaagcagtggctcctctaacaagtgggcagcttggaactgggaacgagagagccaccgaaacagaatgagggagacaaagaagtgggcatcacccttaactccacaagggcttcccaagggcgctgtaccgtacgcaggcccaggacgaactttatttctcgccccagcatcgctgtccttgtcggtgagaccctggctttagggcagacaggaccacgtttcataagttcatgctgtcccagcagaggaataacgccagaaagtgttccagtacaaccagagaaagagagtccatga

SEQ ID NO: 388763 - DNA, 483 bp, Homo sapiens
catttccagtcatgcctgcaaagattgagtggactttaccctctccccagcagtaatgaagcaccccctctctttccctgctctacggtactgtcccagaagaggctgagtagagagcgaagactttcatcactgccctgcagtaatggggccaccatcaccactacccccatattatcagtaaaggtcatgtggggagaagtagcaagggactcaccacttgtcccagccaagatggtaacagtggaagcctagtacagagtcagaattccttcccctacccagcagctatgaggagccccttcatcccttgggtgtcaacagaagtcaaatgggtaacttagactctaccctacgtggccatagtgaaaaaaacatctaaaacataaagtttaagtaagatccagaatctcataacataatactcaaactgtccatgttttagttgcaaatcacttgtctaacaaaatctcaacttgactg

SEQ ID NO: 388764 - DNA, 1888 bp, Homo sapiens
ggaagaacccgcagcagctcccaggatgaactggttgcagtggctgctgctgctgcgggggcgctgagaggacacgagctctatgcctttccggctgctcatcccgctcggcctcctgtgcgcgctgctgcctcagcaccatggtgcgccaggtcccgacggctccgcgccagatcccgcccactacagggagcgagtcaaggccatgttctaccacgcctacgacagctacctggagaatgcctttcccttcgatgagctgcgacctctcacctgtgacgggcacgacacctggggcagtttttctctgactctaattgatgcactggacaccttgctgattttggggaatgtctcagaattccaaagagtggttgaagtgctccaggacagcgtggactttgatattgatgtgaacgcctctgtgtttgaaacaaacattcgagtggtaggaggactcctgtctgctcatctgctctccaagaaggctggggtggaagtagaggctggatggccctgttccgggcctctcctgagaatggctgaggaggcggcccgaaaactcctcccagcctttcagacccccactggcatgccatatggaacagtgaacttacttcatggcgtgaacccaggagagacccctgtcacctgtacggcagggattgggaccttcattgttgaatttgccaccctgagcagcctcactggtgacccggtgttcgaagatgtggccagagtggctttgatgcgcctctgggagagccggtcagatatcgggctggtcggcaaccacattgatgtgctcactggcaagtgggtggcccaggacgcaggcatcggggctggcgtggactcctactttgagtacttggtgaaaggagccatcctgcttcaggataagaagctcatggccatgttcctagagtataacaaagccatccggaactacacccgcttcgatgactggtacctgtgggttcagatgtacaaggggactgtgtccatgccagtcttccagtccttggaggcctactggcctggtcttcagagcctcattggagacattgacaatgccatgaggaccttcctcaactactacactgtatggaagcagtttggggggctcccggaattctacaacattcctcagggatacacagtggagaagcgagagggctacccacttcggccagaacttattgaaagcgcaatgtacctctaccgtgccacgggggatcccaccctcctagaactcggaagagatgctgtggaatccattgaaaaaatcagcaaggtggagtgcggatttgcaacaatcaaagatctgcgagaccacaagctggacaaccgcatggagtcgttcttcctggccgagactgtgaaatacctctacctcctgtttgacccaaccaacttcatccacaacaatgggtccaccttcgacgcggtgatcaccccctatggggagtgcatcctgggggctggggggtacatcttcaacacagaagctcaccccatcgaccctgccgccctgcactgctgccagaggctgaaggaagagcagtgggaggtggaggacttgatgagggaattctactctctcaaacggagcaggtcgaaatttcagaaaaacactgttagttcggggccatgggaacctccagcaaggccaggaacactcttctcaccagaaaaccatgaccaggcaagggagaggaagcctgccaaacagaaggtcccacttctcagctgccccagtcagcccttcacctccaagttggcattactgggacaggttttcctagactcctcataaccactggataatttttttatttttatttttttgaggctaaactataataaattgcttttggctatcata

SEQ ID NO: 388765 - DNA, 2185 bp, Homo sapiens
ggaagaacccgcagcagctcccaggatgaactggttgcagtggctgctgctgctgcgggggcgctgagaggacacgagctctatgcctttccggctgctcatcccgctcggcctcctgtgcgcgctgctgcctcagcaccatggtgcgccaggtcccgacggctccgcgccagatcccgcccactacagggagcgagtcaaggccatgttctaccacgcctacgacagctacctggagaatgcctttcccttcgatgagctgcgacctctcacctgtgacgggcacgacacctggggcagtttttctctgactctaattgatgcactggacaccttgctgattttggggaatgtctcagaattccaaagagtggttgaagtgctccaggacagcgtggactttgatattgatgtgaacgcctctgtgtttgaaacaaacattcgagtggtaggaggactcctgtctgctcatctgctctccaagaaggctggggtggaagtagaggctggatggccctgttccgggcctctcctgagaatggctgaggaggcggcccgaaaactcctcccagcctttcagacccccactggcatgccatatggaacagtgaacttacttcatggcgtgaacccaggagagacccctgtcacctgtacggcagggattgggaccttcattgttgaatttgccaccctgagcagcctcactggtgacccggtgttcgaagatgtggccagagtggctttgatgcgcctctgggagagccggtcagatatcgggctggtcggcaaccacattgatgtgctcactggcaagtgggtggcccaggacgcaggcatcggggctggcgtggactcctactttgagtacttggtgaaaggagccatcctgcttcaggataagaagctcatggccatgttcctagagtataacaaagccatccggaactacacccgcttcgatgactggtacctgtgggttcagatgtacaaggggactgtgtccatgccagtcttccagtccttggaggcctactggcctggtcttcagagcctcattggagacattgacaatgccatgaggaccttcctcaactactacactgtatggaagcagtttggggggctcccggaattctacaacattcctcagggatacacagtggagaagcgagagggctacccacttcggccagaacttattgaaagcgcaatgtacctctaccgtgccacgggggatcccaccctcctagaactcggaagagatgctgtggaatccattgaaaaaatcagcaaggtggagtgcggatttgcaacaatcaaagatctgcgagaccacaagctggacaaccgcatggagtcgttcttcctggccgagactgtgaaatacctctacctcctgtttgacccaaccaacttcatccacaacaatgggtccaccttcgacgcggtgatcaccccctatggggagtgcatcctgggggctggggggtacatcttcaacacagaagctcaccccatcgaccctgccgccctgcactgctgccagaggctgaaggaagagcagtgggaggtggaggacttgatgagggaattctactctctcaaacggagcaggtcgaaatttcagaaaaacactgttagttcggggccatgggaacctccagcaaggccaggaacactcttctcaccagaaaaccatgaccaggcaagggagaggaagcctgccaaacagaaggtcccacttctcagctgccccagtcagcccttcacctccaagttggcattactgggacaggttttcctagactcctcataaccactggataatttttttatttttatttttttgaggctaaactataataaattgcttttggctatcataaaaaaaaaaaaaaaaaaaaaaaaaaaaaaacttcggagaattgggaagagagagagaaactgattctctcgagagggctttagtgggggggtgcggggaaaagagagaggtaggaaagggcccaaggggcgcaatacgcgtgtgttcccggggaccccacggttttttctcggtgtccaagagggggtagacactctggcgcggggtttccccctatatgggggggctggcgcgtataacatttcgcgaataaagcccgagggttaacgcggggtttaaggaaccgcgggggggaaa

SEQ ID NO: 388766 - DNA, 1766 bp, Homo sapiens
ggaagaacccgcagcagctcccaggatgaactggttgcagtggctgctgctgctgcgggggcgctgagaggacacgagctctatgcctttccggctgctcatcccgctcggcctcctgtgcgcgctgctgcctcagcaccatggtgcgccaggtcccgacggctccgcgccagatcccgcccactacagggagcgagtcaaggccatgttctaccacgcctacgacagctacctggagaatgcctttcccttcgatgagctgcgacctctcacctgtgacgggcacgacacctggggcagtttttctctgactctaattgatgcactggacaccttgctgattttggggaatgtctcagaattccaaagagtggttgaagtgctccaggacagcgtggactttgatattgatgtgaacgcctctgtgtttgaaacaaacattcgagtggtaggaggactcctgtctgctcatctgctctccaagaaggctggggtggaagtagaggctggatggccctgttccgggcctctcctgagaatggctgaggaggcggcccgaaaactcctcccagcctttcagacccccactggcatgccatatggaacagtgaacttacttcatggcgtgaacccaggagagacccctgtcacctgtacggcagggattgggaccttcattgttgaatttgccaccctgagcagcctcactggtgacccggtgttcgaagatgtggccagagtggctttgatgcgcctctgggagagccggtcagatatcgggctggtcggcaaccacattgatgtgctcactggcaagtgggtggcccaggacgcaggcatcggggctggcgtggactcctactttgagtacttggtgaaaggagccatcctgcttcaggataagaagctcatggccatgttcctagagtataacaaagccatccggaactacacccgcttcgatgactggtacctgtgggttcagatgtacaaggggactgtgtccatgccagtcttccagtccttggaggcctactggcctggtcttcagagcctcattggagacattgacaatgccatgaggaccttcctcaactactacactgtatggaagcagtttggggggctcccggaattctacaacattcctcagggatacacagtggagaagcgagagggctacccacttcggccagatcaaagatctgcgagaccacaagctggacaaccgcatggagtcgttcttcctggccgagactgtgaaatacctctacctcctgtttgacccaaccaacttcatccacaacaatgggtccaccttcgacgcggtgatcaccccctatggggagtgcatcctgggggctggggggtacatcttcaacacagaagctcaccccatcgaccctgccgccctgcactgctgccagaggctgaaggaagagcagtgggaggtggaggacttgatgagggaattctactctctcaaacggagcaggtcgaaatttcagaaaaacactgttagttcggggccatgggaacctccagcaaggccaggaacactcttctcaccagaaaaccatgaccaggcaagggagaggaagcctgccaaacagaaggtcccacttctcagctgccccagtcagcccttcacctccaagttggcattactgggacaggttttcctagactcctcataaccactggataatttttttatttttatttttttgaggctaaactataataaattgcttttggctatcata

SEQ ID NO: 388767 - DNA, 1611 bp, Homo sapiens
  misc_feature (1458)..(1458): n is a, c, g, or t
  misc_feature (1466)..(1467): n is a, c, g, or t
  misc_feature (1469)..(1469): n is a, c, g, or t
  misc_feature (1482)..(1482): n is a, c, g, or t
ggaagaacccgcagcagctcccaggatgaactggttgcagtggctgctgctgctgcgggggcgctgagaggacacgagctctatgcctttccggctgctcatcccgctcggcctcctgtgcgcgctgctgcctcagcaccatggtgcgccaggtcccgacggctccgcgccagatcccgcccactacagggagcgagtcaaggccatgttctaccacgcctacgacagctacctggagaatgcctttcccttcgatgagctgcgacctctcacctgtgacgggcacgacacctggggcagtttttctctgactctaattgatgcactggacaccttgctgattttggggaatgtctcagaattccaaagagtggttgaagtgctccaggacagcgtggactttgatattgatgtgaacgcctctgtgtttgaaacaaacattcgagtggtaggaggactcctgtctgctcatctgctctccaagaaggctggggtggaagtagaggctggatggccctgttccgggcctctcctgagaatggctgaggaggcggcccgaaaactcctcccagcctttcagacccccactggcatgccatatggaacagtgaacttacttcatggcgtgaacccaggagagacccctgtcacctgtacggcagggattgggaccttcattgttgaatttgccaccctgagcagcctcactggtgacccggtgttcgaagatgtggccagagtggctttgatgcgcctctgggagagccggtcagatatcgggctggtcggcaaccacattgatgtgctcactggcaagtgggtggcccaggacgcaggcatcggggctggcgtggactcctactttgagtacttggtgaaaggagccatcctgcttcaggataagaagctcatggccatgttcctagagtataacaaagccatccggaactacacccgcttcgatgactggtacctgtgggttcagatgtacaaggggactgtgtccatgccagtcttccagtccttggaggcctactggcctggtcttcagagcctcattggagacattgacaatgccatgaggaccttcctcaactactacactgtatggaagcagtttggggggctcccggaattctacaacattcctcagggatacacagtggagaagcgagagggctacccacttcggccagaacttattgaaagcgcaatgtacctctaccgtgccacgggggatcccaccctcctagaactcggaagagatgctgtggaatccattgaaaaaatcagcaaggtggagtgcggatttgcaacaatcaaagatctgcgagaccacaagctggacaaccgcatggagtcgttcttcctggccgagactgtgaaatacctctacctcctgtttgacccaaccaacttcatccacaacaatgggtccaccttcgacgcggttccccngggggggnncngggggggggggcntttacaaaacaccacaacagggccgcaggcagacaagaacggggggcacgaacacccacgaggggaaagggcgaccgcgaagccccaacaggagagggccgccccagagccaaaaacactaacgtaccg

SEQ ID NO: 388768 - DNA, 1777 bp, Homo sapiens
ggaagaacccgcagcagctcccaggatgaactggttgcagtggctgctgctgctgcgggggcgctgagaggacacgagctctatgcctttccggctgctcatcccgctcggcctcctgtgcgcgctgctgcctcagcaccatggtgcgccaggtcccgacggctccgcgccagatcccgcccactacagtttttctctgactctaattgatgcactggacaccttgctgattttggggaatgtctcagaattccaaagagtggttgaagtgctccaggacagcgtggactttgatattgatgtgaacgcctctgtgtttgaaacaaacattcgagtggtaggaggactcctgtctgctcatctgctctccaagaaggctggggtggaagtagaggctggatggccctgttccgggcctctcctgagaatggctgaggaggcggcccgaaaactcctcccagcctttcagacccccactggcatgccatatggaacagtgaacttacttcatggcgtgaacccaggagagacccctgtcacctgtacggcagggattgggaccttcattgttgaatttgccaccctgagcagcctcactggtgacccggtgttcgaagatgtggccagagtggctttgatgcgcctctgggagagccggtcagatatcgggctggtcggcaaccacattgatgtgctcactggcaagtgggtggcccaggacgcaggcatcggggctggcgtggactcctactttgagtacttggtgaaaggagccatcctgcttcaggataagaagctcatggccatgttcctagagtataacaaagccatccggaactacacccgcttcgatgactggtacctgtgggttcagatgtacaaggggactgtgtccatgccagtcttccagtccttggaggcctactggcctggtcttcagagcctcattggagacattgacaatgccatgaggaccttcctcaactactacactgtatggaagcagtttggggggctcccggaattctacaacattcctcagggatacacagtggagaagcgagagggctacccacttcggccagaacttattgaaagcgcaatgtacctctaccgtgccacgggggatcccaccctcctagaactcggaagagatgctgtggaatccattgaaaaaatcagcaaggtggagtgcggatttgcaacaatcaaagatctgcgagaccacaagctggacaaccgcatggagtcgttcttcctggccgagactgtgaaatacctctacctcctgtttgacccaaccaacttcatccacaacaatgggtccaccttcgacgcggtgatcaccccctatggggagtgcatcctgggggctggggggtacatcttcaacacagaagctcaccccatcgaccctgccgccctgcactgctgccagaggctgaaggaagagcagtgggaggtggaggacttgatgagggaattctactctctcaaacggagcaggtcgaaatttcagaaaaacactgttagttcggggccatgggaacctccagcaaggccaggaacactcttctcaccagaaaaccatgaccaggcaagggagaggaagcctgccaaacagaaggtcccacttctcagctgccccagtcagcccttcacctccaagttggcattactgggacaggttttcctagactcctcataaccactggataatttttttatttttatttttttgaggctaaactataataaattgcttttggctatcata

SEQ ID NO: 388769 - DNA, 2494 bp, Homo sapiens
gtgttgggattacaggcgtgagccacggcgcccggtctagttctcacagttttcacccgacttctgcgccggtcttctctggccttgaaaggcagagagtccgttccgattttcccctgagctgggcaagtcccctgtgagagctctggggcatctggcttcggggcattctttgactaaggtggatggaggttgcaggtcttttcctgggtgggcgtggggcggggcagcgggttcccagcgtcctcctggcctgggcgtcttggaggctgttggggcgcattccgtccccttgcgcggggcggggccttgaggcgctggggcgggattggcgggggacggtcgcggagccccgccccgaagcacagggtcgagtcccttctttccgctccaacgcacggagggtgaggtcggtacgcggtggtggcgtcacggcgccagctcctcccgacgccgaggtgggttccgggagacccgcgggtctggctgcgagagttgttccctgcctgtcccagggagcctgcccttggccaaaatgagaaaaaacaaggatgatgacaggggacacagcggacccacatgggcacctctgggacaagagattttgcttgagacagctcccagggcagcaggagtccctgtctgtgctacaggattgggtaactcaaggcgtccctggagtacactgaggataagtgtttgagaaatgctgtctgaaggaatgaagtcagtctatgacaacgtctctctgccgtgaatcattcctgcagatgaaaaagtgtgacttggcagctgggagcgagtcaaggccatgttctaccacgcctacgacagctacctggagaatgcctttcccttcgatgagctgcgacctctcacctgtgacgggcacgacacctggggcagtttttctctgactctaattgatgcactggacaccttgctgattttggggaatgtctcagaattccaaagagtggttgaagtgctccaggacagcgtggactttgatattgatgtgaacgcctctgtgtttgaaacaaacattcgagtggtaggaggactcctgtctgctcatctgctctccaagaaggctggggtggaagtagaggctggatggccctgttccgggcctctcctgagaatggctgaggaggcggcccgaaaactcctcccagcctttcagacccccactggcatgccatatggaacagtgaacttacttcatggcgtgaacccaggagagacccctgtcacctgtacggcagggattgggaccttcattgttgaatttgccaccctgagcagcctcactggtgacccggtgttcgaagatgtggccagagtggctttgatgcgcctctgggagagccggtcagatatcgggctggtcggcaaccacattgatgtgctcactggcaagtgggtggcccaggacgcaggcatcggggctggcgtggactcctactttgagtacttggtgaaaggagccatcctgcttcaggataagaagctcatggccatgttcctagagtataacaaagccatccggaactacacccgcttcgatgactggtacctgtgggttcagatgtacaaggggactgtgtccatgccagtcttccagtccttggaggcctactggcctggtcttcagagcctcattggagacattgacaatgccatgaggaccttcctcaactactacactgtatggaagcagtttggggggctcccggaattctacaacattcctcagggatacacagtggagaagcgagagggctacccacttcggccagaacttattgaaagcgcaatgtacctctaccgtgccacgggggatcccaccctcctagaactcggaagagatgctgtggaatccattgaaaaaatcagcaaggtggagtgcggatttgcaacaatcaaagatctgcgagaccacaagctggacaaccgcatggagtcgttcttcctggccgagactgtgaaatacctctacctcctgtttgacccaaccaacttcatccacaacaatgggtccaccttcgacgcggtgatcaccccctatggggagtgcatcctgggggctggggggtacatcttcaacacagaagctcaccccatcgaccctgccgccctgcactgctgccagaggctgaaggaagagcagtgggaggtggaggacttgatgagggaattctactctctcaaacggagcaggtcgaaatttcagaaaaacactgttagttcggggccatgggaacctccagcaaggccaggaacactcttctcaccagaaaaccatgaccaggcaagggagaggaagcctgccaaacagaaggtcccacttctcagctgccccagtcagcccttcacctccaagttggcattactgggacaggttttcctagactcctcataaccactggataatttttttatttttatttttttgaggctaaactataataaattgcttttggctatcata

SEQ ID NO: 388770 - DNA, 1848 bp, Homo sapiens
ggaagaacccgcagcagctcccaggatgaactggttgcagtggctgctgctgctgcgggggcgctgagaggacacgagctctatgcctttccggctgctcatcccgctcggcctcctgtgcgcgctgctgcctcagcaccatggtgcgccaggtcccgacggctccgcgccagatcccgcccactacagggagcgagtcaaggccatgttctaccacgcctacgacagctacctggagaatgcctttcccttcgatgagctgcgacctctcacctgtgacgggcacgacacctggggcagattttggggaatgtctcagaattccaaagagtggttgaagtgctccaggacagcgtggactttgatattgatgtgaacgcctctgtgtttgaaacaaacattcgagtggtaggaggactcctgtctgctcatctgctctccaagaaggctggggtggaagtagaggctggatggccctgttccgggcctctcctgagaatggctgaggaggcggcccgaaaactcctcccagcctttcagacccccactggcatgccatatggaacagtgaacttacttcatggcgtgaacccaggagagacccctgtcacctgtacggcagggattgggaccttcattgttgaatttgccaccctgagcagcctcactggtgacccggtgttcgaagatgtggccagagtggctttgatgcgcctctgggagagccggtcagatatcgggctggtcggcaaccacattgatgtgctcactggcaagtgggtggcccaggacgcaggcatcggggctggcgtggactcctactttgagtacttggtgaaaggagccatcctgcttcaggataagaagctcatggccatgttcctagagtataacaaagccatccggaactacacccgcttcgatgactggtacctgtgggttcagatgtacaaggggactgtgtccatgccagtcttccagtccttggaggcctactggcctggtcttcagagcctcattggagacattgacaatgccatgaggaccttcctcaactactacactgtatggaagcagtttggggggctcccggaattctacaacattcctcagggatacacagtggagaagcgagagggctacccacttcggccagaacttattgaaagcgcaatgtacctctaccgtgccacgggggatcccaccctcctagaactcggaagagatgctgtggaatccattgaaaaaatcagcaaggtggagtgcggatttgcaacaatcaaagatctgcgagaccacaagctggacaaccgcatggagtcgttcttcctggccgagactgtgaaatacctctacctcctgtttgacccaaccaacttcatccacaacaatgggtccaccttcgacgcggtgatcaccccctatggggagtgcatcctgggggctggggggtacatcttcaacacagaagctcaccccatcgaccctgccgccctgcactgctgccagaggctgaaggaagagcagtgggaggtggaggacttgatgagggaattctactctctcaaacggagcaggtcgaaatttcagaaaaacactgttagttcggggccatgggaacctccagcaaggccaggaacactcttctcaccagaaaaccatgaccaggcaagggagaggaagcctgccaaacagaaggtcccacttctcagctgccccagtcagcccttcacctccaagttggcattactgggacaggttttcctagactcctcataaccactggataatttttttatttttatttttttgaggctaaactataataaattgcttttggctatcata

SEQ ID NO: 388771 - DNA, 2158 bp, Homo sapiens
gtgttgggattacaggcgtgagccacggcgcccggtctagttctcacagttttcacccgacttctgcgccggtcttctctggccttgaaaggcagagagtccgttccgattttcccctgagctgggcaagtcccctgtgagagctctggggcatctggcttcggggcattctttgactaaggtggatggaggttgcaggtcttttcctgggtgggcgtggggcggggcagcgggttcccagcgtcctcctggcctgggcgtcttggaggctgttggggcgcattccgtccccttgcgcggggcggggccttgaggcgctggggcgggattggcgggggacggtcgcggagccccgccccgaagcacagggtcgagtcccttctttccgctccaacgcacggagggtgaggtcggtacgcggtggtggcgtcacggcgccagctcctcccgacgccgaggtgggttccgggagacccgcgggtctggctgcgagaggtgagggcagagccggggcggggccctagcggggtgtcccggcgacccagaccttaaagggcttctcttcttgcagaccatgggggctcagctaagcggcggccgcggcgccccggagcctgcgcaaacccagccccagccccagccccagcctgcggcgccggagggcccggaacagccccggcatccgccccagccccagccccagccccagccccagccccagcccgagcccagcccgtgggggccgctggacgacgtgcgcttcctcatcgcctgcacttcctggtactgacggcgtcctccgcaggatgtcgcccgtctgtccgccgtcccctgtggttcttgcctgccttgtctcctctccccacgtccctgcgtctcttacaccccctcccacccgaggctccccagagatagcagagaattcgaagaggtcgccggggactggaaagaagtcccggcagggccgccttcgcagtctacaccccagcctgcttcccagcctacacccagacccagctcagaccttcgtgaccaccccatccctttctccggctggctgggtcgggggcatccctctctgtcgctggcttccagaggcaggacaggcctcctggtaagcccgcaaagttgctgacctcctgacttcgtctgccttttattaatatctgtattgctgataaccgtgctcttgactatgtgtcccaggtcatgtcccaggtcatggagaagcccgtgccacagtgaccctccccatactcctgggggggctgctctccatcctggatcgtaaggaggcatcatcaggctgtgttcctggaaccccaataaccctgggcccccagggccagcctgttgtagagggaggctatctgaccgccggtctggcagaggagatgggtgggcagctcccagacaccccaaaggacccggttctcttcccagagcgtcctaaggttactcttggaacctgatctttgttccctcatcccagggaaatgacacactctgtatttctgttttatttagaaatgatttaaaaaacattatacaaaggctgatcagtttaaaatgtgactgacactgaaatgctgtgatgtcccccaggctgaggggaagctaggctctggggcccccagtgctttgcccctctgtctgccctgtcctggggtgatggacaaacagatgaccacaggcaggagaatctgagattggaagcctctaggctgagccctctgggcctggccccacatccctcacctctgcagcctgggctgcctgcctccatctcctgttcattctcagctggcctgccaggagccaacggggagcctggcgggaggcgggggtgcctagagctttcaagaagtgagagcaccaacctgaggagtggacagggaccaggaagtgggggaagggaggccaggaagaggtggatacaggagacacttctcatctcatctcagaccctagaggggtccacagatggggacacaagacccagccagcccactggatggcccgggcaagtaacaacctctctgtgcttcatctgagggcacggtgagagttaccgtcggcctcccagggcctaacacgagtttcatgtgagtggacaggtgtgagctaataaagtgctttgcaaagtataaaaaaaaaa

SEQ ID NO: 388772 - DNA, 2082 bp, Homo sapiens
gtgttgggattacaggcgtgagccacggcgcccggtctagttctcacagttttcacccgacttctgcgccggtcttctctggccttgaaaggcagagagtccgttccgattttcccctgagctgggcaagtcccctgtgagagctctggggcatctggcttcggggcattctttgactaaggtggatggaggttgcaggtcttttcctgggtgggcgtggggcggggcagcgggttcccagcgtcctcctggcctgggcgtcttggaggctgttggggcgcattccgtccccttgcgcggggcggggccttgaggcgctggggcgggattggcgggggacggtcgcggagccccgccccgaagcacagggtcgagtcccttctttccgctccaacgcacggagggtgaggtcggtacgcggtggtggcgtcacggcgccagctcctcccgacgccgaggtgggttccgggagacccgcgggtctggctgcgagagaccatgggggctcagctaagcggcggccgcggcgccccggagcctgcgcaaacccagccccagccccagccccagcctgcggcgccggagggcccggaacagccccggcatccgccccagccccagccccagccccagccccagccccagcccgagcccagcccgtgggggccgctggacgacgtgcgcttcctcatcgcctgcacttcctggtactgacggcgtcctccgcaggatgtcgcccgtctgtccgccgtcccctgtggttcttgcctgccttgtctcctctccccacgtccctgcgtctcttacaccccctcccacccgaggctccccagagatagcagagaattcgaagaggtcgccggggactggaaagaagtcccggcagggccgccttcgcagtctacaccccagcctgcttcccagcctacacccagacccagctcagaccttcgtgaccaccccatccctttctccggctggctgggtcgggggcatccctctctgtcgctggcttccagaggcaggacaggcctcctggtaagcccgcaaagttgctgacctcctgacttcgtctgccttttattaatatctgtattgctgataaccgtgctcttgactatgtgtcccaggtcatgtcccaggtcatggagaagcccgtgccacagtgaccctccccatactcctgggggggctgctctccatcctggatcgtaaggaggcatcatcaggctgtgttcctggaaccccaataaccctgggcccccagggccagcctgttgtagagggaggctatctgaccgccggtctggcagaggagatgggtgggcagctcccagacaccccaaaggacccggttctcttcccagagcgtcctaaggttactcttggaacctgatctttgttccctcatcccagggaaatgacacactctgtatttctgttttatttagaaatgatttaaaaaacattatacaaaggctgatcagtttaaaatgtgactgacactgaaatgctgtgatgtcccccaggctgaggggaagctaggctctggggcccccagtgctttgcccctctgtctgccctgtcctggggtgatggacaaacagatgaccacaggcaggagaatctgagattggaagcctctaggctgagccctctgggcctggccccacatccctcacctctgcagcctgggctgcctgcctccatctcctgttcattctcagctggcctgccaggagccaacggggagcctggcgggaggcgggggtgcctagagctttcaagaagtgagagcaccaacctgaggagtggacagggaccaggaagtgggggaagggaggccaggaagaggtggatacaggagacacttctcatctcatctcagaccctagaggggtccacagatggggacacaagacccagccagcccactggatggcccgggcaagtaacaacctctctgtgcttcatctgagggcacggtgagagttaccgtcggcctcccagggcctaacacgagtttcatgtgagtggacaggtgtgagctaataaagtgctttgcaaagtataaaaaaaaaa

SEQ ID NO: 388773 - DNA, 1408 bp, Homo sapiens
ggaagaacccgcagcagctcccaggatgaactggttgcagtggctgctgctgctgcgggggcgctgagaggacacgagctctatgcctttccggctgctcatcccgctcggcctcctgtgcgcgctgctgcctcagcaccatggtgcgccaggtcccgacggctccgcgccagatcccgcccactacagggagcgagtcaaggccatgttctaccacgcctacgacagctacctggagaatgcctttcccttcgatgagctgcgacctctcacctgtgacgggcacgacacctggggcagtttttctctgactctaattgatgcactggacaccttgctgattttggggaatgtctcagaattccaaagagtggttgaagtgctccaggacagcgtggactttgatattgatgtgaacgcctctgtgtttgaaacaaacattcgagagtataacaaagccatccggaactacacccgcttcgatgactggtacctgtgggttcagatgtacaaggggactgtgtccatgccagtcttccagtccttggaggcctactggcctggtcttcagagcctcattggagacattgacaatgccatgaggaccttcctcaactactacactgtatggaagcagtttggggggctcccggaattctacaacattcctcagggatacacagtggagaagcgagagggctacccacttcggccagaacttattgaaagcgcaatgtacctctaccgtgccacgggggatcccaccctcctagaactcggaagagatgctgtggaatccattgaaaaaatcagcaaggtggagtgcggatttgcaacaatcaaagatctgcgagaccacaagctggacaaccgcatggagtcgttcttcctggccgagactgtgaaatacctctacctcctgtttgacccaaccaacttcatccacaacaatgggtccaccttcgacgcggtgatcaccccctatggggagtgcatcctgggggctggggggtacatcttcaacacagaagctcaccccatcgaccctgccgccctgcactgctgccagaggctgaaggaagagcagtgggaggtggaggacttgatgagggaattctactctctcaaacggagcaggtcgaaatttcagaaaaacactgttagttcggggccatgggaacctccagcaaggccaggaacactcttctcaccagaaaaccatgaccaggcaagggagaggaagcctgccaaacagaaggtcccacttctcagctgccccagtcagcccttcacctccaagttggcattactgggacaggttttcctagactcctcataaccactggataatttttttatttttatttttttgaggctaaactataataaattgcttttggctatcata

SEQ ID NO: 388774 - DNA, 543 bp, Homo sapiens
  misc_feature (35)..(37): n is a, c, g, or t
gacccgatatgatccccgcgaatcctcctcctccnnngcgaatacctctacctcctgtttgacccaaccaacttcatccacaacaatgggtccaccttcgacgcggtgatcaccccctatggggagtgcatcctgggggctggggggtacatcttcaacacagaagctcaccccatcgaccctgccgccctgcactgctgccagaggctgaaggaagagcagtgggaggtggaggacttgatgagggaattctactctctcaaacggagcaggtcgaaatttcagaaaaacactgttagttcggggccatgggaacctccagcaaggccaggaacactcttctcaccagaaaaccatgaccaggcaagggagaggaagcctgccaaacagaaggtcccacttctcagctgccccagtcagcccttcacctccaagttggcattactgggacaggttttcctagactcctcataaccactggataatttttttatttttatttttttgaggctaaactataataaattgcttttggctatcata

SEQ ID NO: 388775 - DNA, 317 bp, Homo sapiens
gacagcatctgggctgggtggctgctcagggccctccagttatgacatttatctttctctggctcagactctagcaggatacccaggagaaagagggaagtgctggctaaggtcccaggctttgggcgtgtatcagaactatccctatccccctgctcctgtccgggatcataatttgtcgattgttcagcctttcagacccccactggcatgccatatggaacagtgaacttacttcatggcgtgaacccaggagagacccctgtcacctgtacggcagggattgggaccttcattgttgaatttgccaccctgag

SEQ ID NO: 388776 - DNA, 517 bp, Homo sapiens
taattaacatttattgagtgcctaatacatactagttactgggctaagcactttcctccacgatatctcatttaatcttcatagataaaccctatgaaatagatgctattattacccctaatttaggataaagaagtggaagactctgaataagtttgccaaacttgcgtgattcataagtgatagagctgaatcgatttgacttcagaacccatttttttctaggatgggggtgagaaaagagacagatttaagagacaatgggcatacaagaagagggaaaggagtttggagtgatggcaaatcgagaaagatggatggtagcatcttcacagaaacggagtcctcatgtggaggaactggcttgaaggaggtgacaaggagctcggttttagacttgctgaaactggggtgaccacaagatctgtgagatgggtatgggaatgagttctcgaagaaggtggagaatggatattttggacaccttcaagtaaatacggtagttgaagctgaaagc

SEQ ID NO: 388777 - DNA, 362 bp, Homo sapiens
gagtccctgtctgtgctacagggtaagccgaccccaatcccagagaccacagggtcgggggcaaggcccatgcaggctcagtgagcaggggtggcatccgagacccggccagcacgctggagactgcctgacacctttttggctttggcagagagccagtgggcattgatgaacccattggccttgtctagggctcctcagtgacaagcagggctgcctccgccgtactgtggagcaaggcaggccaagccctaggaactcctgctggagacagtgaagggcgggccagtgaaggtcaaaaagggagccccctcagcttggggctgctaccggtaggggtgtccttctaagagcagtgtggg

SEQ ID NO: 388778 - DNA, 1073 bp, Homo sapiens
gtgttgggattacaggcgtgagccacggcgcccggtctagttctcacagttttcacccgacttctgcgccggtcttctctggccttgaaaggcagagagtccgttccgattttcccctgagctgggcaagtcccctgtgagagctctggggcatctggcttcggggcattctttgactaaggtggatggaggttgcaggtcttttcctgggtgggcgtggggcggggcagcgggttcccagcgtcctcctggcctgggcgtcttggaggctgttggggcgcattccgtccccttgcgcggggcggggccttgaggcgctggggcgggattggcgggggacggtcgcggagccccgccccgaagcacagggtcgagtcccttctttccgctccaacgcacggagggtgaggtcggtacgcggtggtggcgtcacggcgccagctcctcccgacgccgaggtgggttccgggagacccgcgggtctggctgcgagagattgggtaactcaaggcgtccctggagtacactgaggataagtgtttgagaaatgctgtctgaaggaatgaagtcagtctatgacaacgtctctctgccgtgaatcattcctgcagatgaaaaagtgtgacttggcagctggatgggggtgagaaaagagacagatttaagagacaatgggcatacaagaagagggaaaggagtttggagtgatggcaaatcgagaaagatggatggtagcatcttcacagaaacggagtcctcatgtggaggaactggcttgaaggaggtgacaaggagctcggttttagacttgctgaaactggggtgaccacaagatctgtgagatgggtatgggaatgagttctcgaagaaggtggagaatggatattttggacaccttcaagtaaatacggtagttgaagctgaaagcaaagagttgaagagagcaaaaggccaagagttccatcctgagacatacatattcagagcctgagaaaagtcaagccaaaagtgaatctaaagattgtccaaaaagactgaagaatcaggattgtggagtatcaccggaaagaaga

SEQ ID NO: 388779 - DNA, 1895 bp, Homo sapiens
  misc_feature (1878)..(1878): n is a, c, g, or t
  misc_feature (1885)..(1885): n is a, c, g, or t
ggaagaacccgcagcagctcccaggatgaactggttgcagtggctgctgctgctgcgggggcgctgagaggacacgagctctatgcctttccggctgctcatcccgctcggcctcctgtgcgcgctgctgcctcagcaccatggtgcgccaggtcccgacggctccgcgccagatcccgcccactacagggagcgagtcaaggccatgttctaccacgcctacgacagctacctggagaatgcctttcccttcgatgagctgcgacctctcacctgtgacgggcacgacacctggggcagtttttctctgactctaattgatgcactggacaccttgctgattttggggaatgtctcagaattccaaagagtggttgaagtgctccaggacagcgtggactttgatattgatgtgaacgcctctgtgtttgaaacaaacattcgagtggtaggaggactcctgtctgctcatctgctctccaagaaggctggggtggaagtagaggctggatggccctgttccgggcctctcctgagaatggctgaggaggcggcccgaaaactcctcccagcctttcagacccccactggcatgccatatggaacagtgaacttacttcatggcgtgaacccaggagagacccctgtcacctgtacggcagggattgggaccttcattgttgaatttgccaccctgagcagcctcactggtgacccggtgttcgaagatgtggccagagtggctttgatgcgcctctgggagagccggtcagatatcgggctggtcggcaaccacattgatgtgctcactggcaagtgggtggcccaggacgcaggcatcggggctggcgtggactcctactttgagtacttggtgaaaggagccatcctgcttcaggataagaagctcatggccatgttcctagagtataacaaagccatccggaactacacccgcttcgatgactggtacctgtgggttcagatgtacaaggggactgtgtccatgccagtcttccagtccttggaggcctactggcctggtcttcagagcctcattggagacattgacaatgccatgaggaccttcctcaactactacactgtatggaagcagtttggggggctcccggaattctacaacattcctcagggatacacagtggagaagcgagagggctacccacttcggccagaacttattgaaagcgcaatgtacctctaccgtgccacgggggatcccaccctcctagaactcggaagagatgctgtggaatccattgaaaaaatcagcaaggtggagtgcggatttgcaacaatcaaagatctgcgagaccacaagctggacaaccgcatggagtcgttcttcctggccgagactgtgaaatacctctacctcctgtttgacccaaccaacttcatccacaacaatgggtccaccttcgacgcggtgatcaccccctatggggagtgcatcctgggggctggggggtacatcttcaacacagaagctcaccccatcgaccctgccgccctgcactgctgccagaggctgaaggaagagcagtgggaggtggaggacttgatgagggaattctactctctcaaacggagcaggtcgaaatttcagaaaaacactgttagttcggggccatgggaacctccagcaaggccaggaacactcttctcaccagaaaaccatgaccaggcaagggagaggaagcctgccaaacagaaggtcccacttctcagctgccccagtcagcccttcacctccaagttggcattactgggacaggttttcctagactcctcataaccactggataatttttttattttatatactcaggcaacaataaaatacatgacgactcntctctcnccctcccctc

SEQ ID NO: 388780 - DNA, 1834 bp, Homo sapiens
ggaagaacccgcagcagctcccaggatgaactggttgcagtggctgctgctgctgcgggggcgctgagaggacacgagctctatgcctttccggctgctcatcccgctcggcctcctgtgcgcgctgctgcctcagcaccatggtgcgccaggtcccgacggctccgcgccagatcccgcccactacagggagcgagtcaaggccatgttctaccacgcctacgacagctacctggagaatgcctttcccttcgatgagctgcgacctctcacctgtgacgggcacgacacctggggcagtttttctctgactctaattgatgcactggacaccttgctgattttggggaatgtctcagaattccaaagagtggttgaagtgctccaggacagcgtggactttgatattgatgtgaacgcctctgtgtttgaaacaaacattcgagtggtaggaggactcctgtctgctcatctgctctccaagaaggctggggtggaagtagaggctggatggccctgttccgggcctctcctgagaatggctgaggaggcggcccgaaaactcctcccagcctttcagacccccactggcatgccatatggaacagtgaacttacttcatggcgtgaacccaggagagacccctgtcacctgtacggcagggattgggaccttcattgttgaatttgccaccctgagcagcctcactggtgacccggtgttcgaagatgtggccagagtggctttgatgcgcctctgggagagccggtcagatatcgggctggtcggcaaccacattgatgtgctcactggcaagtgggtggcccaggacgcaggcatcggggctggcgtggactcctactttgagtacttggtgaaaggagccatcctgcttcaggataagaagctcatggccatgttcctagagtataacaaagccatccggaactacacccgcttcgatgactggtacctgtgggttcagatgtacaaggggactgtgtccatgccagtcttccagtccttggaggcctactggcctggtcttcagagcctcattggagacattgacaatgccatgaggaccttcctcaactactacactgtatggaagcagtttggggggctcccggaattctacaacattcctcagggatacacagtggagaagcgagagggctacccacttcggccagaacttattgaaagcgcaatgtacctctaccgtgccacgggggatcccaccctcctagaactcggaagagatgctgtggaatccattgaaaagctggacaaccgcatggagtcgttcttcctggccgagactgtgaaatacctctacctcctgtttgacccaaccaacttcatccacaacaatgggtccaccttcgacgcggtgatcaccccctatggggagtgcatcctgggggctggggggtacatcttcaacacagaagctcaccccatcgaccctgccgccctgcactgctgccagaggctgaaggaagagcagtgggaggtggaggacttgatgagggaattctactctctcaaacggagcaggtcgaaatttcagaaaaacactgttagttcggggccatgggaacctccagcaaggccaggaacactcttctcaccagaaaaccatgaccaggcaagggagaggaagcctgccaaacagaaggtcccacttctcagctgccccagtcagcccttcacctccaagttggcattactgggacaggttttcctagactcctcataaccactggataatttttttatttttatttttttgaggctaaactataataaattgcttttggctatcata

SEQ ID NO: 388781 - DNA, 1877 bp, Homo sapiens
gaagcgtgaacccggtcctttccctttccgtccatcccagaccccgacttgctccgacacagccgctaggtcccaggagaaatcagctagtgattcccactttccgccctgtatcttgttcttcccccgcttgtttttgtgttcttgccccatgcctgatttctcgtcccccacccagggagcgagtcaaggccatgttctaccacgcctacgacagctacctggagaatgcctttcccttcgatgagctgcgacctctcacctgtgacgggcacgacacctggggcagtttttctctgactctaattgatgcactggacaccttgctgattttggggaatgtctcagaattccaaagagtggttgaagtgctccaggacagcgtggactttgatattgatgtgaacgcctctgtgtttgaaacaaacattcgagtggtaggaggactcctgtctgctcatctgctctccaagaaggctggggtggaagtagaggctggatggccctgttccgggcctctcctgagaatggctgaggaggcggcccgaaaactcctcccagcctttcagacccccactggcatgccatatggaacagtgaacttacttcatggcgtgaacccaggagagacccctgtcacctgtacggcagggattgggaccttcattgttgaatttgccaccctgagcagcctcactggtgacccggtgttcgaagatgtggccagagtggctttgatgcgcctctgggagagccggtcagatatcgggctggtcggcaaccacattgatgtgctcactggcaagtgggtggcccaggacgcaggcatcggggctggcgtggactcctactttgagtacttggtgaaaggagccatcctgcttcaggataagaagctcatggccatgttcctagagtataacaaagccatccggaactacacccgcttcgatgactggtacctgtgggttcagatgtacaaggggactgtgtccatgccagtcttccagtccttggaggcctactggcctggtcttcagagcctcattggagacattgacaatgccatgaggaccttcctcaactactacactgtatggaagcagtttggggggctcccggaattctacaacattcctcagggatacacagtggagaagcgagagggctacccacttcggccagaacttattgaaagcgcaatgtacctctaccgtgccacgggggatcccaccctcctagaactcggaagagatgctgtggaatccattgaaaaaatcagcaaggtggagtgcggatttgcaacaatcaaagatctgcgagaccacaagctggacaaccgcatggagtcgttcttcctggccgagactgtgaaatacctctacctcctgtttgacccaaccaacttcatccacaacaatgggtccaccttcgacgcggtgatcaccccctatggggagtgcatcctgggggctggggggtacatcttcaacacagaagctcaccccatcgaccctgccgccctgcactgctgccagaggctgaaggaagagcagtgggaggtggaggacttgatgagggaattctactctctcaaacggagcaggtcgaaatttcagaaaaacactgttagttcggggccatgggaacctccagcaaggccaggaacactcttctcaccagaaaaccatgaccaggcaagggagaggaagcctgccaaacagaaggtcccacttctcagctgccccagtcagcccttcacctccaagttggcattactgggacaggttttcctagactcctcataaccactggataatttttttatttttatttttttgaggctaaactataataaattgcttttggctatcata

SEQ ID NO: 388782 - DNA, 1746 bp, Homo sapiens
ggaagaacccgcagcagctcccaggatgaactggttgcagtggctgctgctgctgcgggggcgctgagaggacacgagctctatgcctttccggctgctcatcccgctcggcctcctgtgcgcgctgctgcctcagcaccatggtgcgccaggtcccgacggctccgcgccagatcccgcccactacagggagcgagtcaaggccatgttctaccacgcctacgacagctacctggagaatgcctttcccttcgatgagctgcgacctctcacctgtgacgggcacgacacctggggcagtttttctctgactctaattgatgcactggacaccttgctgattttggggaatgtctcagaattccaaagagtggttgaagtgctccaggacagcgtggactttgatattgatgtgaacgcctctgtgtttgaaacaaacattcgagtggtaggaggactcctgtctgctcatctgctctccaagaaggctggggtggaagtagaggctggatggccctgttccgggcctctcctgagaatggctgaggaggcggcccgaaaactcctcccagcctttcagacccccactggcatgccatatggaacagtgaacttacttcatggcgtgaacccaggagagacccctgtcacctgtacggcagggattgggaccttcattgttgaatttgccaccctgagcagcctcactggtgacccggtgttcgaagatgtggccagagtggctttgatgcgcctctgggagagccggtcagatatcgggctgagtataacaaagccatccggaactacacccgcttcgatgactggtacctgtgggttcagatgtacaaggggactgtgtccatgccagtcttccagtccttggaggcctactggcctggtcttcagagcctcattggagacattgacaatgccatgaggaccttcctcaactactacactgtatggaagcagtttggggggctcccggaattctacaacattcctcagggatacacagtggagaagcgagagggctacccacttcggccagaacttattgaaagcgcaatgtacctctaccgtgccacgggggatcccaccctcctagaactcggaagagatgctgtggaatccattgaaaaaatcagcaaggtggagtgcggatttgcaacaatcaaagatctgcgagaccacaagctggacaaccgcatggagtcgttcttcctggccgagactgtgaaatacctctacctcctgtttgacccaaccaacttcatccacaacaatgggtccaccttcgacgcggtgatcaccccctatggggagtgcatcctgggggctggggggtacatcttcaacacagaagctcaccccatcgaccctgccgccctgcactgctgccagaggctgaaggaagagcagtgggaggtggaggacttgatgagggaattctactctctcaaacggagcaggtcgaaatttcagaaaaacactgttagttcggggccatgggaacctccagcaaggccaggaacactcttctcaccagaaaaccatgaccaggcaagggagaggaagcctgccaaacagaaggtcccacttctcagctgccccagtcagcccttcacctccaagttggcattactgggacaggttttcctagactcctcataaccactggataatttttttatttttatttttttgaggctaaactataataaattgcttttggctatcata

SEQ ID NO: 388783 - DNA, 2045 bp, Homo sapiens
gtgttgggattacaggcgtgagccacggcgcccggtctagttctcacagttttcacccgacttctgcgccggtcttctctggccttgaaaggcagagagtccgttccgattttcccctgagctgggcaagtcccctgtgagagctctggggcatctggcttcggggcattctttgactaaggtggatggaggttgcaggtcttttcctgggtgggcgtggggcggggcagcgggttcccagcgtcctcctggcctgggcgtcttggaggctgttggggcgcattccgtccccttgcgcggggcggggccttgaggcgctggggcgggattggcgggggacggtcgcggagccccgccccgaagcacagggtcgagtcccttctttccgctccaacgcacggagggtgaggtcggtacgcggtggtggcgtcacggcgccagctcctcccgacgccgagaccatgggggctcagctaagcggcggccgcggcgccccggagcctgcgcaaacccagccccagccccagccccagcctgcggcgccggagggcccggaacagccccggcatccgccccagccccagccccagccccagccccagccccagcccgagcccagcccgtgggggccgctggacgacgtgcgcttcctcatcgcctgcacttcctggtactgacggcgtcctccgcaggatgtcgcccgtctgtccgccgtcccctgtggttcttgcctgccttgtctcctctccccacgtccctgcgtctcttacaccccctcccacccgaggctccccagagatagcagagaattcgaagaggtcgccggggactggaaagaagtcccggcagggccgccttcgcagtctacaccccagcctgcttcccagcctacacccagacccagctcagaccttcgtgaccaccccatccctttctccggctggctgggtcgggggcatccctctctgtcgctggcttccagaggcaggacaggcctcctggtaagcccgcaaagttgctgacctcctgacttcgtctgccttttattaatatctgtattgctgataaccgtgctcttgactatgtgtcccaggtcatgtcccaggtcatggagaagcccgtgccacagtgaccctccccatactcctgggggggctgctctccatcctggatcgtaaggaggcatcatcaggctgtgttcctggaaccccaataaccctgggcccccagggccagcctgttgtagagggaggctatctgaccgccggtctggcagaggagatgggtgggcagctcccagacaccccaaaggacccggttctcttcccagagcgtcctaaggttactcttggaacctgatctttgttccctcatcccagggaaatgacacactctgtatttctgttttatttagaaatgatttaaaaaacattatacaaaggctgatcagtttaaaatgtgactgacactgaaatgctgtgatgtcccccaggctgaggggaagctaggctctggggcccccagtgctttgcccctctgtctgccctgtcctggggtgatggacaaacagatgaccacaggcaggagaatctgagattggaagcctctaggctgagccctctgggcctggccccacatccctcacctctgcagcctgggctgcctgcctccatctcctgttcattctcagctggcctgccaggagccaacggggagcctggcgggaggcgggggtgcctagagctttcaagaagtgagagcaccaacctgaggagtggacagggaccaggaagtgggggaagggaggccaggaagaggtggatacaggagacacttctcatctcatctcagaccctagaggggtccacagatggggacacaagacccagccagcccactggatggcccgggcaagtaacaacctctctgtgcttcatctgagggcacggtgagagttaccgtcggcctcccagggcctaacacgagtttcatgtgagtggacaggtgtgagctaataaagtgctttgcaaagtataaaaaaaaaa

SEQ ID NO: 388784 - DNA, 1534 bp, Homo sapiens
ggaagaacccgcagcagctcccaggatgaactggttgcagtggctgctgctgctgcgggggcgctgagaggacacgagctctatgcctttccggctgctcatcccgctcggcctcctgtgcgcgctgctgcctcagcaccatggtgcgccaggtcccgacggctccgcgccagatcccgcccactacagggagcgagtcaaggccatgttctaccacgcctacgacagctacctggagaatgcctttcccttcgatgagctgcgacctctcacctgtgacgggcacgacacctggggcagtttttctctgactctaattgatgcactggacaccttgctgattttggggaatgtctcagaattccaaagagtggttgaagtgctccaggacagcgtggactttgatattgatgtgaacgcctctgtgtttgaaacaaacattcgagtggtaggaggactcctgtctgctcatctgctctccaagaaggctggggtggaagtagaggctggatggccctgttccgggcctctcctgagaatggctgaggaggcggcccgaaaactcctcccagagtataacaaagccatccggaactacacccgcttcgatgactggtacctgtgggttcagatgtacaaggggactgtgtccatgccagtcttccagtccttggaggcctactggcctggtcttcagagcctcattggagacattgacaatgccatgaggaccttcctcaactactacactgtatggaagcagtttggggggctcccggaattctacaacattcctcagggatacacagtggagaagcgagagggctacccacttcggccagaacttattgaaagcgcaatgtacctctaccgtgccacgggggatcccaccctcctagaactcggaagagatgctgtggaatccattgaaaaaatcagcaaggtggagtgcggatttgcaacaatcaaagatctgcgagaccacaagctggacaaccgcatggagtcgttcttcctggccgagactgtgaaatacctctacctcctgtttgacccaaccaacttcatccacaacaatgggtccaccttcgacgcggtgatcaccccctatggggagtgcatcctgggggctggggggtacatcttcaacacagaagctcaccccatcgaccctgccgccctgcactgctgccagaggctgaaggaagagcagtgggaggtggaggacttgatgagggaattctactctctcaaacggagcaggtcgaaatttcagaaaaacactgttagttcggggccatgggaacctccagcaaggccaggaacactcttctcaccagaaaaccatgaccaggcaagggagaggaagcctgccaaacagaaggtcccacttctcagctgccccagtcagcccttcacctccaagttggcattactgggacaggttttcctagactcctcataaccactggataatttttttatttttatttttttgaggctaaactataataaattgcttttggctatcata

SEQ ID NO: 388785 - DNA, 1953 bp, Homo sapiens
gtgttgggattacaggcgtgagccacggcgcccggtctagttctcacagttttcacccgacttctgcgccggtcttctctggccttgaaaggcagagagtccgttccgattttcccctgagctgggcaagtcccctgtgagagctctggggcatctggcttcggggcattctttgactaaggtggatggaggttgcaggtcttttcctgggtgggcgtggggcggggcagcgggttcccagcgtcctcctggcctgggcgtcttggaggctgttggggcgcattccgtccccttgcgcggggcggggccttgaggcgctggggcgggattggcgggggacggtcgcggagccccgccccgaagcacagggtcgagtcccttctttccgctccaacgcacggagggtgaggtcggtacgcggtggtggcgtcacggcgccagctcctcccgacgccgagaccatgggggctcagctaagcggcggccgcggcgccccggagcctgcgcaaacccagccccagccccagccccagcctgcggcgccggagggcccggaacagccccggcatccgccccagccccagccccagccccagccccagccccagcccgagcccagcccgtgggggccgctggacgacgtgcgcttcctcatcgcctgcacttcctggtactgacggcgtcctccgcaggatgtcgcccgtctgtccgccgtcccctgtggttcttgcctgccttgtctcctctccccacgtccctgcgtctcttacaccccctcccacccgaggctccccagagatagcagagaattcgaagaggtcgccggggactggaaagaagtcccggcagggccgccttcgcagtctacaccccagcctgcttcccagcctacacccagacccagctcagaccttcgtgaccaccccatccctttctccggctggctgggtcgggggcatccctctctgtcgctggcttccagaggcaggacaggcctcctggtcatgtcccaggtcatggagaagcccgtgccacagtgaccctccccatactcctgggggggctgctctccatcctggatcgtaaggaggcatcatcaggctgtgttcctggaaccccaataaccctgggcccccagggccagcctgttgtagagggaggctatctgaccgccggtctggcagaggagatgggtgggcagctcccagacaccccaaaggacccggttctcttcccagagcgtcctaaggttactcttggaacctgatctttgttccctcatcccagggaaatgacacactctgtatttctgttttatttagaaatgatttaaaaaacattatacaaaggctgatcagtttaaaatgtgactgacactgaaatgctgtgatgtcccccaggctgaggggaagctaggctctggggcccccagtgctttgcccctctgtctgccctgtcctggggtgatggacaaacagatgaccacaggcaggagaatctgagattggaagcctctaggctgagccctctgggcctggccccacatccctcacctctgcagcctgggctgcctgcctccatctcctgttcattctcagctggcctgccaggagccaacggggagcctggcgggaggcgggggtgcctagagctttcaagaagtgagagcaccaacctgaggagtggacagggaccaggaagtgggggaagggaggccaggaagaggtggatacaggagacacttctcatctcatctcagaccctagaggggtccacagatggggacacaagacccagccagcccactggatggcccgggcaagtaacaacctctctgtgcttcatctgagggcacggtgagagttaccgtcggcctcccagggcctaacacgagtttcatgtgagtggacaggtgtgagctaataaagtgctttgcaaagtataaaaaaaaaa

SEQ ID NO: 388786 - DNA, 1080 bp, Homo sapiens
gtgttgggattacaggcgtgagccacggcgcccggtctagttctcacagttttcacccgacttctgcgccggtcttctctggccttgaaaggcagagagtccgttccgattttcccctgagctgggcaagtcccctgtgagagctctggggcatctggcttcggggcattctttgactaaggtggatggaggttgcaggtcttttcctgggtgggcgtggggcggggcagcgggttcccagcgtcctcctggcctgggcgtcttggaggctgttggggcgcattccgtccccttgcgcggggcggggccttgaggcgctggggcgggattggcgggggacggtcgcggagccccgccccgaagcacagggtcgagtcccttctttccgctccaacgcacggagggtgaggtcggtacgcggtggtggcgtcacggcgccagctcctcccgacgccgagaccatgggggctcagctaagcggcggccgcggcgccccggagcctgcgcaaacccagccccagccccagccccagcctgcggcgccggagggcccggaacagccccggcatccgccccagccccagccccagccccagccccagccccagcccgagcccagcccgtgggggccgctggacgacgtgcgcttcctcatcgcctgcacttcctggtactgacggcgtcctccgcaggatgtcgcccgtctgtccgccgtcccctgtggttcttgcctgccttgtctcctctccccacgtccctgcgtctcttacaccccctcccacccgaggctccccagagatagcagagaattcgaagaggtcgccggggactggaaagaagtcccggcagggccgccttcgcagtctacaccccagcctgcttcccagcctacacccagacccagctcagaccttcgtgaccaccccagcccactggatggcccgggcaagtaacaacctctctgtgcttcatctgagggcacggtgagagttaccgtcggcctcccagggcctaacacgagtttcatgtgagtggacaggtgtgagctaataaagtgctttgcaaagtataaaaaaaaaa

SEQ ID NO: 388787 - DNA, 1239 bp, Homo sapiens
catcagatccatcaggtccgagctgtgttgactaccacttttcccttcgtctcaattatgtcttggaaaaaggctttgcggatccccggaggccttcgggcagcaactgtgaccttgatgctgtcgatgctgagcaccccagtggctgagggcagagactctcccgaggatttcgtgtaccagtttaagggcatgtgctacttcaccaacgggacagagcgcgtgcgtcttgtgagcagaagcatctataaccgagaagagatcgtgcgcttcgacagcgacgtgggggagttccgggcggtgacgctgctggggctgcctgccgccgagtactggaacagccagaaggacatcctggagaggaaacgggcggcggtggacagggtgtgcagacacaactaccagttggagctccgcacgaccttgcagcggcgagtggagcccacagtgaccatctccccatccaggacagaggccctcaaccaccacaacctgctggtctgctcggtgacagatttctatccagcccagatcaaagtccggtggtttcggaatggccaggaggagacagctggcgttgtgtccaccccccttattaggaatggtgactggaccttccagatcctggtgatgctggaaatgactccccagcgtggagacgtctacacctgccacgtggagcaccccagcctccagagccccatcaccgtggagtggcgggctcaatctgaatctgcccagagcaagatgctgagtggcattggaggcttcgtgctggggctgatcttcctcgggctgggccttatcatccatcacaggagtcagaaaggacctcaagggcctccaccagcagggctcctgcactgactcctgagactattttaactgggattggttatcacttttctgtaacgcctgcttgtccctgcccagaattcccagctgtctgtgtcagcctgtccccctgagatcagagtcctacagtggctgtcacgcagccaccaggtcatctcctttcatccccaccttgaggcggatggctgtgaccctacttcctgcactgacccacagcccctgcctgtgcacagccagctgcatctactcaggccccaaggggtttctgtttctattctctcctcagactgctcaagagaagcacatgaaaactattacctgactttagagcttttttacataattaaacatgatcctgagttacaaaacaacaaaaagacgaaa

SEQ ID NO: 388788 - DNA, 1215 bp, Homo sapiens
catcagatccatcaggtccgagctgtgttgactaccacttttcccttcgtctcaattatgtcttggaaaaaggctttgcggatccccggaggccttcgggcagcaactgtgaccttgatgctgtcgatgctgagcaccccagtggctgagggcagagactctcccgaggatttcgtgtaccagtttaagggcatgtgctacttcaccaacgggacagagcgcgtgcgtcttgtgagcagaagcatctataaccgagaagagatcgtgcgcttcgacagcgacgtgggggagttccgggcggtgacgctgctggggctgcctgccgccgagtactggaacagccagaaggacatcctggagaggaaacgggcggcggtggacagggtgtgcagacacaactaccagttggagctccgcacgaccttgcagcggcgagtggagcccacagtgaccatctccccatccaggacagaggccctcaaccaccacaacctgctggtctgctcggtgacagatttctatccagcccagatcaaagtccggtggtttcggaatggccaggaggagacagctggcgttgtgtccaccccccttattaggaatggtgactggaccttccagatcctggtgatgctggaaatgactccccagcgtggagacgtctacacctgccacgtggagcaccccagcctccagagccccatcaccgtggagtggcgggctcaatctgaatctgcccagagcaagatgctgagtggcattggaggcttcgtgctggggctgatcttcctcgggctgggccttatcatccatcacaggagtcagaaagggctcctgcactgactcctgagactattttaactgggattggttatcacttttctgtaacgcctgcttgtccctgcccagaattcccagctgtctgtgtcagcctgtccccctgagatcagagtcctacagtggctgtcacgcagccaccaggtcatctcctttcatccccaccttgaggcggatggctgtgaccctacttcctgcactgacccacagcccctgcctgtgcacagccagctgcatctactcaggccccaaggggtttctgtttctattctctcctcagactgctcaagagaagcacatgaaaactattacctgactttagagcttttttacataattaaacatgatcctgagttacaaaacaacaaaaagacgaaa

SEQ ID NO: 388789 - DNA, 703 bp, Homo sapiens
gagggtgggaagagagagagtgttaggaaaaataactcatgagtactaggcttaatacctgggtgacaaaaaaatctgtacaacaaacccccatgacatgtttacctatgtaacaaaactgtacttgtacccctaaacttaaaagttaaattttaaaaaaagatattttcttctcctttgtttgattgtactgttaaagacaaaatacaacaaatttagtttgaagatctaattggcttttatttgtgattctagaatcaggcaacacttcattctatgaaacagaagtagtgatccactggatatgatagaatggttggtttttgtaaggtgggaataagacaacagaacgataaataaaagtgcattgatagcataagttactacaagtcacttttcttgtaagagttaaaacagagaagacctctttattatgctgacttaggaagattgagctctttgactagttgctgtgaatctcctgttttcaggaaaaactgctctgtttggggctctatcagcttccttaaagttcagtttgattatgaggcactttgcatgagtgacactattttggtctggtctggtctgtgggagtctggtgcagaaggctggtccaaaacaatggattcccataaactgtaacagcacttagtcataaacatctctttcagaattatgttcagcatgtgaatgtccctga

SEQ ID NO: 388790 - DNA, 399 bp, Homo sapiens
agagatctactaagcttattaacaaaatcattctgaaacctttacacaaatcagcctgctttaaataaaaaggttagaaacattatgataactatgtacaagagtatatatctgtatactctaacattctaaataaaggtatctttgaaaatttactattatacagtattagtaccatactctataatgagcaaagaaagaatatgagaactcttgggctcagtacagtgtaaatatgttcaaaatgctatagaagtgttctctttgtcctgagctacttttttgtttctcttatagtgttctcttgtattattcatttgcttagatatctatatgcttattgttaattcaaccacaaatgcgcttcctattgtttccgctgattgagttaacttatca

SEQ ID NO: 388791 - DNA, 789 bp, Homo sapiens
ggcgggcatctgtaatttcagctactcaggaggttgagacgggagaattgcttgaacctgggagacggaggttacagtgagcctagactgcgccattgcactctagcctaggcgacaagagcgaaactatgtttcaaataataataataataataagacttaccatttgccaggtcctgtgcaaagcactttatctcatttgatccctgggaaaccccataaagtactattatgccatttctcagataaagaaactgaagctcagagacgtttagttgcttgcctgtggatataacactagagagcgggagagcacagtatttgaacccaggaggtctgatgctggaggtcatgtttttaaccttatctctgtattgcctgcccaagtgctggctgtgtgcatgtattctcaataatccctggccaacttcctgctttgctgtcagtagcagagctgaagaacttacaatagacggcagagggcgtccagagtcactatttttaaaaggtgctagttttcaaaagcatttctggaattcagagagaacagaggtccacatagcaggctagacaggaaaggtagctgtagatagactttagggagtatatagaatattgccttcacgcaggttaagaaatatttagtgttgaaaggatacttttaaaagagagaaagcagtaaagttgatcctctgcagaaagtagaccaatgtaagtatcatgcaatgtgtccatgtgcgtgtacacgtgagcacacatgcacacacacattagatgttttgtgagaaa

SEQ ID NO: 388792 - DNA, 129 bp, Homo sapiens
gattgctcctctgaaaactcaatattggaagctggtgcttgaggacaagccctggcaggccgagggcacctgctcctctgtctgccctcctggaaccacgcgtcgggtcacaggccgctgggcagaggt

SEQ ID NO: 388793 - DNA, 221 bp, Homo sapiens
gcactgtagtaggttcttgatgatacagctgagatcaaggtagacagatccctggtctcatagaccatctattctaatggggggcattgataatatagttataatgaaatcataggcgttgataagagtgccgcaagaagtaaagagggtgatgaggatgagatgaatcagaggaggctgacttaaaaatggtggtcagcacaggaccctctgaggaggca

SEQ ID NO: 388794 - DNA, 587 bp, Homo sapiens
tttgaattgccatatgtcacatctttgattcctgactcaaataagagacaccatagtgtaataatagagagtgccggagatgagagcttgcaggcctcgggccgcatccccgcccacctggaggagccatttcacattcctgggtctcaggtccttcatcctctaacaagatacgtggtccctgaaaatcactacctgaaaaatgggtgttgagatctgacttcccaagtggaaggaaaataggaccctatgtatatgctatgaggttttctctaaccctcaaaccataaggggttccccagaaagagaaaggggagcccccaaatgatgaatggccatgataccggcagtgggcagcttcaggtttagctggaaaaacaccagctcataaaaagcacagctcttcagcactggcaaaatacaatcccatccagagagggataatggggccaaagtctccagaacattccacagaaaacagaactgggcgctgttctatctccaacttgctcagtgccccccggagaaatccctcgtaattagtcaccccttccatttcctcctctaaagatggaacacagataaca

SEQ ID NO: 388795 - DNA, 204 bp, Homo sapiens
tctctatggaggataatgtgaaaaaacagattatttcaaagtcaacagtatttcatttggaaatatatatgtctttctgacaccttcgctttcgttcccagctcctgttaggtcagcctgtcattagttgccaatggtgtggcagtgccaactgctggctggtgtgagaaagagtctctgggtggctgtgggtaatgtgtattg

SEQ ID NO: 388796 - DNA, 498 bp, Homo sapiens
gtctgtaaagcactgatggactcaaaagtactgaaatgttaggttctcagctttgctgggagctcattgggggacgctgggaaagtcaccctggggtgacttctctgatgtttggctttttccagtttgtgctgtctacctgcttgttgagggtgacccacccctgtgttgctgttgatggagaccctgcagactctagtccatgctctggtctgacttctgtaagcactgaagatgggctgaaccatcagagcttttgataaggatcagaataattccctaaaagtgtgtggagctgcacacagagattgtcttaaggtgaccctgggaggatttggcctgaagcaagagaaaaactggcaagggtcaaaagggctttggggaggaaaggtgtaacgtttctgccaaaagcggaacctaaaacggggagagagaggcacctgctcaatagttccatgcatgggaacataatacttttaagaattgcctcagagtttt

SEQ ID NO: 388797 - DNA, 191 bp, Homo sapiens
ctgaatatgacccaccccaagtccgattgaacaaacaggttgtacaaactcttttttcaatattgtggagcaagaaggaaataaaaatgaatgaaacaagatccttctattcaagggacatatttaataaggtaaataatagctaaaggcaactataaaacagaacaggatagtttagtaagagtaaagga

SEQ ID NO: 388798 - DNA, 1309 bp, Homo sapiens
  misc_feature (45)..(45): n is a, c, g, or t
  misc_feature (92)..(92): n is a, c, g, or t
  misc_feature (402)..(402): n is a, c, g, or t
  misc_feature (410)..(410): n is a, c, g, or t
  misc_feature (435)..(435): n is a, c, g, or t
  misc_feature (577)..(577): n is a, c, g, or t
  misc_feature (621)..(621): n is a, c, g, or t
  misc_feature (636)..(636): n is a, c, g, or t
  misc_feature (643)..(643): n is a, c, g, or t
  misc_feature (645)..(645): n is a, c, g, or t
  misc_feature (649)..(651): n is a, c, g, or t
  misc_feature (653)..(653): n is a, c, g, or t
  misc_feature (727)..(728): n is a, c, g, or t
  misc_feature (822)..(822): n is a, c, g, or t
attctgagccaagtccggtgccaagcgcagctagctcagcaggcngcagcggtggcctgagcttcaggacagccagctccctcccggtctcnccttcctcgcggtcagcatgaaagccttcagtcccgtgaggtccattaggaaaaacagcctgttggaccaccgcctgggcatctcccagagcaaaaccccggtggatgacctgatgagcctgctgtaaaacatgaatgactgctactccaagctcaaggagctggtgcccagcatcccccagaacaagaagtgagcaagatggaaatcctgcagcacgtcatcgactacatcttggacctgcagatcaccctggacttgcatcccactattgtcagcctgcatcaccagagacccgggcagaaccaggcntccaggangccgctgaccaccctcaacacgganatcagcatcctgtccttgcaggcttctgaattcccttcggagttaatgtcaaatgacaggaaagcactgtgtggctgaataatcatgacttcttttttttctttgcacaacaacgacaacaacaaattcacagaaccttttnagcgctgaacttatttttcaaccatttcacaaggaggcagttgnatgacttttaaaagnaaaaaangngaannnanatgaaaaagacttttaaatgccctttctgcagttggaaggtttttttcatatactattcccaccatggggagcnnaaacgttaaaatcacaaggaattgcccaatctaagcagactttgccttttttcaaaggtggagtgtcaataccagaaggatccagtatcagtcncttaaatgaagtcttttggtcagaaattacctttttgacacaagcctactgaatgccgtgtatatatttatatataaatatatctatttaagtgaaaccttgttaactctttaattagagttttcttgtatagtggcagagatgtctatttctgcattaaaaagtgtaatgatgtacttattcatgataaactttttataaaagtttaaacttttagttgtaaacgtaacccttttatacaaaataaatcaagtgtgtttattgaatggtgattgcctgctttatttcagaggaccagtgctttgatttttattatgctatgttataactgaacccaaataaatacaagttcaaatttatgtagactgtataagattataataaaacatgtctgaagtcaaaaataaaaaacattacccagtgtttggtggtgcacatctatagtcctagctacccccgaggctgagacgggaggatagctggagcc

SEQ ID NO: 388799 - DNA, 420 bp, Homo sapiens
tgctttctaggtgtcaaatatagccaggcccctccccactgccaccctaccccccgggcaaggcgtttgtcatcggctctctctcctgggccccagagacacctttgccctccatctatgacccgttagatagaggaggcaccaacttcagggtgggcccctttagcctctcccttcctcagtggcttccagtgccacccgctctggtctgggggaagaacttcaactccagactctgggcccagccccccattcctgaagctcagctgcttcccaggttaaacctccattttccctaaaatctgtgccagtgggatgctaagaccctatccactgagccacccgatcccctcctcaggccggggccctgtcccctttcacagctagaggccttcgcagacgggacagtttgcacctcat

SEQ ID NO: 388800 - DNA, 337 bp, Homo sapiens
aaccaatcagagagattaaggtgtcaataaatgaagattaaaatgtcagctcagcctgggcgcagtgactcacgcctgtaatcccagcactttgggaggctgaggcgggtggatcacctgagatcaggagtttgaaaccagcctgggtaacatggcgaaaccccgtgtctactaaaagtacaaaaatcagctgggcgtggtggtgggcacctgtaatcccagctacttggaaggctgaggcaggagaatcgcttgaacccgggaggtggaggttgctgtaagccaagatcgcgccattggactccagcctaggcaacagaacaaaactgtgtctcaa

SEQ ID NO: 388801 - DNA, 257 bp, Homo sapiens
gtatatgaaaattaactcaagatggattaaagatttaaatgtaagacctcaaactgtaaaaatcctagaagaaaacctaggaaatacccttatcaacatcagccttggcaaagaacttttggctaagtccccaaaggcaattgcaacaaaacagaaattggcaagtggggacctaattaaagcactctgcacagcaaaagacactatcaacagagtaaacagacaacatacagaattggagaaaatatttgcaaact

SEQ ID NO: 388802 - DNA, 275 bp, Homo sapiens
ccacctcagcctcccaagtagctgggactacaggtgcacaccaaccatgcctggctaatttttgtgttttttgtagagacagggttttgccaaagagcagggagtacaggcatgagccaccgcacctggcctgaactgaactcttagacattgtcaccccttgggttaaaaccttcctgtgttctcccatcatacacagtgaaacccaagctccttccacagcttaggctctgtatcctatggcttcttgccacccctgtaaccccaccacaacc

SEQ ID NO: 388803 - DNA, 792 bp, Homo sapiens
cttgttttcggtattgagaatagcaaatatagaaatcccttaattctttgacttagcttagcaggtgcaattagttctatccctaagccttcttaccagaaaattttctagtgtaaaatgattggatgggataccaattgggatgggtgtggtaatagtaaaaccatattctttaataactttttcttatttgttttcctggaattttggttggcattttttaatgaattacatgcttatttttaaaaattattatgatggagaatttttgttaggcagaatttcaaatctgtcatctgctgttgactcttactttcactacaaatttacgaaggtagagagacccagttcttacttaagttatatctaacataaaaatacaattctgtcccaatctgttcatttaaagggtaaatttatagcatctgttcaactttatatgctatctcaaaattgtcaacattttaagcaaggtgctacctaattttaatgggtgcacaagagggaaaagtgggtcattgacttcaaaggcgaaactataagctattaatgggctacgttgtgctgaattacaatctcttttcttgtttcaagttaaaatttttaagtggccacatgtttggcattgtaattgataccacaatgctgctgttccttgactcattcattctcaaatgtatatatatatatattcttagttcacaaatttctatttcttttacacaagttgctatttcttgtagtgttcatgaactgggtatgctgtcctttgtaatgaaagactacagactg

SEQ ID NO: 388804 - DNA, 505 bp, Homo sapiens
aggaaatgacttcttataaggtcattgcgctagatgttaagtgatacagtgttatttgaaagaggactaaatacaactaaaacaatataattagcaattacaactaattctgttgtaaatgtatattacaaacttaatagcaaccattaaaaagagtgacaaaaaagtataattgatatactaagagaggagataaaatgaaatcacatagaacgctcaatcaaagccagataaggcaaaaagagtagaacacaaaaaaagggcaaaaaatacagtaaatattaacctaattatatcaataattaattgttaatgtcataaatacatcaataaaagactatcaaagtagattaaaagtcaagacccaactacatgttgtctataaaaatcccactttacactttaaacataaagacgaagataaattaaaaggaaaaggatggaggaaagacataccatgctaactataatcaaaagaaagctggagtagctgtattagtttcag

SEQ ID NO: 388805 - DNA, 2393 bp, Homo sapiens
cgccggctctggctcagcggcggctccggtggcagcggcggtggcggctaggcgggctcggcggctcctgtccctcgggcggctgcccgctcgctgcccagggcgcccggacacacgtgggcggctcagcgatggcccgcgccccgcgacgtggcgggcaggcaccggggcgcgggaccgctgagcccgagtgagccggggccgcgctcccgccttcggcccgggcctcccgggatggccgtggcgcctctgcggggggcgctgctgctgtggcagctgctggcggcgggcggcgcggcactggagatcggccgcttcgacccggagcgcgggcgcggggctgcgccgtgccaggcggtggagatccccatgtgccgcggcatcggctacaacctgacccgcatgcccaacctgctgggccacacgtcgcagggcgaggcggctgccgagctagcggagttcgcgccgctggtgcagtacggctgccacagccacctgcgcttcttcctgtgctcgctctacgcgcccatgtgcaccgaccaggtctcgacgcccattcccgcctgccggcccatgtgcgagcaggcgcgcctgcgctgcgcgcccatcatggagcagttcaacttcggctggccggactcgctcgactgcgcccggctgcccacgcgcaacgacccgcacgcgctgtgcatggaggcgcccgagaacgccacggccggccccgcggagccccacaagggcctgggcatgctgcccgtggcgccgcggcccgcgcgccctcccggagacctgggcccgggcgcgggcggcagtggcacctgcgagaaccccgagaagttccagtacgtggagaagagccgctcgtgcgcaccgcgctgcgggcccggcgtcgaggtgttctggtcccggcgcgacaaggacttcgcgctggtctggatggccgtgtggtcggcgctgtgcttcttctccaccgccttcactgtgctcaccttcttgctggagccccaccgcttccagtaccccgagcgccccatcatcttcctctccatgtgctacaacgtctactcgctggccttcctgatccgtgcggtggccggagcgcagagcgtggcctgtgaccaggaggcgggcgcgctctacgtgatccaggagggcctggagaacacgggctgcacgctggtcttcctactgctctactacttcggcatggccagctcgctctggtgggtggtcctgacgctcacctggttcctggctgccgggaagaaatggggccacgaggccatcgaggcccacggcagctatttccacatggctgcctggggcctgcccgcgctcaagaccatcgtcatcctgaccctgcgcaaggtggcgggtgatgagctgactgggctttgctacgtggccagcacggatgcagcagcgctcacgggcttcgtgctggtgcccctctctggctacctggtgctgggcagtagtttcctcctgaccggcttcgtggccctcttccacatccgcaagatcatgaagacgggcggcaccaacacagagaagctggagaagctcatggtcaagatcggggtcttctccatcctctacacggtgcccgccacctgcgtcatcgtttgctatgtctacgaacgcctcaacatggacttctggcgccttcgggccacagagcagccatgcgcagcggccgcggggcccggaggccggagggactgctcgctgccagggggctcggtgcccaccgtggcggtcttcatgctcaaaattttcatgtcactggtggtggggatcaccagcggcgtctgggtgtggagctccaagactttccagacctggcagagcctgtgctaccgcaagatagcagctggccgggcccgggccaaggcctgccgcgcccccgggagctacggacgtggcacgcactgccactataaggctcccaccgtggtcttgcacatgactaagacggacccctctttggagaaccccacacacctctagccacacaggcctggcgcggggtggctgctgccccctccttgccctccacgccctgccccctgcatcccctagagacagctgactagcagctgcccagctgtcaaggtcaggcaagtgagcaccggggactgaggatcagggcgggaccccgtgaggctcattaggggagatgggggtctcccctaatgcgggggctggaccaggctgagtccccacagggtcctagtggaggatgtggaggggcggggcagaggggtccagccggagtttatttaatgatgtaatttattgttgcgttcctctggaagctgtgactggaataaacccccgcgtggcactgctgatcctctctggctgggaagggggaaggtaggaggtgaggc

SEQ ID NO: 388806 - DNA, 1630 bp, Homo sapiens
cggtctttcgcccaaagcacgttccctacttcctgtgctcttgcggagacgcgcgcgtcggggtttaacgcgtttctgggccgccgtaagcccggcctaggggcagctttgactcgagagccggctataggcgcatggaaggttccctggaacgggaggcgccagcgggggcgctggccgccgtgctaaagcacagctcgacgttgccgcccgaaagcacccaggtccggggctacgacttcaaccgcggtgtgaattaccgcgcactgctggaggccttcggcaccaccggcttccaagcaaccaacttcgggcgcgctgtacagcaagtcaatgccatgatcgagaagaagctggaaccactgtcacaggatgaagaccagcacgcggacctgacccagagccgccgcccacttaccagctgcaccattttcctgggatatacatccaacctcatcagttcaggcatccgtgagaccattcgctaccttgtgcagcacaacatggtggacgtattggtgaccacagctggcggcgtggaggaagacctcatcaagtgcctggcgcccacatacttgggcgagtttagcctcagggggaaggagctccgggagaacgggatcaataggatcggaaacctgctggtgcccaatgagaattactgcaagtttgaggactggctgatgcccattctggaccagatggtgatggagcagaacacagagggtgtaaagtggacgccttctaagatgatcgcccggctgggcaaggagatcaacaacccagagtccgtgtattactgggcccagaagaaccacatccctgtgtttagtcccgcacttacagacggctcgctgggcgacatgatcttcttccattcctacaagaacccgggcctggtcctggacatcgttgaggacctgaggctcatcaacacacaggccatctttgccaagtgcactgggatgatcattctgggcgggggcgtggtcaagcaccacattgccaatgccaacctcatgcggaacggggccgactacgctgtttacatcaacacagcccaggagtttgatggctctgactcaggtgcccgaccagacgaggctgtctcctggggcaagatccgggtggatgcacagcccgtcaaggtctatgctgacgcctccctggtcttccccctgcttgtggctgaaacctttgcccagaagatggatgccttcatgcatgagaagaacgaggactgagcggctgcggtcccaggaaggtcttaccccctcccctactttttggtcagctacgtctctagaataagatggtatctgaagtccttccatgtctgtgtctcggtccttggtcctgttggtgggtcccctggcttcagcctgctccatcctctgcctcataggcctcctctcgccagcactggacgctgcctcccatgcggtcagcaggcaggctctgttgggtgtaggccagcgactgcaccacaccggaacccacaggcagggccagagccagcgcaccctgtggagcgaggggtagggagtggttatctgtggctgggctgtaccctggtttctgaggtccctgggcaccccccatctcagtcctgcctgaagccctcagtcac

SEQ ID NO: 388807 - DNA, 2626 bp, Homo sapiens
cggtctttcgcccaaagcacgttccctacttcctgtgctcttgcggagacgcgcgcgtcggggtttaacgcgtttctgggccgccgtaagcccggcctaggggcagctttgactcgagagccggctataggcgcatggaaggttccctggaacgggaggcgccagcgggggcgctggccgccgtgctaaagcacagctcgacgttgccgcccgaaagcacccaggtccggggctacgacttcaaccgcggtgtgaattaccgcgcactgctggaggccttcggcaccaccggcttccaagcaaccaacttcgggcgcgctgtacagcaagtcaatgccatgatcgagaagaagctggaaccactgtcacaggatgaagaccagcacgcggacctgacccagagccgccgcccacttaccagctgcaccattttcctgggatatacatccaacctcatcagttcaggcatccgtgagaccattcgctaccttgtgcagcacaacatggtggacgtattggtgaccacagctggcggcgtggaggaagacctcatcaagtgcctggcgcccacatacttgggcgagtttagcctcagggggaaggagctccgggagaacgggatcaataggatcggaaacctgctggtgcccaatgagaattactgcaagtttgaggactggctgatgcccattctggaccagatggtgatggagcagaacacagagggtgtaaagtggacgccttctaagatgatcgcccggctgggcaaggagatcaacaacccagagtccgtgtattactgggcccagaagaaccacatccctgtgtttagtcccgcacttacagacggctcgctgggcgacatgatcttcttccattcctacaagaacccgggcctggtcctggacatcgttgaggacctgaggctcatcaacacacaggccatctttgccaagtgcactgggatgatcattctgggcgggggcgtggtcaagcaccacattgccaatgccaacctcatggtgagtgggggtggcgcttcggcccactctgcagacatgctgtgtggtgggcctatgccatgtgctgggtagacagcatgaactagacaggccaggatccctgctccccgggactgatgttctagtaggggagatagcaaacaagtgacatccacgtcagggggcagtcattgctacggggaatactaaatgatggcatgagaagagaaaggggtgctgtccaacaagaggtttggaaggaggcttctggaagtgtgagctgggagcaggggtttggggaggcatctcccaggagctatgtggttgtctcccgtgccaggagtttgtgctgctgtactagcattgagcttctggattgcaaagttcccaggagagggaacagccattgcaaaggctctggggcgcctgaagtaatccaggaacagctgggtacctggtgaggggaaggtggagtggtgagggccaggaggtgatgcagggaggtgccacagggagcctgctgggccctgtgggctgaggcggggctttggcttttgcactgagagaagtgggagaggacttgactcgggttcccatgctccccctggtggccatgtggtgaacagatggtggcaggtgagtgagaactccagtccaggacagtggtgaccatgcagggatcaggaggcaggcggtggttggatttggagggcttctgaagatagagttgctggcagctcctgccttgcagatggggcagggttgttgacacctggctgttgggtctggggaaacacagccatcgttgcccagcagctctagtgaccccagacattgacatgggccctgtctgggagcgaatgtctgtgaagggcttccttcatctgggacacacctctcagcctgtttggctacggtgtcctccctctgtgtctgtctcctgtgactggctgactgggcccaccgtgcccccgcctccccacagcggaacggggccgactacgctgtttacatcaacacagcccaggagtttgatggctctgactcaggtgcccgaccagacgaggctgtctcctggggcaagatccgggtggatgcacagcccgtcaaggtctatgctgacgcctccctggtcttccccctgcttgtggctgaaacctttgcccagaagatggatgccttcatgcatgagaagaacgaggactgagcggctgcggtcccaggaaggtcttaccccctcttctatttattaatttgcagacccagcccctcccctactttttggtcagctacgtctctagaataagatggtatctgaagtccttccatgtctgtgtctcggtccttggtcctgttggtgggtcccctggcttcagcctgctccatcctctgcctcataggcctcctctcgccagcactggacgctgcctcccatgcggtcagcaggcaggctctgttgggtgtaggccagcgactgcaccacaccggaacccacaggcagggccagagccagcgcaccctgtggagcgaggggtagggagtggttatctgtggctgggctgtaccctggtttctgaggtccctgggcaccccccatctcagtcctgcctgaagccctcagtcac

SEQ ID NO: 388808 - DNA, 1997 bp, Homo sapiens
cggtctttcgcccaaagcacgttccctacttcctgtgctcttgcggagacgcgcgcgtcggggtttaacgcgtttctgggccgccgtaagcccggcctaggggcagctttgactcgagagccggctataggcgcatggaaggttccctggaacgggaggcgccagcgggggcgctggccgccgtgctaaagcacagctcgacgttgccgcccgaaagcacccaggtccggggctacgacttcaaccgcggtgtgaattaccgcgcactgctggaggccttcggcaccaccggcttccaagcaaccaacttcgggcgcgctgtacagcaagtcaatgccatgatcgagaagaagctggaaccactgtcacaggatgaagaccagcacgcggacctgacccagagccgccgcccacttaccagctgcaccattttcctgggatatacatccaacctcatcagttcaggcatccgtgagaccattcgctaccttgtgcagcacaacatggtggacgtattggtgaccacagctggcggcgtggaggaagacctcatcaagtgcctggcgcccacatacttgggcgagtttagcctcagggggaaggagctccgggagaacgggatcaataggatcggaaacctgctggtgcccaatgagaattactgcaagtttgaggactggctgatgcccattctggaccagatggtgatggagcagaacacagagggtgtaaagtggacgccttctaagatgatcgcccggctgggcaaggagatcaacaacccagagtccgtgtattactgggcccagaagaaccacatccctgtgtttagtcccgcacttacagacggctcgctgggcgacatgatcttcttccattcctacaagaacccgggcctggtcctggacatcgttgaggcccaggagtttgatggctctgactcaggtgcccgaccagacgaggctgtctcctggggcaagatccgggtggatgcacagcccgtcaaggtctatgctgacgcctccctggtcttccccctgcttgtggctgaaacctttgcccagaagatggatgccttcatgcatgagaagaacgaggactgagcggctgcggtcccaggaaggtcttaccccctcttctatttattaatttgcagacccagcccctcccctactttttggtcagctacgtctctagaataagatggtatctgaagtcaaaaaaaaaaaaaaaaaaaaacaaaaaaaaacaaaaaaaaaaaaacacctcgggcggcgatccatctatttgcggggggcgagcgagaaaagagaggggatagagaaaagacgcgcaaacgtggcccaaataggtgttcccctagcgacccagcggttttcttgtgcacaaccagggggggaaacactcgcgcgcgggctctccccccaatatagggagaggctcggctttaataactttctggcgaaaaaagacccgcggggttataaccccgggttatactagagatgacaccctccgaaaaaaactggagcgacgatagaaggaccacgacaagaaggagaccggacaccgaccgagaagaacagaaccagacgaacggacggagcacgcgagcacagatgggagcaacacgaaagaaggggcagacgagcgagaagacacgaagaagaacaggggggagaaaaaccagacagcccgacatagcacgccagaccaccggaaacagagcagaaagaaacagggaaggtacccggcgaaagacagcaggacgaacaggcaagctgcggccacagacagagccgggaggaagacagagcgaccgcagagacgcagaggggaaagcaacagacgaacagacggcagaagaaagaagggggagagggcgaggggggagaagagcggggacagagggggggagagagcgaaagaggagaaggggagaagaggagaggggggaagggggccgagaaaaaaacgaaaagggaggaggagagcgc

SEQ ID NO: 388809 - DNA, 1494 bp, Homo sapiens
cggtctttcgcccaaagcacgttccctacttcctgtgctcttgcggagacgcgcgcgtcggggtttaacgcgtttctgggccgccgtaagcccggcctaggggcagctttgactcgagagccggctataggcgcatggaaggttccctggaacgggaggcgccagcgggggcgctggccgccgtgctaaagcacagctcgacgttgccgcccgaaagcacccaggtccggggctacgacttcaaccgcggtgtgaattaccgcgcactgctggaggccttcggcaccaccggcttccaagcaaccaacttcgggcgcgctgtacagcaagtcaatgccatgatcgagaagaagctggaaccactgtcacaggatgaagaccagcacgcggacctgacccagagccgccgcccacttaccagctgcaccattttcctgggatatacatccaacctcatcagttcaggcatccgtgagaccattcgctaccttgtgcagcacaacatggtggacgtattggtgaccacagctggcggcgtggaggaagacctcatcaagtgcctggcgcccacatacttgggcgagtttagcctcagggggaaggagctccgggagaacgggatcaataggatcggaaacctgctggtgcccaatgagaattactgcaagtttgaggactggctgatgcccattctggaccagatggtgatggagcagaacacagagggtgtaaagtggacgccttctaagatgatcgcccggctgggcaaggagatcaacaacccagagtccgtgtattactgggcccagaagaaccacatccctgtgtttagtcccgcacttacagacggctcgctgggcgacatgatcttcttccattcctacaagaacccgggcctggtcctggacatcgttgagggtgcccgaccagacgaggctgtctcctggggcaagatccgggtggatgcacagcccgtcaaggtctatgctgacgcctccctggtcttccccctgcttgtggctgaaacctttgcccagaagatggatgccttcatgcatgagaagaacgaggactgagcggctgcggtcccaggaaggtcttaccccctcttctatttattaatttgcagacccagcccctcccctactttttggtcagctacgtctctagaataagatggtatctgaagtccttccatgtctgtgtctcggtccttggtcctgttggtgggtcccctggcttcagcctgctccatcctctgcctcataggcctcctctcgccagcactggacgctgcctcccatgcggtcagcaggcaggctctgttgggtgtaggccagcgactgcaccacaccggaacccacaggcagggccagagccagcgcaccctgtggagcgaggggtagggagtggttatctgtggctgggctgtaccctggtttctgaggtccctgggcaccccccatctcagtcctgcctgaagccctcagtcac

SEQ ID NO: 388810 - DNA, 1558 bp, Homo sapiens
cggtctttcgcccaaagcacgttccctacttcctgtgctcttgcggagacgcgcgcgtcggggtttaacgcgtttctgggccgccgtaagcccggcctaggggcagctttgactcgagagccggctataggcgcatggaaggttccctggaacgggaggcgccagcgggggcgctggccgccgtgctaaagcacagctcgacgttgccgcccgaaagcacccaggtccggggctacgacttcaaccgcggtgtgaattaccgcgcactgctggaggccttcggcaccaccggcttccaagcaaccaacttcgggcgcgctgtacagcaagtcaatgccatgatcgagaagaagctggaaccactgtcacaggatgaagaccagcacgcggacctgacccagagccgccgcccacttaccagctgcaccattttcctgggatatacatccaacctcatcagttcaggcatccgtgagaccattcgctaccttgtgcagcacaacatggtggacgtattggtgaccacagctggcggcgtggaggaagacctcatcaagtgcctggcgcccacatacttgggcgagtttagcctcagggggaaggagctccgggagaacgggatcaataggatcggaaacctgctggtgcccaatgagaattactgcaagtttgaggactggctgatgcccattctggaccagatggtgatggagcagaacacagagggtgtaaagtggacgccttctaagatgatcgcccggctgggcaaggagatcaacaacccagagtccgtgtattactgggcccagaagaaccacatccctgtgtttagtcccgcacttacagacggctcgctgggcgacatgatcttcttccattcctacaagaacccgggcctggtcctggacatcgttgaggcggaacggggccgactacgctgtttacatcaacacagcccaggagtttgatggctctgactcaggtgcccgaccagacgaggctgtctcctggggcaagatccgggtggatgcacagcccgtcaaggtctatgctgacgcctccctggtcttccccctgcttgtggctgaaacctttgcccagaagatggatgccttcatgcatgagaagaacgaggactgagcggctgcggtcccaggaaggtcttaccccctcttctatttattaatttgcagacccagcccctcccctactttttggtcagctacgtctctagaataagatggtatctgaagtccttccatgtctgtgtctcggtccttggtcctgttggtgggtcccctggcttcagcctgctccatcctctgcctcataggcctcctctcgccagcactggacgctgcctcccatgcggtcagcaggcaggctctgttgggtgtaggccagcgactgcaccacaccggaacccacaggcagggccagagccagcgcaccctgtggagcgaggggtagggagtggttatctgtggctgggctgtaccctggtttctgaggtccctgggcaccccccatctcagtcctgcctgaagccctcagtcac

SEQ ID NO: 388811 - DNA, 2705 bp, Homo sapiens
cggtctttcgcccaaagcacgttccctacttcctgtgctcttgcggagacgcgcgcgtcggggtttaacgcgtttctgggccgccgtaagcccggcctaggggcagctttgactcgagagccggctataggcgcatggaaggttccctggaacgggaggcgccagcgggggcgctggccgccgtgctaaagcacagctcgacgttgccgcccgaaagcacccaggtccggggctacgacttcaaccgcggtgtgaattaccgcgcactgctggaggccttcggcaccaccggcttccaagcaaccaacttcgggcgcgctgtacagcaagtcaatgccatgatcgagaagaagctggaaccactgtcacaggatgaagaccagcacgcggacctgacccagagccgccgcccacttaccagctgcaccattttcctgggatatacatccaacctcatcagttcaggcatccgtgagaccattcgctaccttgtgcagcacaacatggtggacgtattggtgaccacagctggcggcgtggaggaagacctcatcaagtgcctggcgcccacatacttgggcgagtttagcctcagggggaaggagctccgggagaacgggatcaataggatcggaaacctgctggtgcccaatgagaattactgcaagtttgaggactggctgatgcccattctggaccagatggtgatggagcagaacacagagggtgtaaagtggacgccttctaagatgatcgcccggctgggcaaggagatcaacaacccagagtccgtgtattactgggcccagaagaaccacatccctgtgtttagtcccgcacttacagacggctcgctgggcgacatgatcttcttccattcctacaagaacccgggcctggtcctggacatcgttgagggtgaggcgctagggccacagaggagaggggaaggagggctggctgagtccaaggcctgacttcggcgctcttcccccagacctgaggctcatcaacacacaggccatctttgccaagtgcactgggatgatcattctgggcgggggcgtggtcaagcaccacattgccaatgccaacctcatggtgagtgggggtggcgcttcggcccactctgcagacatgctgtgtggtgggcctatgccatgtgctgggtagacagcatgaactagacaggccaggatccctgctccccgggactgatgttctagtaggggagatagcaaacaagtgacatccacgtcagggggcagtcattgctacggggaatactaaatgatggcatgagaagagaaaggggtgctgtccaacaagaggtttggaaggaggcttctggaagtgtgagctgggagcaggggtttggggaggcatctcccaggagctatgtggttgtctcccgtgccaggagtttgtgctgctgtactagcattgagcttctggattgcaaagttcccaggagagggaacagccattgcaaaggctctggggcgcctgaagtaatccaggaacagctgggtacctggtgaggggaaggtggagtggtgagggccaggaggtgatgcagggaggtgccacagggagcctgctgggccctgtgggctgaggcggggctttggcttttgcactgagagaagtgggagaggacttgactcgggttcccatgctccccctggtggccatgtggtgaacagatggtggcaggtgagtgagaactccagtccaggacagtggtgaccatgcagggatcaggaggcaggcggtggttggatttggagggcttctgaagatagagttgctggcagctcctgccttgcagatggggcagggttgttgacacctggctgttgggtctggggaaacacagccatcgttgcccagcagctctagtgaccccagacattgacatgggccctgtctgggagcgaatgtctgtgaagggcttccttcatctgggacacacctctcagcctgtttggctacggtgtcctccctctgtgtctgtctcctgtgactggctgactgggcccaccgtgcccccgcctccccacagcggaacggggccgactacgctgtttacatcaacacagcccaggagtttgatggctctgactcaggtgcccgaccagacgaggctgtctcctggggcaagatccgggtggatgcacagcccgtcaaggtctatgctgacgcctccctggtcttccccctgcttgtggctgaaacctttgcccagaagatggatgccttcatgcatgagaagaacgaggactgagcggctgcggtcccaggaaggtcttaccccctcttctatttattaatttgcagacccagcccctcccctactttttggtcagctacgtctctagaataagatggtatctgaagtccttccatgtctgtgtctcggtccttggtcctgttggtgggtcccctggcttcagcctgctccatcctctgcctcataggcctcctctcgccagcactggacgctgcctcccatgcggtcagcaggcaggctctgttgggtgtaggccagcgactgcaccacaccggaacccacaggcagggccagagccagcgcaccctgtggagcgaggggtagggagtggttatctgtggctgggctgtaccctggtttctgaggtccctgggcaccccccatctcagtcctgcctgaagccctcagtcac

SEQ ID NO: 388812 - DNA, 1481 bp, Homo sapiens
cagcggggaagggaccggatctgaaaggagatgctctctgattcctaaaagggtgggggctggctgggcgcggtggcgcatgcctataatcccagcattttgggaagccgaggcgggtggatcaagagaagaggagttcgagacaagcctggccaacatgatcgagaagaagctggaaccactgtcacaggatgaagaccagcacgcggacctgacccagagccgccgcccacttaccagctgcaccattttcctgggatatacatccaacctcatcagttcaggcatccgtgagaccattcgctaccttgtgcagcacaacatggtggacgtattggtgaccacagctggcggcgtggaggaagacctcatcaagtgcctggcgcccacatacttgggcgagtttagcctcagggggaaggagctccgggagaacgggatcaataggatcggaaacctgctggtgcccaatgagaattactgcaagtttgaggactggctgatgcccattctggaccagatggtgatggagcagaacacagagggtgtaaagtggacgccttctaagatgatcgcccggctgggcaaggagatcaacaacccagagtccgtgtattactgggcccagaagaaccacatccctgtgtttagtcccgcacttacagacggctcgctgggcgacatgatcttcttccattcctacaagaacccgggcctggtcctggacatcgttgaggacctgaggctcatcaacacacaggccatctttgccaagtgcactgggatgatcattctgggcgggggcgtggtcaagcaccacattgccaatgccaacctcatgcggaacggggccgactacgctgtttacatcaacacagcccaggagtttgatggctctgactcaggtgcccgaccagacgaggctgtctcctggggcaagatccgggtggatgcacagcccgtcaaggtctatgctgacgcctccctggtcttccccctgcttgtggctgaaacctttgcccagaagatggatgccttcatgcatgagaagaacgaggactgagcggctgcggtcccaggaaggtcttaccccctcttctatttattaatttgcagacccagcccctcccctactttttggtcagctacgtctctagaataagatggtatctgaagtccttccatgtctgtgtctcggtccttggtcctgttggtgggtcccctggcttcagcctgctccatcctctgcctcataggcctcctctcgccagcactggacgctgcctcccatgcggtcagcaggcaggctctgttgggtgtaggccagcgactgcaccacaccggaacccacaggcagggccagagccagcgcaccctgtggagcgaggggtagggagtggttatctgtggctgggctgtaccctggtttctgaggtccctgggcaccccccatctcagtcctgcctgaagccctcagtcac

SEQ ID NO: 388813 - DNA, 1770 bp, Homo sapiens
cggtctttcgcccaaagcacgttccctacttcctgtgctcttgcggagacgcgcgcgtcggggtttaacgcgtttctgggccgccgtaagcccggcctaggggcagctttgactcgagagccggctataggcgcatggaaggttccctggaacgggaggcgccagcgggggcgctggccgccgtgctaaagcacagctcgacgttgccgcccgaaagcacccaggtccggggctacgacttcaaccgcggtgtgaattaccgcgcactgctggaggccttcggcaccaccggcttccaagcaaccaacttcgggcgcgctgtacagcaagtcaatgccatgatcgagaagaagctggaaccactgtcacaggatgaagaccagcacgcggacctgacccagagccgccgcccacttaccagctgcaccattttcctgggatatacatccaacctcatcagttcaggcatccgtgagaccattcgctaccttgtgcagcacaacatgcagagctccctcataagagtcactggacaaggatgaggttagaagttctgcccagaatgagggcaggggcttccttcttgggccaaattcactgccttgtggctgcaggtggacgtattggtgaccacagctggcggcgtggaggaagacctcatcaagtgcctggcgcccacatacttgggcgagtttagcctcagggggaaggagctccgggagaacgggatcaataggatcggaaacctgctggtgcccaatgagaattactgcaagtttgaggactggctgatgcccattctggaccagatggtgatggagcagaacacagagggtgtaaagtggacgccttctaagatgatcgcccggctgggcaaggagatcaacaacccagagtccgtgtattactgggcccagaagaaccacatccctgtgtttagtcccgcacttacagacggctcgctgggcgacatgatcttcttccattcctacaagaacccgggcctggtcctggacatcgttgaggacctgaggctcatcaacacacaggccatctttgccaagtgcactgggatgatcattctgggcgggggcgtggtcaagcaccacattgccaatgccaacctcatgcggaacggggccgactacgctgtttacatcaacacagcccaggagtttgatggctctgactcaggtgcccgaccagacgaggctgtctcctggggcaagatccgggtggatgcacagcccgtcaaggtctatgctgacgcctccctggtcttccccctgcttgtggctgaaacctttgcccagaagatggatgccttcatgcatgagaagaacgaggactgagcggctgcggtcccaggaaggtcttaccccctcttctatttattaatttgcagacccagcccctcccctactttttggtcagctacgtctctagaataagatggtatctgaagtccttccatgtctgtgtctcggtccttggtcctgttggtgggtcccctggcttcagcctgctccatcctctgcctcataggcctcctctcgccagcactggacgctgcctcccatgcggtcagcaggcaggctctgttgggtgtaggccagcgactgcaccacaccggaacccacaggcagggccagagccagcgcaccctgtggagcgaggggtagggagtggttatctgtggctgggctgtaccctggtttctgaggtccctgggcaccccccatctcagtcctgcctgaagccctcagtcac

SEQ ID NO: 388814 - DNA, 1349 bp, Homo sapiens
tgattcttggtgtgggggcgggttctagatcgagaagaagctggaaccactgtcacaggatgaagaccagcacgcggacctgacccagagccgccgcccacttaccagctgcaccattttcctgggatatacatccaacctcatcagttcaggcatccgtgagaccattcgctaccttgtgcagcacaacatggtggacgtattggtgaccacagctggcggcgtggaggaagacctcatcaagtgcctggcgcccacatacttgggcgagtttagcctcagggggaaggagctccgggagaacgggatcaataggatcggaaacctgctggtgcccaatgagaattactgcaagtttgaggactggctgatgcccattctggaccagatggtgatggagcagaacacagagggtgtaaagtggacgccttctaagatgatcgcccggctgggcaaggagatcaacaacccagagtccgtgtattactgggcccagaagaaccacatccctgtgtttagtcccgcacttacagacggctcgctgggcgacatgatcttcttccattcctacaagaacccgggcctggtcctggacatcgttgaggacctgaggctcatcaacacacaggccatctttgccaagtgcactgggatgatcattctgggcgggggcgtggtcaagcaccacattgccaatgccaacctcatgcggaacggggccgactacgctgtttacatcaacacagcccaggagtttgatggctctgactcaggtgcccgaccagacgaggctgtctcctggggcaagatccgggtggatgcacagcccgtcaaggtctatgctgacgcctccctggtcttccccctgcttgtggctgaaacctttgcccagaagatggatgccttcatgcatgagaagaacgaggactgagcggctgcggtcccaggaaggtcttaccccctcttctatttattaatttgcagacccagcccctcccctactttttggtcagctacgtctctagaataagatggtatctgaagtccttccatgtctgtgtctcggtccttggtcctgttggtgggtcccctggcttcagcctgctccatcctctgcctcataggcctcctctcgccagcactggacgctgcctcccatgcggtcagcaggcaggctctgttgggtgtaggccagcgactgcaccacaccggaacccacaggcagggccagagccagcgcaccctgtggagcgaggggtagggagtggttatctgtggctgggctgtaccctggtttctgaggtccctgggcaccccccatctcagtcctgcctgaagccctcagtcac

SEQ ID NO: 388815 - DNA, 1560 bp, Homo sapiens
cggtctttcgcccaaagcacgttccctacttcctgtgctcttgcggagacgcgcgcgtcggggtttaacgcgtttctgggccgccgtaagcccggcctaggggcagctttgactcgagagccggctataggcgcatggaaggttccctggaacgggaggcgccagcgggggcgctggccgccgtgctaaagcacagctcgacgttgccgcccgaaagcacccaggtccggggctacgacttcaaccgcggtgtgaattaccgcgcactgctggaggccttcggcaccaccggcttccaagcaaccaacttcgggcgcgctgtacagcaagtcaatgccatgatcgagaagaagctggaaccactgtcacaggatgaagaccagttcactgccttgtggctgcaggtggacgtattggtgaccacagctggcggcgtggaggaagacctcatcaagtgcctggcgcccacatacttgggcgagtttagcctcagggggaaggagctccgggagaacgggatcaataggatcggaaacctgctggtgcccaatgagaattactgcaagtttgaggactggctgatgcccattctggaccagatggtgatggagcagaacacagagggtgtaaagtggacgccttctaagatgatcgcccggctgggcaaggagatcaacaacccagagtccgtgtattactgggcccagaagaaccacatccctgtgtttagtcccgcacttacagacggctcgctgggcgacatgatcttcttccattcctacaagaacccgggcctggtcctggacatcgttgaggacctgaggctcatcaacacacaggccatctttgccaagtgcactgggatgatcattctgggcgggggcgtggtcaagcaccacattgccaatgccaacctcatgcggaacggggccgactacgctgtttacatcaacacagcccaggagtttgatggctctgactcaggtgcccgaccagacgaggctgtctcctggggcaagatccgggtggatgcacagcccgtcaaggtctatgctgacgcctccctggtcttccccctgcttgtggctgaaacctttgcccagaagatggatgccttcatgcatgagaagaacgaggactgagcggctgcggtcccaggaaggtcttaccccctcttctatttattaatttgcagacccagcccctcccctactttttggtcagctacgtctctagaataagatggtatctgaagtccttccatgtctgtgtctcggtccttggtcctgttggtgggtcccctggcttcagcctgctccatcctctgcctcataggcctcctctcgccagcactggacgctgcctcccatgcggtcagcaggcaggctctgttgggtgtaggccagcgactgcaccacaccggaacccacaggcagggccagagccagcgcaccctgtggagcgaggggtagggagtggttatctgtggctgggctgtaccctggtttctgaggtccctgggcaccccccatctcagtcctgcctgaagccctcagtcac

SEQ ID NO: 388816 - DNA, 1067 bp, Homo sapiens
cggtctttcgcccaaagcacgttccctacttcctgtgctcttgcggagacgcgcgcgtcggggtttaacgcgtttctgggccgccgtaagcccggcctaggggcagctttgactcgagagccggctataggcgcatggaaggttccctggaacgggaggcgccagcgggggcgctggccgccgtgctaaagcacagctcgacgttgccgcccgaaagcacccaggtccggggctacgacttcaaccgcggtgtgaattaccgcgcactgctggaggccttcggcaccaccggcttccaagcaaccaacttcgggcgcgctgtacagcaagtcaatgccatgatcgagaagaagctggaaccactgtcacaggatgaagaccaggcgggggcgtggtcaagcaccacattgccaatgccaacctcatgcggaacggggccgactacgctgtttacatcaacacagcccaggagtttgatggctctgactcaggtgcccgaccagacgaggctgtctcctggggcaagatccgggtggatgcacagcccgtcaaggtctatgctgacgcctccctggtcttccccctgcttgtggctgaaacctttgcccagaagatggatgccttcatgcatgagaagaacgaggactgagcggctgcggtcccaggaaggtcttaccccctcttctatttattaatttgcagacccagcccctcccctactttttggtcagctacgtctctagaataagatggtatctgaagtccttccatgtctgtgtctcggtccttggtcctgttggtgggtcccctggcttcagcctgctccatcctctgcctcataggcctcctctcgccagcactggacgctgcctcccatgcggtcagcaggcaggctctgttgggtgtaggccagcgactgcaccacaccggaacccacaggcagggccagagccagcgcaccctgtggagcgaggggtagggagtggttatctgtggctgggctgtaccctggtttctgaggtccctgggcaccccccatctcagtcctgcctgaagccctcagtcac

SEQ ID NO: 388817 - DNA, 1090 bp, Homo sapiens
cggtctttcgcccaaagcacgttccctacttcctgtgctcttgcggagacgcgcgcgtcggggtttaacgcgtttctgggccgccgtaagcccggcctaggggcagctttgactcgagagccggctataggcgcatggaaggttccctggaacgggaggcgccagcgggggcgctggccgccgtgctaaagcacagctcgacgttgccgcccgaaagcacccaggtccggggctacgacttcaaccgcggtgtgaattaccgcgcactgctggaggccttcggcaccaccggcttccaagcaaccaacttcgggcgcgctgtacagcaagtcaatgccatgatcgagaagaagctggaaccactgtcacaggatgaagaccagttcactgccttgtggctgcaggtggacgtattggtgaccacagctggcggcgtggaggaagacctcatcaagtgcctggcgcccacatacttgggcgagtttagcctcagggggaaggagctccgggagaacgggatcaataggatcggaaacctgctggtgcccaatgagaattactgcaagtttgaggactggctgatgcccattctggaccagatggtgatggagcagaacacagagggtgtaaagtggacgccttctaagatgatcgcccggctgggcaaggagatcaacaacccagagtccgtgtattactgggcccagaagaaccacatccctgtgtttagtcccgcacttacagacggctcgctgggcgacatgatcttcttccattcctacaagaacccgggcctggtcctggacatcgttgaggacctgaaggtcaattcacaccacaggccatccttggcccaagtggcacggggcatgatccttctcgcgcgggggggcgtgggtccaagccaaccacatttggccaatggcccaacctccatgcggaacgggggccgaacaaagctgtttacactcaaaccaggccaagagttttgaagggcctgacatcacggggcccgacacaaggaggtggtcctgtggacaaacacgcgggatggtaaccgtcagggcttggtgagcgcgcctggtgttcc

SEQ ID NO: 388818 - DNA, 637 bp, Homo sapiens
tcgagctcggtatcctgcatgatatgcatccatcttctgggcaaaggtttcagccacaagcagggggaagaccagggaggcgtctgcatagaccttgacggcctgtgcatccacccggatcttgtctatgctgacgcctccctggtcttccccctgcttgtggctgaaacctttgcccagaagatggatgccttcatgcatgagaagaacgaggactgagcggctgcggtcccaggaaggtcttaccccctcttctatttattaatttgcagacccagcccctcccctactttttggtcagctacgtctctagaataagatggtatctgaagtccttccatgtctgtgtctcggtccttggtcctgttggtgggtcccctggcttcagcctgctccatcctctgcctcataggcctcctctcgccagcactggacgctgcctcccatgcggtcagcaggcaggctctgttgggtgtaggccagcgactgcaccacaccggaacccacaggcagggccagagccagcgcaccctgtggagcgaggggtagggagtggttatctgtggctgggctgtaccctggtttctgaggtccctgggcaccccccatctcagtcctgcctgaagccctcagtcac

SEQ ID NO: 388819 - DNA, 1662 bp, Homo sapiens
cggtctttcgcccaaagcacgttccctacttcctgtgctcttgcggagacgcgcgcgtcggggtttaacgcgtttctgggccgccgtaagcccggcctaggggcagctttgactcgagagccggctataggcgcatggaaggttccctggaacgggaggcgccagcgggggcgctggccgccgtgctaaagcacagctcgacgttgccgcccgaaagcacccaggtccggggctacgacttcaaccgcggtgtgaattaccgcgcactgctggaggccttcggcaccaccggcttccaagcaaccaacttcgggcgcgctgtacagcaagtcaatgccatgatcgagaagaagctggaaccactgtcacaggatgaagaccagcacgcggacctgacccagagccgccgcccacttaccagctgcaccattttcctgggatatacatccaacctcatcagttcaggcatccgtgagaccattcgctaccttgtgcagcacaacatggtggacgtattggtgaccacagctggcggcgtggaggaagacctcatcaagtgcctggcgcccacatacttgggcgagtttagcctcagggggaaggagctccgggagaacgggatcaataggatcggaaacctgctggtgcccaatgagaattactgcaagtttgaggactggctgatgcccattctggaccagatggtgatggagcagaacacagagggtgtaaagtggacgccttctaagatgatcgcccggctgggcaaggagatcaacaacccagagtccgtgtattactgggcccagaagaaccacatccctgtgtttagtcccgcacttacagacggctcgctgggcgacatgatcttcttccattcctacaagaacccgggcctggtcctggacatcgttgaggacctgaggctcatcaacacacaggccatctttgccaagtgcactgggatgatcattctgggcgggggcgtggtcaagcaccacattgccaatgccaacctcatgcggaacggggccgactacgctgtttacatcaacacagcccaggagtttgatggctctgactcaggtgcccgaccagacgaggctgtctcctggggcaagatccgggtggatgcacagcccgtcaaggtctatgctgacgcctccctggtcttccccctgcttgtggctgaaacctttgcccagaagatggatgccttcatgcatgagaagaacgaggactgagcggctgcggtcccaggaaggtcttaccccctcttctatttattaatttgcagacccagcccctcccctactttttggtcagctacgtctctagaataagatggtatctgaagtccttccatgtctgtgtctcggtccttggtcctgttggtgggtcccctggcttcagcctgctccatcctctgcctcataggcctcctctcgccagcactggacgctgcctcccatgcggtcagcaggcaggctctgttgggtgtaggccagcgactgcaccacaccggaacccacaggcagggccagagccagcgcaccctgtggagcgaggggtagggagtggttatctgtggctgggctgtaccctggtttctgaggtccctgggcaccccccatctcagtcctgcctgaagccctcagtcac

SEQ ID NO: 388820 - DNA, 2138 bp, Homo sapiens
cggtctttcgcccaaagcacgttccctacttcctgtgctcttgcggagacgcgcgcgtcggggtttaacgcgtttctgggccgccgtaagcccggcctaggggcagctttgactcgagagccggctataggcgcatggaaggttccctggaacgggaggcgccagcgggggcgctggccgccgtgctaaagcacagctcgacgttgccgcccgaaagcacccaggtccggggctacgacttcaaccgcggtgtgaattaccgcgcactgctggaggccttcggcaccaccggcttccaagcaaccaacttcgggcgcgctgtacagcaagtcaatgccatgatcgagaagaagctggaaccactgtcacaggatgaagaccagcacgcggacctgacccagagccgccgcccacttaccagctgcaccattttcctgggatatacatccaacctcatcagttcaggcatccgtgagaccattcgctaccttgtgcagcacaacatggtggacgtattggtgaccacagctggcggcgtggaggaagacctcatcaagtgcctggcgcccacatacttgggcgagtttagcctcagggggaaggagctccgggagaacgggatcaataggatcggaaacctgctggtgcccaatgagaattactgcaagtttgaggactggctgatgcccattctggaccagatggtgatggagcagaacacagagggtgtaaagtggacgccttctaagatgatcgcccggctgggcaaggagatcaacaacccagagtccgtgtattactgggcccagaagaaccacatccctgtgtttagtcccgcacttacagacggctcgctgggcgacatgatcttcttccattcctacaagaacccgggcctggtcctggacatcgttgaggacctgaggctcatcaacacacaggccatctttgccaagtgcactgggatgatcattctgggcgggggcgtggtcaagcaccacattgccaatgccaacctcatgcggaacggggccgactacgctgtttacatcaacacagcccaggagtttgatggctctgactcaggtgcccgaccagacgaggctgtctcctggggcaagatccgggtggatgcacagcccgtcaaggtctatgctgacgcctccctggtcttccccctgcttgtggctgaaacctttgcccagaagatggatgccttcatgcatgagaagaacgaggactgagcggctgcggtcccaggaaggtcttaccccctcttctatttattaatttgcagacccagcccctcccctactttttggtcagctacgtctctagaataagatggtatctgaagtcaaaaaaaaaaaaaaaaaaaaacaaaaaaaaacaaaaaaaaaaaaacacctcgggcggcgatccatctatttgcggggggcgagcgagaaaagagaggggatagagaaaagacgcgcaaacgtggcccaaataggtgttcccctagcgacccagcggttttcttgtgcacaaccagggggggaaacactcgcgcgcgggctctccccccaatatagggagaggctcggctttaataactttctggcgaaaaaagacccgcggggttataaccccgggttatactagagatgacaccctccgaaaaaaactggagcgacgatagaaggaccacgacaagaaggagaccggacaccgaccgagaagaacagaaccagacgaacggacggagcacgcgagcacagatgggagcaacacgaaagaaggggcagacgagcgagaagacacgaagaagaacaggggggagaaaaaccagacagcccgacatagcacgccagaccaccggaaacagagcagaaagaaacagggaaggtacccggcgaaagacagcaggacgaacaggcaagctgcggccacagacagagccgggaggaagacagagcgaccgcagagacgcagaggggaaagcaacagacgaacagacggcagaagaaagaagggggagagggcgaggggggagaagagcggggacagagggggggagagagcgaaagaggagaaggggagaagaggagaggggggaagggggccgagaaaaaaacgaaaagggaggaggagagcgc

SEQ ID NO: 388821 - DNA, 1521 bp, Homo sapiens
cggtctttcgcccaaagcacgttccctacttcctgtgctcttgcggagacgcgcgcgtcggggtttaacgcgtttctgggccgccgtaagcccggcctaggggcagctttgactcgagagccggctataggcgcatggaaggttccctggaacgggaggcgccagcgggggcgctggccgccgtgctaaagcacagctcgacgttgccgcccgaaagcacccaggtccggggctacgacttcaaccgcggtgtgaattaccgcgcactgctggaggccttcggcaccaccggcttccaagcaaccaacttcgggcgcgctgtacagcaagtcaatgccatgatcgagaagaagctggaaccactgtcacaggatgaagaccagcacgcggacctgacccagagccgccgcccacttaccagctgcaccattttcctgggatatacatccaacctcatcagttcaggcatccgtgagaccattcgctaccttgtgcagcacaacatggtggacgtattggtgaccacagctggcggcgtggaggaagacctcatcaagtgcctggcgcccacatacttgggcgagtttagcctcagggggaaggagctccgggagaacgggatcaataggatcggaaacctgctggtgcccaatgagaattactgcaagtttgaggactggctgatgcccattctggaccagatggtgatggagcagaacacagagggtgtaaagtggacgccttctaagatgatcgcccggctgggcaaggagatcaacaacccagagtccgtgtattactgggcccagaagaaccacatccctgtgtttagtcccgcacttacagacggctcgctgggcgacatgatcttcttccattcctacaagaacccgggcctggtcctggacatcgttgaggcccaggagtttgatggctctgactcaggtgcccgaccagacgaggctgtctcctggggcaagatccgggtggatgcacagcccgtcaaggtctatgctgacgcctccctggtcttccccctgcttgtggctgaaacctttgcccagaagatggatgccttcatgcatgagaagaacgaggactgagcggctgcggtcccaggaaggtcttaccccctcttctatttattaatttgcagacccagcccctcccctactttttggtcagctacgtctctagaataagatggtatctgaagtccttccatgtctgtgtctcggtccttggtcctgttggtgggtcccctggcttcagcctgctccatcctctgcctcataggcctcctctcgccagcactggacgctgcctcccatgcggtcagcaggcaggctctgttgggtgtaggccagcgactgcaccacaccggaacccacaggcagggccagagccagcgcaccctgtggagcgaggggtagggagtggttatctgtggctgggctgtaccctggtttctgaggtccctgggcaccccccatctcagtcctgcctgaagccctcagtcac

SEQ ID NO: 388822 - DNA, 1741 bp, Homo sapiens
cggtctttcgcccaaagcacgttccctacttcctgtgctcttgcggagacgcgcgcgtcggggtttaacgcgtttctgggccgccgtaagcccggcctaggggcagctttgactcgagagccggctataggcgcatggaaggttccctggaacgggaggcgccagcgggggcgctggccgccgtgctaaagcacagctcgacgttgccgcccgaaagcacccaggtccggggctacgacttcaaccgcggtgtgaattaccgcgcactgctggaggccttcggcaccaccggcttccaagcaaccaacttcgggcgcgctgtacagcaagtcaatgccatgatcgagaagaagctggaaccactgtcacaggatgaagaccagcacgcggacctgacccagagccgccgcccacttaccagctgcaccattttcctgggatatacatccaacctcatcagttcaggcatccgtgagaccattcgctaccttgtgcagcacaacatggtggacgtattggtgaccacagctggcggcgtggaggaagacctcatcaagtgcctggcgcccacatacttgggcgagtttagcctcagggggaaggagctccgggagaacgggatcaataggatcggaaacctgctggtgcccaatgagaattactgcaagtttgaggactggctgatgcccattctggaccagatggtgatggagcagaacacagaggtggggctggggcaacctggaggggccagttcagtgggagtcaggggaggcatggcctgaaggtcacatcctctcctagggtgtaaagtggacgccttctaagatgatcgcccggctgggcaaggagatcaacaacccagagtccgtgtattactgggcccagaagaaccacatccctgtgtttagtcccgcacttacagacggctcgctgggcgacatgatcttcttccattcctacaagaacccgggcctggtcctggacatcgttgaggacctgaggctcatcaacacacaggccatctttgccaagtgcactgggatgatcattctgggcgggggcgtggtcaagcaccacattgccaatgccaacctcatgcggaacggggccgactacgctgtttacatcaacacagcccaggagtttgatggctctgactcaggtgcccgaccagacgaggctgtctcctggggcaagatccgggtggatgcacagcccgtcaaggtctatgctgacgcctccctggtcttccccctgcttgtggctgaaacctttgcccagaagatggatgccttcatgcatgagaagaacgaggactgagcggctgcggtcccaggaaggtcttaccccctcttctatttattaatttgcagacccagcccctcccctactttttggtcagctacgtctctagaataagatggtatctgaagtccttccatgtctgtgtctcggtccttggtcctgttggtgggtcccctggcttcagcctgctccatcctctgcctcataggcctcctctcgccagcactggacgctgcctcccatgcggtcagcaggcaggctctgttgggtgtaggccagcgactgcaccacaccggaacccacaggcagggccagagccagcgcaccctgtggagcgaggggtagggagtggttatctgtggctgggctgtaccctggtttctgaggtccctgggcaccccccatctcagtcctgcctgaagccctcagtcac

SEQ ID NO: 388823 - DNA, 1900 bp, Homo sapiens
cggtctttcgcccaaagcacgttccctacttcctgtgctcttgcggagacgcgcgcgtcggggtttaacgcgtttctgggccgccgtaagcccggcctaggggcagctttgactcgagagccggctataggcgcatggaaggttccctggaacgggaggcgccagcgggggcgctggccgccgtgctaaagcacagctcgacgttgccgcccgaaagcacccaggtccggggctacgacttcaaccgcggtgtgaattaccgcgcactgctggaggccttcggcaccaccggcttccaagcaaccaacttcgggcgcgctgtacagcaagtcaatgccatgatcgagaagaagctggaaccactgtcacaggatgaagaccagcacgcggacctgacccagagccgccgcccacttaccagctgcaccattttcctgggatatacatccaacctcatcagttcaggcatccgtgagaccattcgctaccttgtgcagcacaacatggtggggacctggtgaggccgtggccttggcctctgggtcaatgggcaatgcagttattgatcgtttaagtgagatgggcagataggggtctgttataagcagaggaatagaatcaagttttgttttgtagcagagctccctcataagagtcactggacaaggatgaggttagaagttctgcccagaatgagggcaggggcttccttcttgggccaaattcactgccttgtggctgcaggtggacgtattggtgaccacagctggcggcgtggaggaagacctcatcaagtgcctggcgcccacatacttgggcgagtttagcctcagggggaaggagctccgggagaacgggatcaataggatcggaaacctgctggtgcccaatgagaattactgcaagtttgaggactggctgatgcccattctggaccagatggtgatggagcagaacacagagggtgtaaagtggacgccttctaagatgatcgcccggctgggcaaggagatcaacaacccagagtccgtgtattactgggcccagaagaaccacatccctgtgtttagtcccgcacttacagacggctcgctgggcgacatgatcttcttccattcctacaagaacccgggcctggtcctggacatcgttgaggacctgaggctcatcaacacacaggccatctttgccaagtgcactgggatgatcattctgggcgggggcgtggtcaagcaccacattgccaatgccaacctcatgcggaacggggccgactacgctgtttacatcaacacagcccaggagtttgatggctctgactcaggtgcccgaccagacgaggctgtctcctggggcaagatccgggtggatgcacagcccgtcaaggtctatgctgacgcctccctggtcttccccctgcttgtggctgaaacctttgcccagaagatggatgccttcatgcatgagaagaacgaggactgagcggctgcggtcccaggaaggtcttaccccctcttctatttattaatttgcagacccagcccctcccctactttttggtcagctacgtctctagaataagatggtatctgaagtccttccatgtctgtgtctcggtccttggtcctgttggtgggtcccctggcttcagcctgctccatcctctgcctcataggcctcctctcgccagcactggacgctgcctcccatgcggtcagcaggcaggctctgttgggtgtaggccagcgactgcaccacaccggaacccacaggcagggccagagccagcgcaccctgtggagcgaggggtagggagtggttatctgtggctgggctgtaccctggtttctgaggtccctgggcaccccccatctcagtcctgcctgaagccctcagtcac

SEQ ID NO: 388824 - DNA, 1627 bp, Homo sapiens
cggtctttcgcccaaagcacgttccctacttcctgtgctcttgcggagacgcgcgcgtcggggtttaacgcgtttctgggccgccgtaagcccggcctaggggcagctttgactcgagagccggctataggcgcatggaaggttccctggaacgggaggcgccagcgggggcgctggccgccgtgctaaagcacagctcgacgttgccgcccgaaagcacccaggtccggggctacgacttcaaccgcggtgtgaattaccgcgcactgctggaggccttcggcaccaccggcttccaagcaaccaacttcgggcgcgctgtacagcaagtcaatgccatgatcgagaagaagctggaaccactgtcacaggatgaagaccagcacgcggacctgacccagagccgccgcccacttaccagctgcaccattttcctgggatatacatccaacctcatcagttcaggcatccgtggacgtattggtgaccacagctggcggcgtggaggaagacctcatcaagtgcctggcgcccacatacttgggcgagtttagcctcagggggaaggagctccgggagaacgggatcaataggatcggaaacctgctggtgcccaatgagaattactgcaagtttgaggactggctgatgcccattctggaccagatggtgatggagcagaacacagagggtgtaaagtggacgccttctaagatgatcgcccggctgggcaaggagatcaacaacccagagtccgtgtattactgggcccagaagaaccacatccctgtgtttagtcccgcacttacagacggctcgctgggcgacatgatcttcttccattcctacaagaacccgggcctggtcctggacatcgttgaggacctgaggctcatcaacacacaggccatctttgccaagtgcactgggatgatcattctgggcgggggcgtggtcaagcaccacattgccaatgccaacctcatgcggaacggggccgactacgctgtttacatcaacacagcccaggagtttgatggctctgactcaggtgcccgaccagacgaggctgtctcctggggcaagatccgggtggatgcacagcccgtcaaggtctatgctgacgcctccctggtcttccccctgcttgtggctgaaacctttgcccagaagatggatgccttcatgcatgagaagaacgaggactgagcggctgcggtcccaggaaggtcttaccccctcttctatttattaatttgcagacccagcccctcccctactttttggtcagctacgtctctagaataagatggtatctgaagtccttccatgtctgtgtctcggtccttggtcctgttggtgggtcccctggcttcagcctgctccatcctctgcctcataggcctcctctcgccagcactggacgctgcctcccatgcggtcagcaggcaggctctgttgggtgtaggccagcgactgcaccacaccggaacccacaggcagggccagagccagcgcaccctgtggagcgaggggtagggagtggttatctgtggctgggctgtaccctggtttctgaggtccctgggcaccccccatctcagtcctgcctgaagccctcagtcac

SEQ ID NO: 388825 - DNA, 806 bp, Homo sapiens
  misc_feature (771)..(771): n is a, c, g, or t
  misc_feature (790)..(790): n is a, c, g, or t
  misc_feature (804)..(804): n is a, c, g, or t
cggtctttcgcccaaagcacgttccctacttcctgtgctcttgcggagacgcgcgcgtcggggtttaacgcgtttctgggccgccgtaagcccggcctaggggcagctttgactcgagagccggctataggcgcatggaaggttccctggaacgggaggcgccagcgggggcgctggccgccgtgctaaagcacagctcgacgttgccgcccgaaagcacccaggtccggggctacgacttcaaccgcggtgtgaattaccgcgcactgctggaggccttcggcaccaccggcttccaagcaaccaacttcgggcgcgctgtacagcaagtcaatgccatgatcgagaagaagctggaaccactgtcacaggatgaagaccagcacgcggacctgacccagagccgccgcccacttaccagctgcaccattttcctgggatatacatccaacctcatcagttcaggcatccgtgagaccattcgctaccttgtgcagcacaacatggtggacgtattggtgaccacagctggcggcgtggaggaagacctcatcaagtgcctggcgcccacatacttgggcgagtttagcctcagggggaaggagctccgggagaacgggatcaataggatcggaaacctgctggtgcccaatgagaattactgcaagtttgaggactggctgatgcccattctggaccagatggtgatggagcagaacacagaggggttgtaaaagtgggacgccttctaaagaatgattcgcccggggnttggggcaaagggaggatntaacaaaccccaanag

SEQ ID NO: 388826 - DNA, 944 bp, Homo sapiens
cggtctttcgcccaaagcacgttccctacttcctgtgctcttgcggagacgcgcgcgtcggggtttaacgcgtttctgggccgccgtaagcccggcctaggggcagctttgactcgagagccggctataggcgcatggaaggttccctggaacgggaggcgccagcgggggcgctggccgccgtgctaaagcacagctcgacgttgccgcccgaaagcacccaggtccggggctacgacttcaaccgcggtgtgaattaccgcgcactgctggaggccttcggcaccaccggcttccaagcaaccaacttcgggcgcgctgtacagcaagtcaatgccatgatcgagaagaagctggaaccactgtcacaggatgaagaccagcacgcggacctgacccagagccgccgcccacttaccagctgcaccattttcctgggatatacatccaacctcatcagttcaggcatcctgaaacctttgcccagaagatggatgccttcatgcatgagaagaacgaggactgagcggctgcggtcccaggaaggtcttaccccctcttctatttattaatttgcagacccagcccctcccctactttttggtcagctacgtctctagaataagatggtatctgaagtccttccatgtctgtgtctcggtccttggtcctgttggtgggtcccctggcttcagcctgctccatcctctgcctcataggcctcctctcgccagcactggacgctgcctcccatgcggtcagcaggcaggctctgttgggtgtaggccagcgactgcaccacaccggaacccacaggcagggccagagccagcgcaccctgtggagcgaggggtagggagtggttatctgtggctgggctgtaccctggtttctgaggtccctgggcaccccccatctcagtcctgcctgaagccctcagtcac

SEQ ID NO: 388827 - DNA, 809 bp, Homo sapiens
ctcccatgacacatggggattatgagaactaaaattcaaaatgagatctgggtggggacacagccaaaccacatcaaaaagtgattcatttgacatggtcttccctatcttctctcatttagggtaacattatttccttgaatcaaaagggtatccctgtagactttgagttcatcttgacatctttgaaccatggattatcaatttgcaaatgttatttgttgaattattgagctatattccttgaaatgcttttaagaatgatattttcattaaaataaatgagggactcgaatcctgatatttaggaagatttctcaacatcatcacatacaattatgaattattatggacacaacagtggtagtttggatttttattgtggttaaacttagaaagtacaaagtattcataaatctacattttaatattttataattcaaatgaattttaagtaactattttgatattctataaataaaaatgtcacctatactatataaggattcactcacttctctctgcattctcatcaatacctgatgtgttgtgacttttaaaaaatagccattctgactagtataaggtgacatttcattgtggttttaatttttatttctctgatgatgagactgagcattatttcatatgtttgctgtccacttgtatgtcttcttttgagaaatgcctgtttatgtattttgtccattttttaatggggttatctattttgttgttgttgttgagttgtttgaatttcttgtcgattctggatattagtacttagttggatgcatagtttgcaaata

SEQ ID NO: 388828 - DNA, 439 bp, Homo sapiens
atgcaggaacatctgagtgcctttcacaccacacaggagctaacaggcgcccaaactgggccctcttttcctgactactctattttgctctctttcctcttctgggcctacccaattgtactgctgactcaccttaactagcgatttccttctggaatcccaaatgggaaacagaagagaagcccctcaggccttagccttcaatcagtctgaaacaccttccttccctgggatttactcctgggatcaagagaacttttcattacctagttttcctaactccactccccttcttctccctgccatccactagaacaggaagaggttcagacattctacttcctcaatgtcctacccttgctccatcctgggacagcaagctcagtggtctagtcatcacaggtgaaaaaatatgtctccttatactataaaataaact

SEQ ID NO: 388829 - DNA, 665 bp, Homo sapiens
cttccatctcctcaaggacaatagtggtcctagccatccctccaatcccattactcacacgccccagccacactggcttttgttctgctcctggaattcaccagtctcttgcttgccttatggctttgctctttcctgcctggaacattcttctctcagtttccctcacatgtcatttcttcagaggggcctccctggatccatttaaactaaggcccctttattttctctagtggaatagaaatcaattattttatctcatagttgtcatctccccttgtaagtacaaatttagtggtgtgttctctcgtttaatgtctttctacctcctagagtgtaaccttcacgaaggcagtggaaatgtctgttaatcgctgtatacccagagctgagcacatcacctgttagtgtgacacacaatggatatttcttgagtattgaataaatgagggagatgttgagaggaaattctcctgctactgatcctgtcataacaagagagttcatctgggtgtgtcaagttcctaggaaagaatcattataactgatgtgtttacagattgtgttgacagttttcaaatgtgcccaaagtttccaaccagtctgagagagggtcctcctgtgctgagtccagcagaatgacccagctgtgaaatgtggtatgg

SEQ ID NO: 388830 - DNA, 2903 bp, Homo sapiens
gaattcgaggatccgggtaccatggcgcgtgaacgcagctcggctgccgctggcaggaaacaattctgcaaaaataatcatactcagcctggcaattgtctgcccctaggtctgtcgctcagccgccgtccacactcgctgcagggggggggggcacagaatttaccgcggcaagaacatccctcccagccagcagattacaatgctgcaaactaaggatctcatctggactttgtttttcctgggaactgcagtttctctgcaggtggatattgttcccagccagggggagatcagcgttggagagtccaaattcttcttatgccaagtggcaggagatgccaaagataaagacatctcctggttctcccccaatggagaaaagctcaccccaaaccagcagcggatctcagtggtgtggaatgatgattcctcctccaccctcaccatctataacgccaacatcgacgacgccggcatttacaagtgtgtggttacaggcgaggatggcagtgagtcagaggccaccgtcaacgtgaagatctttcagaagctcatgttcaagaatgcgccaaccccacaggagttccgggagggggaagatgccgtgattgtgtgtgatgtggtcagctccctcccaccaaccatcatctggaaacacaaaggccgagatgtcatcctgaaaaaagatgtccgattcatagtcctgtccaacaactacctgcagatccggggcatcaagaaaacagatgagggcacttatcgctgtgagggcagaatcctggcacggggggagatcaacttcaaggacattcaggtcattgtgaatgtgccacctaccatccaggccaggcagaatattgtgaatgccaccgccaacctcggccagtccgtcaccctggtgtgcgatgccgaaggcttcccagagcccaccatgagctggacaaaggatggggaacagatagagcaagaggaagacgatgagaagtacatcttcagcgacgatagttcccagctgaccatcaaaaaggtggataagaacgacgaggctgagtacatctgcattgctgagaacaaggctggcgagcaggatgcgaccatccacctcaaagtctttgcaaaacccaaaatcacatatgtagagaaccagactgccatggaattagaggagcaggtcactcttacctgtgaagcctccggagaccccattccctccatcacctggaggacttctacccggaacatcagcagcgaagaaaagactctggatgggcacatggtggtgcgtagccatgcccgtgtgtcgtcgctgaccctgaagagcatccagtacactgatgccggagagtacatctgcaccgccagcaacaccatcggccaggactcccagtccatgtaccttgaagtgcaatatgccccaaagctacagggccctgtggctgtgtacacttgggaggggaaccaggtgaacatcacctgcgaggtatttgcctatcccagtgccacgatctcatggtttcgggatggccagctgctgccaagctccaattacagcaatatcaagatctacaacaccccctctgccagctatctggaggtgaccccagactctgagaatgattttgggaactacaactgtactgcagtgaaccgcattgggcaggagtccttggaattcatccttgttcaagcagacaccccctcttcaccatccatcgaccaggtggagccatactccagcacagcccaggtgcagtttgatgaaccagaggccacaggtggggtgcccatcctcaaatacaaagctgagtggagagcagttggtgaagaagtatggcattccaagtggtatgatgccaaggaagccagcatggagggcatcgtcaccatcgtgggcctgaagcccgaaacaacgtacgccgtaaggctggcggcgctcaatggcaaagggctgggtgagatcagcgcggcctccgagttcaagacgcagccagtccaaggggaacccagtgcacctaagctcgaagggcagatgggagaggatggaaactctattaaagtgaacctgatcaagcaggatgacggcggctcccccatcagacactatctggtcaggtaccgagcgctctcctccgagtggaaaccagagatcaggctcccgtctggcagtgaccacgtcatgctgaagtccctggactggaatgctgagtatgaggtctacgtggtggctgagaaccagcaaggaaaatccaaggcggctcattttgtgttcaggacctcggcccagcccacagccatcccagccaacggcagccccacctcaggcctgagcaccggggccatcgtgggcatcctcatcgtcatcttcgtcctgctcctggtggttgtggacatcacctgctacttcctgaacaagtgtggcctgttcatgtgcattgcggtcaacctgtgtggaaaagccgggcccggggccaagggcaaggacatggaggagggcaaggccgccttctcgaaagatgagtccaaggagcccatcgtggaggttcgaacggaggaggagaggaccccaaaccatgatggagggaaacacacagagcccaacgagaccacgccactgacggagcccgagaagggccccgtagaagcaaagccagagtgccaggagacagaaacgaagccagcgccagccgaagtcaagacggtccccaatgacgccacacagacaaaggagaacgagagcaaagcatgatgggtgaagagaaccgagcaaagatcaaaataaaaagtgacacagcagcttcaccagagcatttccaacaccacagacacacacacgcacgcacacattctaggctagtttctggtcttatcattgagttacagcttagtgatgattttaagac

SEQ ID NO: 388831 - DNA, 919 bp, Homo sapiens
ctgtaatcccagttacttgggaggctgaggcaggagaattgtttgaacccaggagatggaggttgtaatgagacaagatcgcaccattgcactctagcctgagtgacagagcaagactccatctcaaaataataaataatatgtatattaatattgatagagaagagagagaatacctccttcaccatctttataatgatgcctacatatgtataatatatactcacccatgtatgtatacatatatagctatgagtttaatttatctccattctctccttcacctttctttgccttttctgtctgtcgtgtttccatagcaacttggcctcttcctgcccttgcaaccacagaaccagctagtgagtacagggctgagttgctctcggccagacctctgatcgcttgttgtagagccgacttctagattacagcgctgcctgttgttttcccttttattaaaagcaacagttgtgaatgcatgaaggctcctagcctggtgtggtttcctaagcatgccgtctgcttggccaagagagcaaaccaagcatcagcaaaagaacggggttgattattggaagaatactccgtgcatgaggaggcttttccaaatcgactctctagttaaaaatagccaaggattaggcaaaccctgaggacacaaaagaacagcatctccttcccggctttcgctttgctgtccctccttctgaaatacacacgctcatgcgcgtgttaatttagcagtagcaaaaagactgagagcgagggaaggaataggagaaaatggctgcttgaggaaagggagagggtgatgccgagaaggaaggagccgctgcttcctgacagcatgcccggctttgtctccgcgtacgcagagcacaggggaaggagagagctccttcctgctgtctccttt

SEQ ID NO: 388832 - DNA, 455 bp, Homo sapiens
actgtcagccctcaaaaatccagtatctccaacaaactgggtgtcacaaggctttctagtgaagtgttccacacctgtttgttgtcatctctcattaatgtgtggcatctcctgggatgcatctttcaaccaaccagcatcccagatttataggtcaaagcagaggatcagagaactcatcccagggaggaatggcacttgcagaaatgggcagccatgactttgcttgactcttctgtcttcttgctagagttgttttttagcttccagacatgaaatgctccacacaccatggggcccctttgctcatttttggactatttatacagcaggtttggatcatgtttttctactaataagaatgctaacattgttgtgtagataatcagtgagggctttatgaagtttacacctttgcattattaaaggaaataacagttcatgtgaaaaaacca

SEQ ID NO: 388833 - DNA, 5863 bp, Homo sapiens
gctgaggctgggactgtcactcattctccgatcagcgcgtgaacgcagctcggctgccgctggcaggaaacaattctgcaaaaataatcatactcagcctggcaattgtctgcccctaggtctgtcgctcagccgccgtccacactcgctgcagggggggggggcacagaatttaccgcggcaagaacatccctcccagccagcagattacaatgctgcaaactaaggatctcatctggactttgtttttcctgggaactgcagtttctctgcaggtggatattgttcccagccagggggagatcagcgttggagagtccaaattcttcttatgccaagtggcaggagatgccaaagataaagacatctcctggttctcccccaatggagaaaagctcaccccaaaccagcagcggatctcagtggtgtggaatgatgattcctcctccaccctcaccatctataacgccaacatcgacgacgccggcatttacaagtgtgtggttacaggcgaggatggcagtgagtcagaggccaccgtcaacgtgaagatctttcagaagctcatgttcaagaatgcgccaaccccacaggagttccgggagggggaagatgccgtgattgtgtgtgatgtggtcagctccctcccaccaaccatcatctggaaacacaaaggccgagatgtcatcctgaaaaaagatgtccgattcatagtcctgtccaacaactacctgcagatccggggcatcaagaaaacagatgagggcacttatcgctgtgagggcagaatcctggcacggggggagatcaacttcaaggacattcaggtcattgtgaatgtgccacctaccatccaggccaggcagaatattgtgaatgccaccgccaacctcggccagtccgtcaccctggtgtgcgatgccgaaggcttcccagagcccaccatgagctggacaaaggatggggaacagatagagcaagaggaagacgatgagaagtacatcttcagcgacgatagttcccagctgaccatcaaaaaggtggataagaacgacgaggctgagtacatctgcattgctgagaacaaggctggcgagcaggatgcgaccatccacctcaaagtctttgcaaaacccaaaatcacatatgtagagaaccagactgccatggaattagaggagcaggtcactcttacctgtgaagcctccggagaccccattccctccatcacctggaggacttctacccggaacatcagcagcgaagaaaaggcttcgtggactcgaccagagaagcaagagactctggatgggcacatggtggtgcgtagccatgcccgtgtgtcgtcgctgaccctgaagagcatccagtacactgatgccggagagtacatctgcaccgccagcaacaccatcggccaggactcccagtccatgtaccttgaagtgcaatatgccccaaagctacagggccctgtggctgtgtacacttgggaggggaaccaggtgaacatcacctgcgaggtatttgcctatcccagtgccacgatctcatggtttcgggatggccagctgctgccaagctccaattacagcaatatcaagatctacaacaccccctctgccagctatctggaggtgaccccagactctgagaatgattttgggaactacaactgtactgcagtgaaccgcattgggcaggagtccttggaattcatccttgttcaagcagacaccccctcttcaccatccatcgaccaggtggagccatactccagcacagcccaggtgcagtttgatgaaccagaggccacaggtggggtgcccatcctcaaatacaaagctgagtggagagcagttggtgaagaagtatggcattccaagtggtatgatgccaaggaagccagcatggagggcatcgtcaccatcgtgggcctgaagcccgaaacaacgtacgccgtaaggctggcggcgctcaatggcaaagggctgggtgagatcagcgcggcctccgagttcaagacgcagccagtccaaggggaacccagtgcacctaagctcgaagggcagatgggagaggatggaaactctattaaagtgaacctgatcaagcaggatgacggcggctcccccatcagacactatctggtcaggtaccgagcgctctcctccgagtggaaaccagagatcaggctcccgtctggcagtgaccacgtcatgctgaagtccctggactggaatgctgagtatgaggtctacgtggtggctgagaaccagcaaggaaaatccaaggcggctcattttgtgttcaggacctcggcccagcccacagccatcccagccaacggcagccccacctcaggcctgagcaccggggccatcgtgggcatcctcatcgtcatcttcgtcctgctcctggtggttgtggacatcacctgctacttcctgaacaagtgtggcctgttcatgtgcattgcggtcaacctgtgtggaaaagccgggcccggggccaagggcaaggacatggaggagggcaaggccgccttctcgaaagatgagtccaaggagcccatcgtggaggttcgaacggaggaggagaggaccccaaaccatgatggagggaaacacacagagcccaacgagaccacgccactgacggagcccgagaagggccccgtagaagcaaagccagagtgccaggagacagaaacgaagccagcgccagccgaagtcaagacggtccccaatgacgccacacagacaaaggagaacgagagcaaagcatgatgggtgaagagaaccgagcaaagatcaaaataaaaagtgacacagcagcttcaccagagcatttccaacaccacagacacacacacgcacgcacacacacaaacacacatgcacacacacacatctcatttctctagtgtcttttgcctttaaaaaaaactaaacagataaaacatgggaatctcctttttgtaggtttatagaaagggtccctttgttgcacactcacttgtaagaaaatgagacaaaaaggttaaacccacagccaaactaggacactccgttccctgaaaccgttaaaaaatcaaacaaaaggaccccaaattaagaatctaggaagctcagaaacgaaatctaggttcaggaagaccacacttggtgttacccgattggcacagaccagtttcagagaaatactttcaggcactaagactaatcgaatgaacaaagtccacagtttatttttatactttcagtcaagtttgaactctgtaaaacctcataaataagttataatttctgttcactttgtatttgttcagtatgcaaagtgtgtcaccctttctagctgaattcaattcccacgtagactcttattttataggacgaatgccaaattgcagcttctgggggtagatctcaatttgcagtattcagacttctttttctttctttcacattcttttttctttctttctttctgccaactttgttttccagtgtttacaaggtgacaaatgtttgactttggttgtgtttaaatgtccgtgtaaaatagctgccttttattttttaaggtaacaaataccacctagaggtaggtaggatcatcccacgcttgctttagcacaggacaactttacaaaacatgattgtttacagctgctcttcccctcttttctgatctgcagtttttgcctgggtcccactcaggtgaaaatccatctcattctggaatggttttgcttttgaatttttggttatttttgtgtttctttgggggttagaccactttctgattagccgccacctgcctgcatctgtgaaaagggatctgctcccaggcgttctcacccttcttttgaaggactccttaggctttgttgaatgaagcagagaagattgtatagttggggctggtcttggtgaacacacattattaccccacacatcccctttgtgtagaaagccaaataaaatctatacataccatttccttttgagcccagaatctagatttgagcggaagagcatgtgtgcttcagggaattagtgtctttttttggaaatctgttgaagtaaagtaacatcggccttctgttcacttaggcagcatttatagaaacaaaagaagaaagaaacaacctactgtctggagtcataacacaactttcctggattggaaaccaagtgggggaaaaaatacagaaactttaagggggatgggaggggggggagaagggaaaagccagccctttgtatagaaattttgcttttttttccctcattctactttagaactgcaagcttgtgcactgtggatgcgtgaatattttagtgtgaaacgtgtttttgtcatagtattgaaataaaacttcaacatagtttggttgtggaaggtatagcagatagttcagaaaaaatattcaggaaacaaaaatcactcaaacggaatcgaagccttttaacaaagaaaatgaaatacagatgatgatgatgatgatgaagatgatgctaagtaaacagaaatcagtactccgcatgcgctcctctcctaaggtacaaagcagcaagaggttagggtggcaaggctgcctctgggtccattctgtgggccactctccccaacgttctgacacttctgcagtctgatcagtggcgatgctagattataatttcaaactgtgaagaataatggtcttgtcatttgctcaatgtggggttatgttgcattttctcagctcctggggatggaaatggaggatcccagaacacacagccctggcccctttgattctagggcctgcacagatctctggttcaaatgcacaggccctcagaatagaggaacatgaagagagatcttagagcacacagtagaatgtgagagcctgggtgtctgagaccgggagggcccagcagtgaggggcaggctcttctggtcaccaggctgttcagtggactcagttcttcatcttgtaatgtcgatggctttgccacaccaggccaagcccatgccataccttgtcaagactgtcaaagtggttgtggttaggtcaaactggttttggttctgatggttaggaagaaacaggtcagccctcagatcacctggcccgggacagctgaccccctagaaccctggctctgccattagctaggacctaagactctgcccacattttggtctgttctctcccattacacataggtttgtctcagcatgcaagagtttttcctttaaaaaaaaaaaaaaaaaaaaaaaaaaaaagcaatgctttctctaaaatcaaagagggagtcattttattccaagatgttttatcttttatgttaagagatcaaagcttataattttcttttttaatttttgaaggagggatcaactccagtttccaatgtctatgtgtctatgtgtgtatgtgccatacatatgtattcacatgaagaccggcatggccaagttctgctggaggagcactcaagtgtgacgagcagggccactggaccctgcagggctgtggtgtatatagtgcagctttggaggtggaactctattttcacacttttctatggagccttccgagtcccaggttttcacttgaggctgtctgtctggatggcggttttcagacctccattaacatccctacccagcattctgtacttcgggggccttctctcttgttataaaactttttaccaagtgaaacatcgataccacctttgtttccattctcactggtgtaaatactgagtactaactgagaattttgactttgcattctgtcggaatacttgtgttcaataaaaattgaaagaaaaaagctaaaaaatcatactggggtttattt

SEQ ID NO: 388834 - DNA, 5853 bp, Homo sapiens
gaattcgaggatccgggtaccatggcgcgtgaacgcagctcggctgccgctggcaggaaacaattctgcaaaaataatcatactcagcctggcaattgtctgcccctaggtctgtcgctcagccgccgtccacactcgctgcagggggggggggcacagaatttaccgcggcaagaacatccctcccagccagcagattacaatgctgcaaactaaggatctcatctggactttgtttttcctgggaactgcagtttctctgcaggtggatattgttcccagccagggggagatcagcgttggagagtccaaattcttcttatgccaagtggcaggagatgccaaagataaagacatctcctggttctcccccaatggagaaaagctcaccccaaaccagcagcggatctcagtggtgtggaatgatgattcctcctccaccctcaccatctataacgccaacatcgacgacgccggcatttacaagtgtgtggttacaggcgaggatggcagtgagtcagaggccaccgtcaacgtgaagatctttcagaagctcatgttcaagaatgcgccaaccccacaggagttccgggagggggaagatgccgtgattgtgtgtgatgtggtcagctccctcccaccaaccatcatctggaaacacaaaggccgagatgtcatcctgaaaaaagatgtccgattcatagtcctgtccaacaactacctgcagatccggggcatcaagaaaacagatgagggcacttatcgctgtgagggcagaatcctggcacggggggagatcaacttcaaggacattcaggtcattgtgaatgtgccacctaccatccaggccaggcagaatattgtgaatgccaccgccaacctcggccagtccgtcaccctggtgtgcgatgccgaaggcttcccagagcccaccatgagctggacaaaggatggggaacagatagagcaagaggaagacgatgagaagtacatcttcagcgacgatagttcccagctgaccatcaaaaaggtggataagaacgacgaggctgagtacatctgcattgctgagaacaaggctggcgagcaggatgcgaccatccacctcaaagtctttgcaaaacccaaaatcacatatgtagagaaccagactgccatggaattagaggagcaggtcactcttacctgtgaagcctccggagaccccattccctccatcacctggaggacttctacccggaacatcagcagcgaagaaaaggcttcgtggactcgaccagagaagcaagagactctggatgggcacatggtggtgcgtagccatgcccgtgtgtcgtcgctgaccctgaagagcatccagtacactgatgccggagagtacatctgcaccgccagcaacaccatcggccaggactcccagtccatgtaccttgaagtgcaatatgccccaaagctacagggccctgtggctgtgtacacttgggaggggaaccaggtgaacatcacctgcgaggtatttgcctatcccagtgccacgatctcatggtttcgggatggccagctgctgccaagctccaattacagcaatatcaagatctacaacaccccctctgccagctatctggaggtgaccccagactctgagaatgattttgggaactacaactgtactgcagtgaaccgcattgggcaggagtccttggaattcatccttgttcaagcagacaccccctcttcaccatccatcgaccaggtggagccatactccagcacagcccaggtgcagtttgatgaaccagaggccacaggtggggtgcccatcctcaaatacaaagctgagtggagagcagttggtgaagaagtatggcattccaagtggtatgatgccaaggaagccagcatggagggcatcgtcaccatcgtgggcctgaagcccgaaacaacgtacgccgtaaggctggcggcgctcaatggcaaagggctgggtgagatcagcgcggcctccgagttcaagacgcagccagtccaaggggaacccagtgcacctaagctcgaagggcagatgggagaggatggaaactctattaaagtgaacctgatcaagcaggatgacggcggctcccccatcagacactatctggtcaggtaccgagcgctctcctccgagtggaaaccagagatcaggctcccgtctggcagtgaccacgtcatgctgaagtccctggactggaatgctgagtatgaggtctacgtggtggctgagaaccagcaaggaaaatccaaggcggctcattttgtgttcaggacctcggcccagcccacagccatcccagccaacggcagccccacctcaggcctgagcaccggggccatcgtgggcatcctcatcgtcatcttcgtcctgctcctggtggttgtggacatcacctgctacttcctgaacaagtgtggcctgttcatgtgcattgcggtcaacctgtgtggaaaagccgggcccggggccaagggcaaggacatggaggagggcaaggccgccttctcgaaagatgagtccaaggagcccatcgtggaggttcgaacggaggaggagaggaccccaaaccatgatggagggaaacacacagagcccaacgagaccacgccactgacggagcccgagaagggccccgtagaagcaaagccagagtgccaggagacagaaacgaagccagcgccagccgaagtcaagacggtccccaatgacgccacacagacaaaggagaacgagagcaaagcatgatgggtgaagagaaccgagcaaagatcaaaataaaaagtgacacagcagcttcaccagagcatttccaacaccacagacacacacacgcacgcacacacacaaacacacatgcacacacacacatctcatttctctagtgtcttttgcctttaaaaaaaactaaacagataaaacatgggaatctcctttttgtaggtttatagaaagggtccctttgttgcacactcacttgtaagaaaatgagacaaaaaggttaaacccacagccaaactaggacactccgttccctgaaaccgttaaaaaatcaaacaaaaggaccccaaattaagaatctaggaagctcagaaacgaaatctaggttcaggaagaccacacttggtgttacccgattggcacagaccagtttcagagaaatactttcaggcactaagactaatcgaatgaacaaagtccacagtttatttttatactttcagtcaagtttgaactctgtaaaacctcataaataagttataatttctgttcactttgtatttgttcagtatgcaaagtgtgtcaccctttctagctgaattcaattcccacgtagactcttattttataggacgaatgccaaattgcagcttctgggggtagatctcaatttgcagtattcagacttctttttctttctttcacattcttttttctttctttctttctgccaactttgttttccagtgtttacaaggtgacaaatgtttgactttggttgtgtttaaatgtccgtgtaaaatagctgccttttattttttaaggtaacaaataccacctagaggtaggtaggatcatcccacgcttgctttagcacaggacaactttacaaaacatgattgtttacagctgctcttcccctcttttctgatctgcagtttttgcctgggtcccactcaggtgaaaatccatctcattctggaatggttttgcttttgaatttttggttatttttgtgtttctttgggggttagaccactttctgattagccgccacctgcctgcatctgtgaaaagggatctgctcccaggcgttctcacccttcttttgaaggactccttaggctttgttgaatgaagcagagaagattgtatagttggggctggtcttggtgaacacacattattaccccacacatcccctttgtgtagaaagccaaataaaatctatacataccatttccttttgagcccagaatctagatttgagcggaagagcatgtgtgcttcagggaattagtgtctttttttggaaatctgttgaagtaaagtaacatcggccttctgttcacttaggcagcatttatagaaacaaaagaagaaagaaacaacctactgtctggagtcataacacaactttcctggattggaaaccaagtgggggaaaaaatacagaaactttaagggggatgggaggggggggagaagggaaaagccagccctttgtatagaaattttgcttttttttccctcattctactttagaactgcaagcttgtgcactgtggatgcgtgaatattttagtgtgaaacgtgtttttgtcatagtattgaaataaaacttcaacatagtttggttgtggaaggtatagcagatagttcagaaaaaatattcaggaaacaaaaatcactcaaacggaatcgaagccttttaacaaagaaaatgaaatacagatgatgatgatgatgatgaagatgatgctaagtaaacagaaatcagtactccgcatgcgctcctctcctaaggtacaaagcagcaagaggttagggtggcaaggctgcctctgggtccattctgtgggccactctccccaacgttctgacacttctgcagtctgatcagtggcgatgctagattataatttcaaactgtgaagaataatggtcttgtcatttgctcaatgtggggttatgttgcattttctcagctcctggggatggaaatggaggatcccagaacacacagccctggcccctttgattctagggcctgcacagatctctggttcaaatgcacaggccctcagaatagaggaacatgaagagagatcttagagcacacagtagaatgtgagagcctgggtgtctgagaccgggagggcccagcagtgaggggcaggctcttctggtcaccaggctgttcagtggactcagttcttcatcttgtaatgtcgatggctttgccacaccaggccaagcccatgccataccttgtcaagactgtcaaagtggttgtggttaggtcaaactggttttggttctgatggttaggaagaaacaggtcagccctcagatcacctggcccgggacagctgaccccctagaaccctggctctgccattagctaggacctaagactctgcccacattttggtctgttctctcccattacacataggtttgtctcagcatgcaagagtttttcctttaaaaaaaaaaaaaaaaaaaaaaaaaaaaagcaatgctttctctaaaatcaaagagggagtcattttattccaagatgttttatcttttatgttaagagatcaaagcttataattttcttttttaatttttgaaggagggatcaactccagtttccaatgtctatgtgtctatgtgtgtatgtgccatacatatgtattcacatgaagaccggcatggccaagttctgctggaggagcactcaagtgtgacgagcagggccactggaccctgcagggctgtggtgtatatagtgcagctttggaggtggaactctattttcacacttttctatggagccttccgagtcccaggttttcacttgaggctgtctgtctggatggcggttttcagacctccattaacatccctacccagcattctgtacttcgggggccttctctcttgttataaaactttttaccaagtgaaacatcgataccacctttgtttccattctcactggtgtaaatactgagtactaactgagaattttgactttgcattctgtcggaatacttgtgttcaataaaaattgaaagaaaaaagctaaaaaatcatactggggtttattt

SEQ ID NO: 388835 - DNA, 5964 bp, Homo sapiens
gctgaggctgggactgtcactcattctccgatcagcgcgtgaacgcagctcggctgccgctggcaggaaacaattctgcaaaaataatcatactcagcctggcaattgtctgcccctaggtctgtcgctcagccgccgtccacactcgctgcagggggggggggcacagaatttaccgcggcaagaacatccctcccagccagcagattacaatgctgcaaactaaggatctcatctggactttgtttttcctgggaactgcagtttctctgcaggtggatattgttcccagccagggggagatcagcgttggagagtccaaattcttcttatgccaagtggcaggagatgccaaagataaagacatctcctggttctcccccaatggagaaaagctcaccccaaaccagcagcggatctcagtggtgtggaatgatgattcctcctccaccctcaccatctataacgccaacatcgacgacgccggcatttacaagtgtgtggttacaggcgaggatggcagtgagtcagaggccaccgtcaacgtgaagatctttcagaagctcatgttcaagaatgcgccaaccccacaggagttccgggagggggaagatgccgtgattgtgtgtgatgtggtcagctccctcccaccaaccatcatctggaaacacaaaggccgagatgtcatcctgaaaaaagatgtccgattcatagtcctgtccaacaactacctgcagatccggggcatcaagaaaacagatgagggcacttatcgctgtgagggcagaatcctggcacggggggagatcaacttcaaggacattcaggtcattgtgaatgtgccacctaccatccaggccaggcagaatattgtgaatgccaccgccaacctcggccagtccgtcaccctggtgtgcgatgccgaaggcttcccagagcccaccatgagctggacaaaggatggggaacagatagagcaagaggaagacgatgagaagtacatcttcagcgacgatagttcccagctgaccatcaaaaaggtggataagaacgacgaggctgagtacatctgcattgctgagaacaaggctggcgagcaggatgcgaccatccacctcaaagtctttgcaaaacccaaaatcacatatgtagagaaccagactgccatggaattagaggagcaggtcactcttacctgtgaagcctccggagaccccattccctccatcacctggaggacttctacccggaacatcagcagcgaagaaaaggcttcgtggactcgaccagagaagcaagagactctggatgggcacatggtggtgcgtagccatgcccgtgtgtcgtcgctgaccctgaagagcatccagtacactgatgccggagagtacatctgcaccgccagcaacaccatcggccaggactcccagtccatgtaccttgaagtgcaatatgccccaaagctacagggccctgtggctgtgtacacttgggaggggaaccaggtgaacatcacctgcgaggtatttgcctatcccagtgccacgatctcatggtttcgggatggccagctgctgccaagctccaattacagcaatatcaagatctacaacaccccctctgccagctatctggaggtgaccccagactctgagaatgattttgggaactacaactgtactgcagtgaaccgcattgggcaggagtccttggaattcatccttgttcaagcagacaccccctcttcaccatccatcgaccaggtggagccatactccagcacagcccaggtgcagtttgatgaaccagaggccacaggtggggtgcccatcctcaaatacaaagctgagtggagagcagttggtgaagaagtatggcattccaagtggtatgatgccaaggaagccagcatggagggcatcgtcaccatcgtgggcctgaagcccgaaacaacgtacgccgtaaggctggcggcgctcaatggcaaagggctgggtgagatcagcgcggcctccgagttcaagacgcagccagtccccctcctccaccggcatctgctagctcgtctacccctgttccattgtctccaccagatacaacttggcctcttcctgcccttgcaaccacagaaccagctaaaggggaacccagtgcacctaagctcgaagggcagatgggagaggatggaaactctattaaagtgaacctgatcaagcaggatgacggcggctcccccatcagacactatctggtcaggtaccgagcgctctcctccgagtggaaaccagagatcaggctcccgtctggcagtgaccacgtcatgctgaagtccctggactggaatgctgagtatgaggtctacgtggtggctgagaaccagcaaggaaaatccaaggcggctcattttgtgttcaggacctcggcccagcccacagccatcccagccaacggcagccccacctcaggcctgagcaccggggccatcgtgggcatcctcatcgtcatcttcgtcctgctcctggtggttgtggacatcacctgctacttcctgaacaagtgtggcctgttcatgtgcattgcggtcaacctgtgtggaaaagccgggcccggggccaagggcaaggacatggaggagggcaaggccgccttctcgaaagatgagtccaaggagcccatcgtggaggttcgaacggaggaggagaggaccccaaaccatgatggagggaaacacacagagcccaacgagaccacgccactgacggagcccgagaagggccccgtagaagcaaagccagagtgccaggagacagaaacgaagccagcgccagccgaagtcaagacggtccccaatgacgccacacagacaaaggagaacgagagcaaagcatgatgggtgaagagaaccgagcaaagatcaaaataaaaagtgacacagcagcttcaccagagcatttccaacaccacagacacacacacgcacgcacacacacaaacacacatgcacacacacacatctcatttctctagtgtcttttgcctttaaaaaaaactaaacagataaaacatgggaatctcctttttgtaggtttatagaaagggtccctttgttgcacactcacttgtaagaaaatgagacaaaaaggttaaacccacagccaaactaggacactccgttccctgaaaccgttaaaaaatcaaacaaaaggaccccaaattaagaatctaggaagctcagaaacgaaatctaggttcaggaagaccacacttggtgttacccgattggcacagaccagtttcagagaaatactttcaggcactaagactaatcgaatgaacaaagtccacagtttatttttatactttcagtcaagtttgaactctgtaaaacctcataaataagttataatttctgttcactttgtatttgttcagtatgcaaagtgtgtcaccctttctagctgaattcaattcccacgtagactcttattttataggacgaatgccaaattgcagcttctgggggtagatctcaatttgcagtattcagacttctttttctttctttcacattcttttttctttctttctttctgccaactttgttttccagtgtttacaaggtgacaaatgtttgactttggttgtgtttaaatgtccgtgtaaaatagctgccttttattttttaaggtaacaaataccacctagaggtaggtaggatcatcccacgcttgctttagcacaggacaactttacaaaacatgattgtttacagctgctcttcccctcttttctgatctgcagtttttgcctgggtcccactcaggtgaaaatccatctcattctggaatggttttgcttttgaatttttggttatttttgtgtttctttgggggttagaccactttctgattagccgccacctgcctgcatctgtgaaaagggatctgctcccaggcgttctcacccttcttttgaaggactccttaggctttgttgaatgaagcagagaagattgtatagttggggctggtcttggtgaacacacattattaccccacacatcccctttgtgtagaaagccaaataaaatctatacataccatttccttttgagcccagaatctagatttgagcggaagagcatgtgtgcttcagggaattagtgtctttttttggaaatctgttgaagtaaagtaacatcggccttctgttcacttaggcagcatttatagaaacaaaagaagaaagaaacaacctactgtctggagtcataacacaactttcctggattggaaaccaagtgggggaaaaaatacagaaactttaagggggatgggaggggggggagaagggaaaagccagccctttgtatagaaattttgcttttttttccctcattctactttagaactgcaagcttgtgcactgtggatgcgtgaatattttagtgtgaaacgtgtttttgtcatagtattgaaataaaacttcaacatagtttggttgtggaaggtatagcagatagttcagaaaaaatattcaggaaacaaaaatcactcaaacggaatcgaagccttttaacaaagaaaatgaaatacagatgatgatgatgatgatgaagatgatgctaagtaaacagaaatcagtactccgcatgcgctcctctcctaaggtacaaagcagcaagaggttagggtggcaaggctgcctctgggtccattctgtgggccactctccccaacgttctgacacttctgcagtctgatcagtggcgatgctagattataatttcaaactgtgaagaataatggtcttgtcatttgctcaatgtggggttatgttgcattttctcagctcctggggatggaaatggaggatcccagaacacacagccctggcccctttgattctagggcctgcacagatctctggttcaaatgcacaggccctcagaatagaggaacatgaagagagatcttagagcacacagtagaatgtgagagcctgggtgtctgagaccgggagggcccagcagtgaggggcaggctcttctggtcaccaggctgttcagtggactcagttcttcatcttgtaatgtcgatggctttgccacaccaggccaagcccatgccataccttgtcaagactgtcaaagtggttgtggttaggtcaaactggttttggttctgatggttaggaagaaacaggtcagccctcagatcacctggcccgggacagctgaccccctagaaccctggctctgccattagctaggacctaagactctgcccacattttggtctgttctctcccattacacataggtttgtctcagcatgcaagagtttttcctttaaaaaaaaaaaaaaaaaaaaaaaaaaaaagcaatgctttctctaaaatcaaagagggagtcattttattccaagatgttttatcttttatgttaagagatcaaagcttataattttcttttttaatttttgaaggagggatcaactccagtttccaatgtctatgtgtctatgtgtgtatgtgccatacatatgtattcacatgaagaccggcatggccaagttctgctggaggagcactcaagtgtgacgagcagggccactggaccctgcagggctgtggtgtatatagtgcagctttggaggtggaactctattttcacacttttctatggagccttccgagtcccaggttttcacttgaggctgtctgtctggatggcggttttcagacctccattaacatccctacccagcattctgtacttcgggggccttctctcttgttataaaactttttaccaagtgaaacatcgataccacctttgtttccattctcactggtgtaaatactgagtactaactgagaattttgactttgcattctgtcggaatacttgtgttcaataaaaattgaaagaaaaaagctaaaaaatcatactggggtttattt

SEQ ID NO: 388836 - DNA, 4925 bp, Homo sapiens
gctgaggctgggactgtcactcattctccgatcagcgcgtgaacgcagctcggctgccgctggcaggaaacaattctgcaaaaataatcatactcagcctggcaattgtctgcccctaggtctgtcgctcagccgccgtccacactcgctgcagggggggggggcacagaatttaccgcggcaagaacatccctcccagccagcagattacaatgctgcaaactaaggatctcatctggactttgtttttcctgggaactgcagtttctctgcaggtggatattgttcccagccagggggagatcagcgttggagagtccaaattcttcttatgccaagtggcaggagatgccaaagataaagacatctcctggttctcccccaatggagaaaagctcaccccaaaccagcagcggatctcagtggtgtggaatgatgattcctcctccaccctcaccatctataacgccaacatcgacgacgccggcatttacaagtgtgtggttacaggcgaggatggcagtgagtcagaggccaccgtcaacgtgaagatctttcagaagctcatgttcaagaatgcgccaaccccacaggagttccgggagggggaagatgccgtgattgtgtgtgatgtggtcagctccctcccaccaaccatcatctggaaacacaaaggccgagatgtcatcctgaaaaaagatgtccgattcatagtcctgtccaacaactacctgcagatccggggcatcaagaaaacagatgagggcacttatcgctgtgagggcagaatcctggcacggggggagatcaacttcaaggacattcaggtcattgtgaatgtgccacctaccatccaggccaggcagaatattgtgaatgccaccgccaacctcggccagtccgtcaccctggtgtgcgatgccgaaggcttcccagagcccaccatgagctggacaaaggatggggaacagatagagcaagaggaagacgatgagaagtacatcttcagcgacgatagttcccagctgaccatcaaaaaggtggataagaacgacgaggctgagtacatctgcattgctgagaacaaggctggcgagcaggatgcgaccatccacctcaaagtctttgcaaaacccaaaatcacatatgtagagaaccagactgccatggaattagaggagcaggtcactcttacctgtgaagcctccggagaccccattccctccatcacctggaggacttctacccggaacatcagcagcgaagaaaagactctggatgggcacatggtggtgcgtagccatgcccgtgtgtcgtcgctgaccctgaagagcatccagtacactgatgccggagagtacatctgcaccgccagcaacaccatcggccaggactcccagtccatgtaccttgaagtgcaatatgccccaaagctacagggccctgtggctgtgtacacttgggaggggaaccaggtgaacatcacctgcgaggtatttgcctatcccagtgccacgatctcatggtttcgggatggccagctgctgccaagctccaattacagcaatatcaagatctacaacaccccctctgccagctatctggaggtgaccccagactctgagaatgattttgggaactacaactgtactgcagtgaaccgcattgggcaggagtccttggaattcatccttgttcaagcagacaccccctcttcaccatccatcgaccaggtggagccatactccagcacagcccaggtgcagtttgatgaaccagaggccacaggtggggtgcccatcctcaaatacaaagctgagtggagagcagttggtgaagaagtatggcattccaagtggtatgatgccaaggaagccagcatggagggcatcgtcaccatcgtgggcctgaagcccgaaacaacgtacgccgtaaggctggcggcgctcaatggcaaagggctgggtgagatcagcgcggcctccgagttcaagacgcagccagtccaaggggaacccagtgcacctaagctcgaagggcagatgggagaggatggaaactctattaaagtgaacctgatcaagcaggatgacggcggctcccccatcagacactatctggtcaggtaccgagcgctctcctccgagtggaaaccagagatcaggctcccgtctggcagtgaccacgtcatgctgaagtccctggactggaatgctgagtatgaggtctacgtggtggctgagaaccagcaaggaaaatccaaggcggctcattttgtgttcaggacctcggcccagcccacagccatcccagccaacggcagccccacctcaggcctgagcaccggggccatcgtgggcatcctcatcgtcatcttcgtcctgctcctggtggttgtggacatcacctgctacttcctgaacaagtgtggcctgttcatgtgcattgcggtcaacctgtgtggaaaagccgggcccggggccaagggcaaggacatggaggagggcaaggccgccttctcgaaagatgagtccaaggagcccatcgtggaggttcgaacggaggaggagaggaccccaaaccatgatggagggaaacacacagagcccaacgagaccacgccactgacggagcccgagaagggccccgtagaagcaaagccagagtgccaggagacagaaacgaagccagcgccagccgaagtcaagacggtccccaatgacgccacacagacaaaggagaacgagagcaaagcatgatgggtgaagagaaccgagcaaagatcaaaataaaaagtgacacagcagcttcaccagagcatttccaacaccacagacacacacacgcacgcacacacacaaacacacatgcacacacacacatctcatttctctagtgtcttttgcctttaaaaaaaactaaacagataaaacatgggaatctcctttttgtaggtttatagaaagggtccctttgttgcacactcacttgtaagaaaatgagacaaaaaggttaaacccacagccaaactaggacactccgttccctgaaaccgttaaaaaatcaaacaaaaggaccccaaattaagaatctaggaagctcagaaacgaaatctaggttcaggaagaccacacttggtgttacccgattggcacagaccagtttcagagaaatactttcaggcactaagactaatcgaatgaacaaagtccacagtttatttttatactttcagtcaagtttgaactctgtaaaacctcataaataagttataatttctgttcactttgtatttgttcagtatgcaaagtgtgtcaccctttctagctgaattcaattcccacgtagactcttattttataggacgaatgccaaattgcagcttctgggggtagatctcaatttgcagtattcagacttctttttctttctttcacattcttttttctttctttctttctgccaactttgttttccagtgtttacaaggtgacaaatgtttgactttggttgtgtttaaatgtccgtgtaaaatagctgccttttattttttaaggtaacaaataccacctagaggtaggtaggatcatcccacgcttgctttagcacaggacaactttacaaaacatgattgtttacagctgctcttcccctcttttctgatctgcagtttttgcctgggtcccactcaggtgaaaatccatctcattctggaatggttttgcttttgaatttttggttatttttgtgtttctttgggggttagaccactttctgattagccgccacctgcctgcatctgtgaaaagggatctgctcccaggcgttctcacccttcttttgaaggactccttaggctttgttgaatgaagcagagaagattgtatagttggggctggtcttggtgaacacacattattaccccacacatcccctttgtgtagaaagccaaataaaatctatacataccatttccttttgagcccagaatctagatttgagcggaagagcatgtgtgcttcagggaattagtgtctttttttggaaatctgttgaagtaaagtaacatcggccttctgttcacttaggcagcatttatagaaacaaaagaagaaagaaacaacctactgtctggagtcataacacaactttcctggattggaaaccaagtgggggaaaaaatacagaaactttaagggggatgggaggggggggagaagggaaaagccagccctttgtatagaaattttgcttttttttccctcattctactttagaactgcaagcttgtgcactgtggatgcgtgaatattttagtgtgaaacgtgtttttgtcatagtattgaaataaaacttcaacatagtttggttgtggaaggtatagcagatagttcagaaaaaatattcaggaaacaaaaatcactcaaacggaatcgaagccttttaacaaagaaaatgaaatacagatgatgatgatgatgatgaagatgatgctaagtaaacagaaatcagtactccgcatgcgctcctctcctaaggtacaaagcagcaagaggttagggtggcaaggctgcctctgggtccattctgtgggccactctccccaacgttctgacacttctgcagtctgatcagtggcgatgctagattataatttcaaactgtgaagaataatggtcttgtcatttgctcaatgtggggttatgttgcattaacatccctacccagcattctgtacttcgggggccttctctcttgttataaaactttttaccaagtgaaacatcgataccacctttgtttccattctcactggtgtaaatactgagtactaactgagaattttgactttgcattctgtcggaatacttgtgttcaataaaaattgaaagaaaaaagctaaaaaatcatactggggtttattt

SEQ ID NO: 388837 - DNA, 4742 bp, Homo sapiens
gctgaggctgggactgtcactcattctccgatcagcgcgtgaacgcagctcggctgccgctggcaggaaacaattctgcaaaaataatcatactcagcctggcaattgtctgcccctaggtctgtcgctcagccgccgtccacactcgctgcagggggggggggcacagaatttaccgcggcaagaacatccctcccagccagcagattacaatgctgcaaactaaggatctcatctggactttgtttttcctgggaactgcagtttctctgcaggtggatattgttcccagccagggggagatcagcgttggagagtccaaattcttcttatgccaagtggcaggagatgccaaagataaagacatctcctggttctcccccaatggagaaaagctcaccccaaaccagcagcggatctcagtggtgtggaatgatgattcctcctccaccctcaccatctataacgccaacatcgacgacgccggcatttacaagtgtgtggttacaggcgaggatggcagtgagtcagaggccaccgtcaacgtgaagatctttcagaagctcatgttcaagaatgcgccaaccccacaggagttccgggagggggaagatgccgtgattgtgtgtgatgtggtcagctccctcccaccaaccatcatctggaaacacaaaggccgagatgtcatcctgaaaaaagatgtccgattcatagtcctgtccaacaactacctgcagatccggggcatcaagaaaacagatgagggcacttatcgctgtgagggcagaatcctggcacggggggagatcaacttcaaggacattcaggtcattgtgaatgtgccacctaccatccaggccaggcagaatattgtgaatgccaccgccaacctcggccagtccgtcaccctggtgtgcgatgccgaaggcttcccagagcccaccatgagctggacaaaggatggggaacagatagagcaagaggaagacgatgagaagtacatcttcagcgacgatagttcccagctgaccatcaaaaaggtggataagaacgacgaggctgagtacatctgcattgctgagaacaaggctggcgagcaggatgcgaccatccacctcaaagtctttgcaaaacccaaaatcacatatgtagagaaccagactgccatggaattagaggagcaggtcactcttacctgtgaagcctccggagaccccattccctccatcacctggaggacttctacccggaacatcagcagcgaagaaaagactctggatgggcacatggtggtgcgtagccatgcccgtgtgtcgtcgctgaccctgaagagcatccagtacactgatgccggagagtacatctgcaccgccagcaacaccatcggccaggactcccagtccatgtaccttgaagtgcaatatgccccaaagctacagggccctgtggctgtgtacacttgggaggggaaccaggtgaacatcacctgcgaggtatttgcctatcccagtgccacgatctcatggtttcgggatggccagctgctgccaagctccaattacagcaatatcaagatctacaacaccccctctgccagctatctggaggtgaccccagactctgagaatgattttgggaactacaactgtactgcagtgaaccgcattgggcaggagtccttggaattcatccttgttcaagcagacaccccctcttcaccatccatcgaccaggtggagccatactccagcacagcccaggtgcagtttgatgaaccagaggccacaggtggggtgcccatcctcaaatacaaagctgagtggagagcagttggtgaagaagtatggcattccaagtggtatgatgccaaggaagccagcatggagggcatcgtcaccatcgtgggcctgaagcccgaaacaacgtacgccgtaaggctggcggcgctcaatggcaaagggctgggtgagatcagcgcggcctccgagttcaagacgcagccagtccccctcctccaccggcatctgctagctcgtctacccctgttccattgtctccaccagatacaacttggcctcttcctgcccttgcaaccacagaaccagctaaaggggaacccagtgcacctaagctcgaagggcagatgggagaggatggaaactctattaaagtgaacctgatcaagcaggatgacggcggctcccccatcagacactatctggtcaggtaccgagcgctctcctccgagtggaaaccagagatcaggctcccgtctggcagtgaccacgtcatgctgaagtccctggactggaatgctgagtatgaggtctacgtggtggctgagaaccagcaaggaaaatccaaggcggctcattttgtgttcaggacctcggcccagcccacagccatcccagcaaccttgggaggcaattctgcatcctacacctttgtctcattgcttttctctgcagtgactcttcttttgctctgttaggaacttgaacacaaaaattaaatttgcttaaaagcccagttcctatgaaaaagatcagtgccccctttggaagaacctggcaggaccaccatggccacagctgctgagcaaccattctgtgtggaagagaaggttttgtgattggaaaaagctttacctccagacatgtcaccactcacagatacttttgtgccacttcataaggagtttgccccctttttaatggcagtaaaaagaatttgagagctctttctttaaatgctatttttaaaaaccatcatgctagatttacagagaagtttctgcatatctgctacttgttgcattttgggttcaaacctaaatatgatgtagcagaggaagaattctaagtaccttctaaagcttgtgtcagattgttaaaatcaccacacattcccctcattctaactctgtgctccttgtcctcccttcaataataattggctttgcttgcaattaagcatttaagtgcccatgttaaaagagccagaccgcactgattcacatgagcgttttgctgacatgatgggcaactgaagtcacccctgttgcccatgcactggaaaaaaagttgaatttgttggatattttctggggctgatgaacgttctgggatgtgctttcagtcctcgtattacggccagcaccttacactgtctctgtgaacggggccaagccatgatgtgccaacaagtgtcagctttgaaaggtgtttgtctcccaatcggggtgactcccctgctgcctggcagcatgtcgcagatcagcacagagtggggccgtggttcagcagtgacccacagaatggctttgagcatcagtctacaggacaggttggaagcatccactgtgaaccaggcattagtcccctacctggcctgtgtgtgctcagtagagaaggagagggacaggccactcccagactgcccagcccaggagggttaataaattggggccgagccaacctgtcagtgcttcctgaatgccccagcctctgtattggtgcgttggttcagtgacattttctaaactctcctgaaaatccagctgctcctccctgctgcttgggagttcacccaggagaggaaatgggtgtgttttgttaaggtcccttgtggagactcagggctgaatcctgcttggtaatatcagtgtgtgtgcttggggatggaccttctactgaataaaaactccctccctccccccattgtggtcacatatcattctacatatctcatctctgagcatctccatggaagcttgatttttgttctttttggtttctttatgtatttttttctgttgttattattttttaatgttcaaagactagcctttccctttgggattccaaatgatcccatgctgtggtctgaggggcaaagccacctatgttggcgctcgccattaatccccagcgctcagtttagaggctcacgtgcagacatcagaggctccatgctgcacagtagctcaggcagggtagtgcctctcaacccagccacaaaactctccccgctggagtcccagatggcgcttcacaccagggcagtggaggcaggcatggtttttgggcacagggcagagcataaggatcccaggtcagtgtgggagagctactggctcttaggatcaccttgggcagaagtcacacggcttcatcctaggagggcccagcttgggagtctgcctccccctgatcccaggaccacccacaggagaggggcagtgtccatctttctgaagggaccctttggagatctcgtcctaagtgtggagaggactgacgtggccctgtcatctcaacacatcccagggtcaggcaggcctcagctgaaacaatgtcagggtcctcaagggtcccatttagacagacccacggcttgtaacagtgcgctcctcaggaggcagcactagcgcatacccactccccacggacactgagttcctggtgacagctgcagccccagccccgccaggagtcctggagacagcagccctcagagaccctgcaggagtgagtgccccactggtcagcaaccatccctgggccgtattggggtgctgctccccccctgggcctgtccttgggcttataccgcggttggccgtcacactcagagcccggggtgaccggggttaggtccgttaggtgcgtgaaaaagggcggtttctgcgctcccttggctcggatgcgcgcggggttggctgcctatttttctcgggg

SEQ ID NO: 388838 - DNA, 2158 bp, Homo sapiens
gctgaggctgggactgtcactcattctccgatcagcgcgtgaacgcagctcggctgccgctggcaggaaacaattctgcaaaaataatcatactcagcctggcaattgtctgcccctaggtctgtcgctcagccgccgtccacactcgctgcagggggggggggcacagaatttaccgcggcaagaacatccctcccagccagcagattacaatgctgcaaactaaggatctcatctggactttgtttttcctgggaactgcagtttctctgcaggtggatattgttcccagccagggggagatcagcgttggagagtccaaattcttcttatgccaagtggcaggagatgccaaagataaagacatctcctggttctcccccaatggagaaaagctcaccccaaaccagcagcggatctcagtggtgtggaatgatgattcctcctccaccctcaccatctataacgccaacatcgacgacgccggcatttacaagtgtgtggttacaggcgaggatggcagtgagtcagaggccaccgtcaacgtgaagatctttcagaagctcatgttcaagaatgcgccaaccccacaggagttccgggagggggaagatgccgtgattgtgtgtgatgtggtcagctccctcccaccaaccatcatctggaaacacaaaggccgagatgtcatcctgaaaaaagatgtccgattcatagtcctgtccaacaactacctgcagatccggggcatcaagaaaacagatgagggcacttatcgctgtgagggcagaatcctggcacggggggagatcaacttcaaggacattcaggtcattgtgaatgtgccacctaccatccaggccaggcagaatattgtgaatgccaccgccaacctcggccagtccgtcaccctggtgtgcgatgccgaaggcttcccagagcccaccatgagctggacaaaggatggggaacagatagagcaagaggaagacgatgagaagtacatcttcagcgacgatagttcccagctgaccatcaaaaaggtggataagaacgacgaggctgagtacatctgcattgctgagaacaaggctggcgagcaggatgcgaccatccacctcaaagtctttgcaaaacccaaaatcacatatgtagagaaccagactgccatggaattagaggagcaggtcactcttacctgtgaagcctccggagaccccattccctccatcacctggaggacttctacccggaacatcagcagcgaagaaaaggcttcgtggactcgaccagagaagcaagagactctggatgggcacatggtggtgcgtagccatgcccgtgtgtcgtcgctgaccctgaagagcatccagtacactgatgccggagagtacatctgcaccgccagcaacaccatcggccaggactcccagtccatgtaccttgaagtgcaatatgccccaaagctacagggccctgtggctgtgtacacttgggaggggaaccaggtgaacatcacctgcgaggtatttgcctatcccagtgccacgatctcatggtttcgggatggccagctgctgccaagctccaattacagcaatatcaagatctacaacaccccctctgccagctatctggaggtgaccccagactctgagaatgattttgggaactacaactgtactgcagtgaaccgcattgggcaggagtccttggaattcatccttgttcaagcagacaccccctcttcaccatccatcgaccaggtggagccatactccagcacagcccaggtgcagtttgatgaaccagaggccacaggtggggtgcccatcctcaaatacaaagctgagtggagagcagttggtgaagaagtatggcattccaagtggtatgatgccaaggaagccagcatggagggcatcgtcaccatcgtgggcctgaagcccgaaacaacgtacgccgtaaggctggcggcgctcaatggcaaagggctgggtgagatcagcgcggcctccgagttcaagacgcagccagtccaaggggaacccagtgcacctaagctcgaagggcagatgtctgcacgagtcacaccggagcctggggcaagcagtgattgaatacaaaccaccagacctcccgcctgcccatcatcaatgtg

SEQ ID NO: 388839 - DNA, 530 bp, Homo sapiens
cacgctagacactagaagacaatacacttgctggctgtatctaagaggcttcaccttagtgaaaggtaacactctcctaatcaaactcttgtattttagcgtggaggcttctgttctctcactttaatttcatttgctcgctgatccctagcccccaaattaaccctgctgtgctgcttctggcattgctgagcttctgaactggccttatggtattgatactgcactgaaccctctctaacctttgtcaatttaatttactaagttgaattaacctttgattctgtgttttctatagttgacctaattttttttctttttatctatttttttctctgtttctgtctctaccttccctttccttctgtccccctccccttcctgtgtctgtcgtcacacttgtcaccttggacgtcactgggacatccccactgccacatttgtttttaaacaaccacattatctctggggacccattgcttgacacctgcagcaaccttgggaggcaattctgcatcctacacctttgt

SEQ ID NO: 388840 - DNA, 443 bp, Homo sapiens
  misc_feature (393)..(393): n is a, c, g, or t
  misc_feature (434)..(434): n is a, c, g, or t
gctcggaggagagcgctcggtacctgaccagatagtgtctgatgggggagccgccgtcatcctgcttgatcaggctcccgtctggcagtgaccacgtcatgctgaagtccctggactggaatgctgagtatgaggtctacgtggtggctgagaaccagcaaggaaaatccaaggcggctcattttgtgttcaggacctcggcccagcccacagccatcccagccaacggcagccccacctcaggcctgagcaccggggccatcgtgggcatcctcatcgtcatcttcgtcctgctcctggtggttgtggacatcacctgctacttcctgaacaagtgtggcctgttcatgtgcattgcggtcaacctgtgtggaaaagccgggctcccgtctngcagtgaccacgtcatgcttgaagtccctggactggattgntgagtagaa

SEQ ID NO: 388841 - DNA, 5833 bp, Homo sapiens
gctgaggctgggactgtcactcattctccgatcagcgcgtgaacgcagctcggctgccgctggcaggaaacaattctgcaaaaataatcatactcagcctggcaattgtctgcccctaggtctgtcgctcagccgccgtccacactcgctgcagggggggggggcacagaatttaccgcggcaagaacatccctcccagccagcagattacaatgctgcaaactaaggatctcatctggactttgtttttcctgggaactgcagtttctctgcaggtggatattgttcccagccagggggagatcagcgttggagagtccaaattcttcttatgccaagtggcaggagatgccaaagataaagacatctcctggttctcccccaatggagaaaagctcaccccaaaccagcagcggatctcagtggtgtggaatgatgattcctcctccaccctcaccatctataacgccaacatcgacgacgccggcatttacaagtgtgtggttacaggcgaggatggcagtgagtcagaggccaccgtcaacgtgaagatctttcagaagctcatgttcaagaatgcgccaaccccacaggagttccgggagggggaagatgccgtgattgtgtgtgatgtggtcagctccctcccaccaaccatcatctggaaacacaaaggccgagatgtcatcctgaaaaaagatgtccgattcatagtcctgtccaacaactacctgcagatccggggcatcaagaaaacagatgagggcacttatcgctgtgagggcagaatcctggcacggggggagatcaacttcaaggacattcaggtcattgtgaatgtgccacctaccatccaggccaggcagaatattgtgaatgccaccgccaacctcggccagtccgtcaccctggtgtgcgatgccgaaggcttcccagagcccaccatgagctggacaaaggatggggaacagatagagcaagaggaagacgatgagaagtacatcttcagcgacgatagttcccagctgaccatcaaaaaggtggataagaacgacgaggctgagtacatctgcattgctgagaacaaggctggcgagcaggatgcgaccatccacctcaaagtctttgcaaaacccaaaatcacatatgtagagaaccagactgccatggaattagaggagcaggtcactcttacctgtgaagcctccggagaccccattccctccatcacctggaggacttctacccggaacatcagcagcgaagaaaagactctggatgggcacatggtggtgcgtagccatgcccgtgtgtcgtcgctgaccctgaagagcatccagtacactgatgccggagagtacatctgcaccgccagcaacaccatcggccaggactcccagtccatgtaccttgaagtgcaatatgccccaaagctacagggccctgtggctgtgtacacttgggaggggaaccaggtgaacatcacctgcgaggtatttgcctatcccagtgccacgatctcatggtttcgggatggccagctgctgccaagctccaattacagcaatatcaagatctacaacaccccctctgccagctatctggaggtgaccccagactctgagaatgattttgggaactacaactgtactgcagtgaaccgcattgggcaggagtccttggaattcatccttgttcaagcagacaccccctcttcaccatccatcgaccaggtggagccatactccagcacagcccaggtgcagtttgatgaaccagaggccacaggtggggtgcccatcctcaaatacaaagctgagtggagagcagttggtgaagaagtatggcattccaagtggtatgatgccaaggaagccagcatggagggcatcgtcaccatcgtgggcctgaagcccgaaacaacgtacgccgtaaggctggcggcgctcaatggcaaagggctgggtgagatcagcgcggcctccgagttcaagacgcagccagtccaaggggaacccagtgcacctaagctcgaagggcagatgggagaggatggaaactctattaaagtgaacctgatcaagcaggatgacggcggctcccccatcagacactatctggtcaggtaccgagcgctctcctccgagtggaaaccagagatcaggctcccgtctggcagtgaccacgtcatgctgaagtccctggactggaatgctgagtatgaggtctacgtggtggctgagaaccagcaaggaaaatccaaggcggctcattttgtgttcaggacctcggcccagcccacagccatcccagccaacggcagccccacctcaggcctgagcaccggggccatcgtgggcatcctcatcgtcatcttcgtcctgctcctggtggttgtggacatcacctgctacttcctgaacaagtgtggcctgttcatgtgcattgcggtcaacctgtgtggaaaagccgggcccggggccaagggcaaggacatggaggagggcaaggccgccttctcgaaagatgagtccaaggagcccatcgtggaggttcgaacggaggaggagaggaccccaaaccatgatggagggaaacacacagagcccaacgagaccacgccactgacggagcccgagaagggccccgtagaagcaaagccagagtgccaggagacagaaacgaagccagcgccagccgaagtcaagacggtccccaatgacgccacacagacaaaggagaacgagagcaaagcatgatgggtgaagagaaccgagcaaagatcaaaataaaaagtgacacagcagcttcaccagagcatttccaacaccacagacacacacacgcacgcacacacacaaacacacatgcacacacacacatctcatttctctagtgtcttttgcctttaaaaaaaactaaacagataaaacatgggaatctcctttttgtaggtttatagaaagggtccctttgttgcacactcacttgtaagaaaatgagacaaaaaggttaaacccacagccaaactaggacactccgttccctgaaaccgttaaaaaatcaaacaaaaggaccccaaattaagaatctaggaagctcagaaacgaaatctaggttcaggaagaccacacttggtgttacccgattggcacagaccagtttcagagaaatactttcaggcactaagactaatcgaatgaacaaagtccacagtttatttttatactttcagtcaagtttgaactctgtaaaacctcataaataagttataatttctgttcactttgtatttgttcagtatgcaaagtgtgtcaccctttctagctgaattcaattcccacgtagactcttattttataggacgaatgccaaattgcagcttctgggggtagatctcaatttgcagtattcagacttctttttctttctttcacattcttttttctttctttctttctgccaactttgttttccagtgtttacaaggtgacaaatgtttgactttggttgtgtttaaatgtccgtgtaaaatagctgccttttattttttaaggtaacaaataccacctagaggtaggtaggatcatcccacgcttgctttagcacaggacaactttacaaaacatgattgtttacagctgctcttcccctcttttctgatctgcagtttttgcctgggtcccactcaggtgaaaatccatctcattctggaatggttttgcttttgaatttttggttatttttgtgtttctttgggggttagaccactttctgattagccgccacctgcctgcatctgtgaaaagggatctgctcccaggcgttctcacccttcttttgaaggactccttaggctttgttgaatgaagcagagaagattgtatagttggggctggtcttggtgaacacacattattaccccacacatcccctttgtgtagaaagccaaataaaatctatacataccatttccttttgagcccagaatctagatttgagcggaagagcatgtgtgcttcagggaattagtgtctttttttggaaatctgttgaagtaaagtaacatcggccttctgttcacttaggcagcatttatagaaacaaaagaagaaagaaacaacctactgtctggagtcataacacaactttcctggattggaaaccaagtgggggaaaaaatacagaaactttaagggggatgggaggggggggagaagggaaaagccagccctttgtatagaaattttgcttttttttccctcattctactttagaactgcaagcttgtgcactgtggatgcgtgaatattttagtgtgaaacgtgtttttgtcatagtattgaaataaaacttcaacatagtttggttgtggaaggtatagcagatagttcagaaaaaatattcaggaaacaaaaatcactcaaacggaatcgaagccttttaacaaagaaaatgaaatacagatgatgatgatgatgatgaagatgatgctaagtaaacagaaatcagtactccgcatgcgctcctctcctaaggtacaaagcagcaagaggttagggtggcaaggctgcctctgggtccattctgtgggccactctccccaacgttctgacacttctgcagtctgatcagtggcgatgctagattataatttcaaactgtgaagaataatggtcttgtcatttgctcaatgtggggttatgttgcattttctcagctcctggggatggaaatggaggatcccagaacacacagccctggcccctttgattctagggcctgcacagatctctggttcaaatgcacaggccctcagaatagaggaacatgaagagagatcttagagcacacagtagaatgtgagagcctgggtgtctgagaccgggagggcccagcagtgaggggcaggctcttctggtcaccaggctgttcagtggactcagttcttcatcttgtaatgtcgatggctttgccacaccaggccaagcccatgccataccttgtcaagactgtcaaagtggttgtggttaggtcaaactggttttggttctgatggttaggaagaaacaggtcagccctcagatcacctggcccgggacagctgaccccctagaaccctggctctgccattagctaggacctaagactctgcccacattttggtctgttctctcccattacacataggtttgtctcagcatgcaagagtttttcctttaaaaaaaaaaaaaaaaaaaaaaaaaaaaagcaatgctttctctaaaatcaaagagggagtcattttattccaagatgttttatcttttatgttaagagatcaaagcttataattttcttttttaatttttgaaggagggatcaactccagtttccaatgtctatgtgtctatgtgtgtatgtgccatacatatgtattcacatgaagaccggcatggccaagttctgctggaggagcactcaagtgtgacgagcagggccactggaccctgcagggctgtggtgtatatagtgcagctttggaggtggaactctattttcacacttttctatggagccttccgagtcccaggttttcacttgaggctgtctgtctggatggcggttttcagacctccattaacatccctacccagcattctgtacttcgggggccttctctcttgttataaaactttttaccaagtgaaacatcgataccacctttgtttccattctcactggtgtaaatactgagtactaactgagaattttgactttgcattctgtcggaatacttgtgttcaataaaaattgaaagaaaaaagctaaaaaatcatactggggtttattt

SEQ ID NO: 388842 - DNA, 3675 bp, Homo sapiens
gctgaggctgggactgtcactcattctccgatcagcgcgtgaacgcagctcggctgccgctggcaggaaacaattctgcaaaaataatcatactcagcctggcaattgtctgcccctaggtctgtcgctcagccgccgtccacactcgctgcagggggggggggcacagaatttaccgcggcaagaacatccctcccagccagcagattacaatgctgcaaactaaggatctcatctggactttgtttttcctgggaactgcagtttctctgcaggtggatattgttcccagccagggggagatcagcgttggagagtccaaattcttcttatgccaagtggcaggagatgccaaagataaagacatctcctggttctcccccaatggagaaaagctcaccccaaaccagcagcggatctcagtggtgtggaatgatgattcctcctccaccctcaccatctataacgccaacatcgacgacgccggcatttacaagtgtgtggttacaggcgaggatggcagtgagtcagaggccaccgtcaacgtgaagatctttcagaagctcatgttcaagaatgcgccaaccccacaggagttccgggagggggaagatgccgtgattgtgtgtgatgtggtcagctccctcccaccaaccatcatctggaaacacaaaggccgagatgtcatcctgaaaaaagatgtccgattcatagtcctgtccaacaactacctgcagatccggggcatcaagaaaacagatgagggcacttatcgctgtgagggcagaatcctggcacggggggagatcaacttcaaggacattcaggtcattgtgaatgtgccacctaccatccaggccaggcagaatattgtgaatgccaccgccaacctcggccagtccgtcaccctggtgtgcgatgccgaaggcttcccagagcccaccatgagctggacaaaggatggggaacagatagagcaagaggaagacgatgagaagtacatcttcagcgacgatagttcccagctgaccatcaaaaaggtggataagaacgacgaggctgagtacatctgcattgctgagaacaaggctggcgagcaggatgcgaccatccacctcaaagtctttgcaaaacccaaaatcacatatgtagagaaccagactgccatggaattagaggagcaggtcactcttacctgtgaagcctccggagaccccattccctccatcacctggaggacttctacccggaacatcagcagcgaagaaaagactctggatgggcacatggtggtgcgtagccatgcccgtgtgtcgtcgctgaccctgaagagcatccagtacactgatgccggagagtacatctgcaccgccagcaacaccatcggccaggactcccagtccatgtaccttgaagtgcaatatgccccaaagctacagggccctgtggctgtgtacacttgggaggggaaccaggtgaacatcacctgcgaggtatttgcctatcccagtgccacgatctcatggtttcgggatggccagctgctgccaagctccaattacagcaatatcaagatctacaacaccccctctgccagctatctggaggtgaccccagactctgagaatgattttgggaactacaactgtactgcagtgaaccgcattgggcaggagtccttggaattcatccttgttcaagcagacaccccctcttcaccatccatcgaccaggtggagccatactccagcacagcccaggtgcagtttgatgaaccagaggccacaggtggggtgcccatcctcaaatacaaagctgagtggagagcagttggtgaagaagtatggcattccaagtggtatgatgccaaggaagccagcatggagggcatcgtcaccatcgtgggcctgaagcccgaaacaacgtacgccgtaaggctggcggcgctcaatggcaaagggctgggtgagatcagcgcggcctccgagttcaagacgcagccagtccaaggggaacccagtgcacctaagctcgaagggcagatgggagaggatggaaactctattaaagtgaacctgatcaagcaggatgacggcggctcccccatcagacactatctggtcaggtaccgagcgctctcctccgagtggaaaccagagatcaggctcccgtctggcagtgaccacgtcatgctgaagtccctggactggaatgctgagtatgaggtctacgtggtggctgagaaccagcaaggaaaatccaaggcggctcattttgtgttcaggacctcggcccagcccacagccatcccagccaacggcagccccacctcaggcctgagcaccggggccatcgtgggcatcctcatcgtcatcttcgtcctgctcctggtggttgtggacatcacctgctacttcctgaacaagtgtggcctgttcatgtgcattgcggtcaacctgtgtggaaaagccgggcccggggccaagggcaaggacatggaggagggcaaggccgccttctcgaaagatgagtccaaggagcccatcgtggaggttcgaacggaggaggagaggaccccaaaccatgatggagggaaacacacagagcccaacgagaccacgccactgacggagcccgagaagggccccgtagaagcaaagccagagtgccaggagacagaaacgaagccagcgccagccgaagtcaagacggtccccaatgacgccacacagacaaaggagaacgagagcaaagcatgatgggtgaagagaaccgagcaaagatcaaaataaaaagtgacacagcagcttcaccagagcatttccaacaccacagacacacacacgcacgcacacacacaaacacacatgcacacacacacatctcatttctctagtgtcttttgcctttaaaaaaaactaaacagataaaacatgggaatctcctttttgtaggtttatagaaagggtccctttgttgcacactcacttgtaagaaaatgagacaaaaaggttaaacccacagccaaactaggacactccgttccctgaaaccgttaaaaaatcaaacaaaaggaccccaaattaagaatctaggaagctcagaaacgaaatctaggttcaggaagaccacacttggtgttacccgattggcacagaccagtttcagagaaatactttcaggcactaagactaatcgaatgaacaaagtccacagtttatttttatactttcagtcaagtttgaactctgtaaaacctcataaataagttataatttctgttcactttgtatttgttcagtatgcaaagtgtgtcaccctttctagctgaattcaattcccacgtagactcttattttataggacgaatgccaaattgcagcttctgggggtagatctcaatttgcagtattcagacttctttttctttctttcacattcttttttctttctttctttctgccaactttgttttccagtgtttacaaggtgacaaatgtttgactttggttgtgtttaaatgtccgtgtaaaatagctgccttttattttttaaggtaacaaataccacctagaggtaggtaggattcattccccaacggcctttggcttttttaaggccaaccaagggaacaaaaacttttttacccaaataaaaccaatttggaattttcgg

SEQ ID NO: 388843 - DNA, 4773 bp, Homo sapiens
gctgaggctgggactgtcactcattctccgatcagcgcgtgaacgcagctcggctgccgctggcaggaaacaattctgcaaaaataatcatactcagcctggcaattgtctgcccctaggtctgtcgctcagccgccgtccacactcgctgcagggggggggggcacagaatttaccgcggcaagaacatccctcccagccagcagattacaatgctgcaaactaaggatctcatctggactttgtttttcctgggaactgcagtttctctgcaggtggatattgttcccagccagggggagatcagcgttggagagtccaaattcttcttatgccaagtggcaggagatgccaaagataaagacatctcctggttctcccccaatggagaaaagctcaccccaaaccagcagcggatctcagtggtgtggaatgatgattcctcctccaccctcaccatctataacgccaacatcgacgacgccggcatttacaagtgtgtggttacaggcgaggatggcagtgagtcagaggccaccgtcaacgtgaagatctttcagaagctcatgttcaagaatgcgccaaccccacaggagttccgggagggggaagatgccgtgattgtgtgtgatgtggtcagctccctcccaccaaccatcatctggaaacacaaaggccgagatgtcatcctgaaaaaagatgtccgattcatagtcctgtccaacaactacctgcagatccggggcatcaagaaaacagatgagggcacttatcgctgtgagggcagaatcctggcacggggggagatcaacttcaaggacattcaggtcattgtgaatgtgccacctaccatccaggccaggcagaatattgtgaatgccaccgccaacctcggccagtccgtcaccctggtgtgcgatgccgaaggcttcccagagcccaccatgagctggacaaaggatggggaacagatagagcaagaggaagacgatgagaagtacatcttcagcgacgatagttcccagctgaccatcaaaaaggtggataagaacgacgaggctgagtacatctgcattgctgagaacaaggctggcgagcaggatgcgaccatccacctcaaagtctttgcaaaacccaaaatcacatatgtagagaaccagactgccatggaattagaggagcaggtcactcttacctgtgaagcctccggagaccccattccctccatcacctggaggacttctacccggaacatcagcagcgaagaaaagactctggatgggcacatggtggtgcgtagccatgcccgtgtgtcgtcgctgaccctgaagagcatccagtacactgatgccggagagtacatctgcaccgccagcaacaccatcggccaggactcccagtccatgtaccttgaagtgcaatatgccccaaagctacagggccctgtggctgtgtacacttgggaggggaaccaggtgaacatcacctgcgaggtatttgcctatcccagtgccacgatctcatggtttcgggatggccagctgctgccaagctccaattacagcaatatcaagatctacaacaccccctctgccagctatctggaggtgaccccagactctgagaatgattttgggaactacaactgtactgcagtgaaccgcattgggcaggagtccttggaattcatccttgttcaagcagacaccccctcttcaccatccatcgaccaggtggagccatactccagcacagcccaggtgcagtttgatgaaccagaggccacaggtggggtgcccatcctcaaatacaaagctgagtggagagcagttggtgaagaagtatggcattccaagtggtatgatgccaaggaagccagcatggagggcatcgtcaccatcgtgggcctgaagcccgaaacaacgtacgccgtaaggctggcggcgctcaatggcaaagggctgggtgagatcagcgcggcctccgagttcaagacgcagccagtccccctcctccaccggcatctgctagctcgtctacccctgttccattgtctccaccagatacaacttggcctcttcctgcccttgcaaccacagaaccagctaaaggggaacccagtgcacctaagctcgaagggcagatgggagaggatggaaactctattaaagtgaacctgatcaagcaggatgacggcggctcccccatcagacactatctggtcaggtaccgagcgctctcctccgagtggaaaccagagatcaggctcccgtctggcagtgaccacgtcatgctgaagtccctggactggaatgctgagtatgaggtctacgtggtggctgagaaccagcaaggaaaatccaaggcggctcattttgtgttcaggacctcggcccagcccacagccatcccagcaaccttgggaggcaattctgcatcctacacctttgtctcattgcttttctctgcagtgactcttcttttgctctgttaggaacttgaacacaaaaattaaatttgcttaaaagcccagttcctatgaaaaagatcagtgccccctttggaagaacctggcaggaccaccatggccacagctgctgagcaaccattctgtgtggaagagaaggttttgtgattggaaaaagctttacctccagacatgtcaccactcacagatacttttgtgccacttcataaggagtttgccccctttttaatggcagtaaaaagaatttgagagctctttctttaaatgctatttttaaaaaccatcatgctagatttacagagaagtttctgcatatctgctacttgttgcattttgggttcaaacctaaatatgatgtagcagaggaagaattctaagtaccttctaaagcttgtgtcagattgttaaaatcaccacacattcccctcattctaactctgtgctccttgtcctcccttcaataataattggctttgcttgcaattaagcatttaagtgcccatgttaaaagagccagaccgcactgattcacatgagcgttttgctgacatgatgggcaactgaagtcacccctgttgcccatgcactggaaaaaaagttgaatttgttggatattttctggggctgatgaacgttctgggatgtgctttcagtcctcgtattacggccagcaccttacactgtctctgtgaacggggccaagccatgatgtgccaacaagtgtcagctttgaaaggtgtttgtctcccaatcggggtgactcccctgctgcctggcagcatgtcgcagatcagcacagagtggggccgtggttcagcagtgacccacagaatggctttgagcatcagtctacaggacaggttggaagcatccactgtgaaccaggcattagtcccctacctggcctgtgtgtgctcagtagagaaggagagggacaggccactcccagactgcccagcccaggagggttaataaattggggccgagccaacctgtcagtgcttcctgaatgccccagcctctgtattggtgcgttggttcagtgacattttctaaactctcctgaaaatccagctgctcctccctgctgcttgggagttcacccaggagaggaaatgggtgtgttttgttaaggtcccttgtggagactcagggctgaatcctgcttggtaatatcagtgtgtgtgcttggggatggaccttctactgaataaaaactccctccctccccccattgtggtcacatatcattctacatatctcatctctgagcatctccatggaagcttgatttttgttctttttggtttctttatgtatttttttctgttgttattattttttaatgttcaaagactagcctttccctttgggattccaaatgatcccatgctgtggtctgaggggcaaagccacctatgttggcgctcgccattaatccccagcgctcagtttagaggctcacgtgcagacatcagaggctccatgctgcacagtagctcaggcagggtagtgcctctcaacccagccacaaaactctccccgctggagtcccagatggcgcttcacaccagggcagtggaggcaggcatggtttttgggcacagggcagagcataaggatcccaggtcagtgtgggagagctactggctcttaggatcaccttgggcagaagtcacacggcttcatcctaggagggcccagcttgggagtctgcctccccctgatcccaggaccacccacaggagaggggcagtgtccatctttctgaagggaccctttggagatctcgtcctaagtgtggagaggactgacgtggccctgtcatctcaacacatcccagggtcaggcaggcctcagctgaaacaatgtcagggtcctcaagggtcccatttagacagacccacggcttgtaacagtgcgctcctcaggaggcagcactagcgcatacccactccccacggacactgagttcctggtgacagctgcagccccagccccgccaggagtcctggagacagcagccctcagagaccctgcaggagtgagtgcaccccaccttgctcagccacaccccactcccctgtgccctgtagttgtgctgcccatgctccacacaccatggggcccctttgctcatttttggactatttatacagcaggtttggatcatgtttttctactaataagaatgctaacattgttgtgtagataatcagtgagggctttatgaagtttacacctttgcattattaaaggaaataacagttcatgtgaaaaaacca

SEQ ID NO: 388844 - DNA, 5042 bp, Homo sapiens
gctgaggctgggactgtcactcattctccgatcagcgcgtgaacgcagctcggctgccgctggcaggaaacaattctgcaaaaataatcatactcagcctggcaattgtctgcccctaggtctgtcgctcagccgccgtccacactcgctgcagggggggggggcacagaatttaccgcggcaagaacatccctcccagccagcagattacaatgctgcaaactaaggatctcatctggactttgtttttcctgggaactgcagtttctctgcaggtggatattgttcccagccagggggagatcagcgttggagagtccaaattcttcttatgccaagtggcaggagatgccaaagataaagacatctcctggttctcccccaatggagaaaagctcaccccaaaccagcagcggatctcagtggtgtggaatgatgattcctcctccaccctcaccatctataacgccaacatcgacgacgccggcatttacaagtgtgtggttacaggcgaggatggcagtgagtcagaggccaccgtcaacgtgaagatctttcagaagctcatgttcaagaatgcgccaaccccacaggagttccgggagggggaagatgccgtgattgtgtgtgatgtggtcagctccctcccaccaaccatcatctggaaacacaaaggccgagatgtcatcctgaaaaaagatgtccgattcatagtcctgtccaacaactacctgcagatccggggcatcaagaaaacagatgagggcacttatcgctgtgagggcagaatcctggcacggggggagatcaacttcaaggacattcaggtcattgtgaatgtgccacctaccatccaggccaggcagaatattgtgaatgccaccgccaacctcggccagtccgtcaccctggtgtgcgatgccgaaggcttcccagagcccaccatgagctggacaaaggatggggaacagatagagcaagaggaagacgatgagaagtacatcttcagcgacgatagttcccagctgaccatcaaaaaggtggataagaacgacgaggctgagtacatctgcattgctgagaacaaggctggcgagcaggatgcgaccatccacctcaaagtctttgcaaaacccaaaatcacatatgtagagaaccagactgccatggaattagaggagcaggtcactcttacctgtgaagcctccggagaccccattccctccatcacctggaggacttctacccggaacatcagcagcgaagaaaaggcttcgtggactcgaccagagaagcaagagactctggatgggcacatggtggtgcgtagccatgcccgtgtgtcgtcgctgaccctgaagagcatccagtacactgatgccggagagtacatctgcaccgccagcaacaccatcggccaggactcccagtccatgtaccttgaagtgcaatatgccccaaagctacagggccctgtggctgtgtacacttgggaggggaaccaggtgaacatcacctgcgaggtatttgcctatcccagtgccacgatctcatggtttcgggatggccagctgctgccaagctccaattacagcaatatcaagatctacaacaccccctctgccagctatctggaggtgaccccagactctgagaatgattttgggaactacaactgtactgcagtgaaccgcattgggcaggagtccttggaattcatccttgttcaagcagacaccccctcttcaccatccatcgaccaggtggagccatactccagcacagcccaggtgcagtttgatgaaccagaggccacaggtggggtgcccatcctcaaatacaaagctgagtggagagcagttggtgaagaagtatggcattccaagtggtatgatgccaaggaagccagcatggagggcatcgtcaccatcgtgggcctgaagcccgaaacaacgtacgccgtaaggctggcggcgctcaatggcaaagggctgggtgagatcagcgcggcctccgagttcaagacgcagccagtccccctcctccaccggcatctgctagctcgtctacccctgttccattgtctccaccagatacaacttggcctcttcctgcccttgcaaccacagaaccagctaaaaacattgcacagaatcactgctgtaacatgttccaagctggtcttcataatgctctaatgaagtaagatgtgtgtggaggacctgaatctcctgaagaatccatatgagtatgcgtgcatgttcatagtgttcaagcatcaaagctgtgtgggagttttagattttataatatttctgcttgcacagaaaaaaaatggcatacatcccatcaagcagaacaagaaggcagaaagcagaaggggaacccagtgcacctaagctcgaagggcagatgggagaggatggaaactctattaaagtgaacctgatcaagcaggatgacggcggctcccccatcagacactatctggtcaggtaccgagcgctctcctccgagtggaaaccagagatcaggctcccgtctggcagtgaccacgtcatgctgaagtccctggactggaatgctgagtatgaggtctacgtggtggctgagaaccagcaaggaaaatccaaggcggctcattttgtgttcaggacctcggcccagcccacagccatcccagcaaccttgggaggcaattctgcatcctacacctttgtctcattgcttttctctgcagtgactcttcttttgctctgttaggaacttgaacacaaaaattaaatttgcttaaaagcccagttcctatgaaaaagatcagtgccccctttggaagaacctggcaggaccaccatggccacagctgctgagcaaccattctgtgtggaagagaaggttttgtgattggaaaaagctttacctccagacatgtcaccactcacagatacttttgtgccacttcataaggagtttgccccctttttaatggcagtaaaaagaatttgagagctctttctttaaatgctatttttaaaaaccatcatgctagatttacagagaagtttctgcatatctgctacttgttgcattttgggttcaaacctaaatatgatgtagcagaggaagaattctaagtaccttctaaagcttgtgtcagattgttaaaatcaccacacattcccctcattctaactctgtgctccttgtcctcccttcaataataattggctttgcttgcaattaagcatttaagtgcccatgttaaaagagccagaccgcactgattcacatgagcgttttgctgacatgatgggcaactgaagtcacccctgttgcccatgcactggaaaaaaagttgaatttgttggatattttctggggctgatgaacgttctgggatgtgctttcagtcctcgtattacggccagcaccttacactgtctctgtgaacggggccaagccatgatgtgccaacaagtgtcagctttgaaaggtgtttgtctcccaatcggggtgactcccctgctgcctggcagcatgtcgcagatcagcacagagtggggccgtggttcagcagtgacccacagaatggctttgagcatcagtctacaggacaggttggaagcatccactgtgaaccaggcattagtcccctacctggcctgtgtgtgctcagtagagaaggagagggacaggccactcccagactgcccagcccaggagggttaataaattggggccgagccaacctgtcagtgcttcctgaatgccccagcctctgtattggtgcgttggttcagtgacattttctaaactctcctgaaaatccagctgctcctccctgctgcttgggagttcacccaggagaggaaatgggtgtgttttgttaaggtcccttgtggagactcagggctgaatcctgcttggtaatatcagtgtgtgtgcttggggatggaccttctactgaataaaaactccctccctccccccattgtggtcacatatcattctacatatctcatctctgagcatctccatggaagcttgatttttgttctttttggtttctttatgtatttttttctgttgttattattttttaatgttcaaagactagcctttccctttgggattccaaatgatcccatgctgtggtctgaggggcaaagccacctatgttggcgctcgccattaatccccagcgctcagtttagaggctcacgtgcagacatcagaggctccatgctgcacagtagctcaggcagggtagtgcctctcaacccagccacaaaactctccccgctggagtcccagatggcgcttcacaccagggcagtggaggcaggcatggtttttgggcacagggcagagcataaggatcccaggtcagtgtgggagagctactggctcttaggatcaccttgggcagaagtcacacggcttcatcctaggagggcccagcttgggagtctgcctccccctgatcccaggaccacccacaggagaggggcagtgtccatctttctgaagggaccctttggagatctcgtcctaagtgtggagaggactgacgtggccctgtcatctcaacacatcccagggtcaggcaggcctcagctgaaacaatgtcagggtcctcaagggtcccatttagacagacccacggcttgtaacagtgcgctcctcaggaggcagcactagcgcatacccactccccacggacactgagttcctggtgacagctgcagccccagccccgccaggagtcctggagacagcagccctcagagaccctgcaggagtgagtgcaccccaccttgctcagccacaccccactcccctgtgccctgtagttgtgctgcccatgctccacacaccatggggcccctttgctcatttttggactatttatacagcaggtttggatcatgtttttctactaataagaatgctaacattgttgtgtagataatcagtgagggctttatgaagtttacacctttgcattattaaaggaaataacagttcatgtgaaaaaacca

SEQ ID NO: 388845 - DNA, 552 bp, Homo sapiens
gaattcgaggatccgggtaccatggcgcgtgaacgcagctcggctgccgctggcaggaaacaattctgcaaaaataatcatactcagcctggcaattgtctgcccctaggtctgtcgctcagccgccgtccacactcgctgcagggggggggggcacagaatttaccgcggcaagaacatccctcccagccagcagattacaatgctgcaaactaaggatctcatctggactttgtttttcctgggaactgcagtttctctgcaggtggatattgttcccagccagggggagatcagcgttggagagtccaaattcttcttatgccaagtggcaggagatgccaaagataaagacatctcctggttctcccccaatggagaaaagctcaccccaaaccagcagcggatctcagtggtgtggaatgatgattcctcctccaccctcaccatctataacgccaacatcgacgacgccggcatttacaagtgtgtggttacaggcgaggatggcagtgagtcagaggcctacttcacaaagcgccttcccccaca

SEQ ID NO: 388846 - DNA, 403 bp, Homo sapiens
aggtgtgctgcatcagttgtggttctgaattggctttggggtgaatacaaaagcatccctctgacattatattagtttgttcgcacactgctaaagacattacccaagactgggtaatttacgaaggaaagaggtttgactcacagttccacatggctggggaggcctcaggaaacttacttataattatggcgggaggggaagcaggcaccttcttcacaaggcagcaggagatggaaatgcaagcagggaagtgccagatgcttataaagccatcagatctcatgagaactcactatcacaagaacatcatgggggaaaccgcccccatgatccaatcccttccctccctcgatgtaaggcttacaggtccctccctggacacatggggattacaattcga

SEQ ID NO: 388847 - DNA, 223 bp, Homo sapiens
gggtctttttttttttaccttgggaacactgaatcaacaagatgtggtgcacctgcattttgaatgtgacccatcgcataaggtcaggtgaattttccacttgggtcacactagtgttggtaacgtttcatatttgggagcatttcgggctttgcatttttggaatggggatgctcaaagatgacattcttgtttgttttttttaggtgtggtaatgatatcg

SEQ ID NO: 388848 - DNA, 2482 bp, Homo sapiens
  misc_feature (978)..(978): n is a, c, g, or t
  misc_feature (993)..(993): n is a, c, g, or t
gactgcactgctgtgggaaacgctgtcctgaatggtgctgcagctcccacccaccttgtgcacccatctaccatcaggaagctctccatgtgcaaactggaatttagccagctggaatttattcctgtccctctgggaagctgtgtttgcttcttctggcctcccattctcttaaatgagatcagcagagtaggaaagggtgagaaggcattgcctatcacatgaagtgatggggccagagaccctaaggacccttccttctacgaatggttggtcaccttttgaggactgcaaagacttaggcatgtcataggcagactaaaggaagaatacacagttcctcttggactgctacatcttttgtaagcccttttccaggactaaactaagttcaattaagttctttaaaacagtaaattccgggatcagccttcgggccctcttctctgaccaattttatagcgtaccctcgttttttggtgtgctgcagtggtcatgatttttgcttgagaagtctgcaaacatagacacttctcttgaggttccatgtttatggatgatgttgtgttaatcctagccaattctgtgctattgggaattctccaatcatgaacactggggtggggaggaagacacaaatgccatgtgaggaaaggaaaatgcagtcgtctttttggaggatggctttttaaatacacccttcttagcaggctgcttaaaatacacaggagaaaaggctctgctgggcaatgaaccagatgaaaagctgcccacccagatcactgttgcaggttgactatttggcttagcaactcatgggatttcagaggcccttgaagtttttggtgagtatagtgtgggggagagcaggctttttaaaaggggggggggcatcctcctctgtgtagcactgtttaagatcactgtaagttgaccagtttttgtttacttttagcttctcttagaggcactcctctnttgcttggaagtctnttatggggtataaggtgctacatggtagctgtttccccccttgctaaaatgacatggatgaattttaaaaatgaaatgagaccttctagaggcaaccattatctgcagtgcctggctggtcgactttagagtaggaagctcttgaatccaggagcaaattagttaaaaccccaagttccagtggtaactggtataagcaaaatggaaactgaggggctatggaggaatctctgtttgttggaacgtaatgaaaccatggaggaaataccagatttaagggctaagaagctggcccgatgggtaaatcagtgttgggagtcaggttcttggcccttcaaggacttgctatgcaacctcaggcaaattcctctcagtctttgtgctttctctttcttgtctcatctgacagttatgaatataacgtaaaataaagatcaactatcattgataacactgttcctgcaaatgaatactgtgaaacatcagggaaagaggaaaaaattaagccacaagaaaaccatttggcagtgtccttaaactttttttgggggggggcagtgtaaaacatgaaacctagtaagataattgggccattagatcttcatcattaaactcactttgcaaggaagtgtaagaaatctgtaaaacaaaagacattcctatctcagaagctcaaactggtgatttccaactgcctctttacaggagggggctcaaggcttctgatgagcaaaggctgtgtgttgtatgacagtccactctctgcacctacacttccacgtgccacgactgacaacttggttataaccatgaaaataatgaccatacctccccagccagcagggtctggaaggcctgaggaggctcatttttaaacactgcactttaaaaattggaaaccgtgagatgaagaaaaattcaattaagcggaaatgagttttgttttattgcctgctgctgaagggctctgggcatgctgaaagctaaatgaaaagcacatcactggctctctctttcttggattggtcaattggccctttttgcagtagttgctccaactgttctaaacagtgagtgactggagccaaaaagagagagctcagcaaagccatcccatccacactctgcttggtaggaccacactaaaagcacagtttcatgctgctagctctggtaaggagacagctgcaggtttgggaggtgcaccaagcattcctttgcttagggaggcagagcacaggtgaacagaggaaggacacccccactctcatctattgcccaccgagaggcaagaatcacaccaactttcccacttgaggactgtgttcggccaaacaagcaggttcagggctgcgggattccagaagttgctctgagcttgcaatcagacctcaaagccccagatcccctcagctctggatcgttgccctcatccttcacaatgtaaattttgtacagttaaagagaaatgaagtctcgtttcctgggg

SEQ ID NO: 388849 - DNA, 2643 bp, Homo sapiens
  misc_feature (978)..(978): n is a, c, g, or t
  misc_feature (993)..(993): n is a, c, g, or t
gactgcactgctgtgggaaacgctgtcctgaatggtgctgcagctcccacccaccttgtgcacccatctaccatcaggaagctctccatgtgcaaactggaatttagccagctggaatttattcctgtccctctgggaagctgtgtttgcttcttctggcctcccattctcttaaatgagatcagcagagtaggaaagggtgagaaggcattgcctatcacatgaagtgatggggccagagaccctaaggacccttccttctacgaatggttggtcaccttttgaggactgcaaagacttaggcatgtcataggcagactaaaggaagaatacacagttcctcttggactgctacatcttttgtaagcccttttccaggactaaactaagttcaattaagttctttaaaacagtaaattccgggatcagccttcgggccctcttctctgaccaattttatagcgtaccctcgttttttggtgtgctgcagtggtcatgatttttgcttgagaagtctgcaaacatagacacttctcttgaggttccatgtttatggatgatgttgtgttaatcctagccaattctgtgctattgggaattctccaatcatgaacactggggtggggaggaagacacaaatgccatgtgaggaaaggaaaatgcagtcgtctttttggaggatggctttttaaatacacccttcttagcaggctgcttaaaatacacaggagaaaaggctctgctgggcaatgaaccagatgaaaagctgcccacccagatcactgttgcaggttgactatttggcttagcaactcatgggatttcagaggcccttgaagtttttggtgagtatagtgtgggggagagcaggctttttaaaaggggggggggcatcctcctctgtgtagcactgtttaagatcactgtaagttgaccagtttttgtttacttttagcttctcttagaggcactcctctnttgcttggaagtctnttatggggtataaggtgctacatggtagctgtttccccccttgctaaaatgacatggatgaattttaaaaatgaaatgagaccttctagaggcaaccattatctgcagtgcctggctggtcgactttagagtaggaagctcttgaatccaggagcaaattagttaaaaccccaagttccagtggtaactggtataagcaaaatggaaactgaggggctatggaggaatctctgtttgttggaacgtaatgaaaccatggaggaaataccagatttaagggctaagaagctggcccgatgggtaaatcagtgttgggagtcaggttcttggcccttcaaggacttgctatgcaacctcaggcaaattcctctcagtctttgtgctttctctttcttgtctcatctgacagttatgaatataacgtaaaataaagatcaactatcattgataacactgttcctgcaaatgaatactgtgaaacatcagggaaagaggaaaaaattaagccacaagaaaaccatttggcagtgtccttaaactttttttgggggggggcagtgtaaaacatgaaacctagtaagataattgggccattagatcttcatcattaaactcactttgcaaggaagtgtaagaaatctgtaaaacaaaagacattcctatctcagaagctcaaactggtgatttccaactgcctctttacaggagggggctcaaggcttctgatgagcaaaggctgtgtgttgtatgacagtccactctctgcacctacacttccacgtgccacgactgacaacttggttataaccatgaaaataatgaccatacctccccagccagcagggtctggaaggcctgaggaggctcatttttaaacactgcactttaaaaattggaaaccgtgagatgaagaaaaattcaattaagcggaaatgagttttgttttattgcctgctgctgaagggctctgggcatgctgaaagctaaatgaaaagcacatcactggctctctctttcttggattggtcaattggccctttttgcagtagttgctccaactgttctaaacagtgagtgactggagccaaaaagagagagctcagcaaagccatcccatccacactctgcttggtaggaccacactaaaagcacagtttcatgctgctagctctggtaaggagacagctgcaggtttgggaggtgcaccaagcattcctttgcttagggaggcagagcacaggtgaacagaggaaggacacccccactctcatctattgcccaccgagaggcaagaatcacaccaactttcccacttgaggactgtgttcggccaaacaagcaggttcagggctgcgggattccagaagttgctctgagcttgcaatcagacctcaaagccccagatcccctcagctctggatcgttgccctcatccttcacaatgtaaattttgtacagttaaagagaaatgaagtctcgtttcctggggaaaaaaaagaaaaaaagaaaaaaaaaagacccacccatccttatttattgccatatgactttggaaaacagaagctggtgcgtttgtttgtatatgcctcctgtgtgttggcatgagatgtgtacggtaaaattatgtaaaataaatatggaaattcttta

SEQ ID NO: 388850 - DNA, 939 bp, Homo sapiens
tcggtaccgggagtggagagagaaagagagacggagaagagagaaggagagagagaggagaggaagatgggcagggatgtatcccattactgatgtttctctgtaaactgtcttttctatttcacattgtttcagaatgtaacacatagacaactactaaaattacaagcatttaagatgcaactcaatgaatgatcacaaaatgaatgcacccatacaactatcactcaggccaagaaacaggcccccagcacagtggttctaacctgcattctatttcatctccagcaaaatgtctgtttctgtcattcgcccatgtttcttattgcttgatttttgctgacttctcaagagcaccccagcatttcagatgccgttctctctccactcccgggagtggagagagaaagatacagaactgtattttatttcattctgagtcaaggttttcagaaaacaaatatttcatttggagtgttcatttcctgaatactagacagataacttctgaactagcttgagaaattaaaatttgattctagggtagtaaactctttgcctcttggagccaagcaggtttaaggtacatgtacatacattggattcatggtagacagcatacccaccctaaagagggcagctctatttaaagggaatagtcattgttcatttctggctggttccgttgttttgttctgtcaatctgaatgttcacagggaacttgaactggtcaggtccaaaactaatcttaatctcagttgcctccaacccttcataaacagaccagctatctgtattgctcctctttcctctcccctccctctcctttcttctttctccccatccctcctttttccttcccccttcatttttgtcttcccttcctccaccttctctttcctttttttttttttttaaaaaaaaaaaaaagagagact

SEQ ID NO: 388851 - DNA, 363 bp, Homo sapiens
tgtgccctaggacacgctgttcctgcagcttggaaggcctctgtcctccatccgcgcgccctcactctcttgctacgaactcccattcatccttcaaaacccagcctgagtgtcccctcccccgggtcaccccctttgacctgtcaatcccctccctccgggtccccagcaagcttttcggtttggcttctccgcactctcatgaccgattgccctacatcttggcgctcccagactcgggccttctccagcaccggagtcgtctggtttgctcgctttacactccaagcacctagtaccgagcctgactgggtgccagagggcgcgcctaggctcaggctggctccacccgccccgtgcctc

SEQ ID NO: 388852 - DNA, 351 bp, Homo sapiens
gtttggaaaaatattaagagaggaacactcctatcccctgtgtttttagaatttgacacttggtgaagaataaatagatctaggtttcaaggcaagctttgtcattgattggctgtataaccttggttagaacatgtttcctctttgggcttctgtttcctcatcaaaaatatggaacccatactgttgataaaaacacttcaagtggtttgttaagacttttaaatgagatgtactatcctttgaaaagtatgagtcatcttcaaataagggctaaattcatgaataaagtgaaaatttgtaaagcgtatataatgaaaatttcactaattttggtgaaagcccatctct

SEQ ID NO: 388853 - DNA, 393 bp, Homo sapiens
gtgcaagccaatactttgtgatgttacattgattactatatttcttcaattctagatgtatattttcccacatattaacatgtctaaaattgatatgtatttcacagtcatcattggctaggaataggaagttgtcacagccaggtcatgcatctcatgacttaagaattttgacagtccaggccagttgtgcagtgcctcaaacctgtaatcccagcactttggaggccgaggcagacagatcacttgaggtcaggagttcaataccagcctggtcaatatgatgaaaccctgtctctactaaaaatacaaaaattagccaagcatggtggtgcactcctgtaatcccagccactcgggaggctaaggcacgagaattgcttgaacctggga

SEQ ID NO: 388854 - DNA, 365 bp, Homo sapiens
gggaggatcgcttgaacccagaacgcaatggttacagtggattgcgccactgtgctccagcctgggcaacagagcaagactcagtctcaaaaacaaaaacaaaacaaaacaaaaaagatgagatttatagaagcctgaggctattccatgagcagaattttgaggccacacctgggttgagcaactaatccctgagcttaggaacagaaagatgaacaagggagccctaggagtcaacagatgccccaaaccacaagtcactaaaggagggaaaggaaggctaagcactttctcaaactgtggcgctcccaagcatggttttaggcagtacaaagtgttactttagccgttacgggattatacta

SEQ ID NO: 388855 - DNA, 452 bp, Homo sapiens
agcatatattggatttgttgaacaggaagtcatttgggacctttcagaagtgtagtatcctgaaacaccaagcaaattcagaccttcatgctgaggtgaatttgtaaagggtcattgggcgtaccctttgggagaactgatacggccttcagacctttgaccaaaacagataaaataaacacagaaagacataccaagaatgacttaaagggaggaagcaaaggagtccaataatgtattacatttcaacataaaggagaaggatgggcctcctctcactggtgtgaaagagggttcttagagatgattgatacgcataccgtaagtatgttccctggaccagcaacatcagcattactcagaagcttgttagaccctacctcagatctactggatcagaatttgctttccaacaagacccacaggtaattcttttgtacattacattttaa

SEQ ID NO: 388856 - DNA, 207 bp, Homo sapiens
caagataggtggaataatcaaatctatattgttgcaagacttatattttatataaagtggtatgattgacataagttaatcattaattgactgcagagctaaaaagcacagagaagagttaaaatggaatattggaaatatctgactaacccaaaataaggcaggaaaagagaaacaaagaaacagatgagaggaacagaaataaac

SEQ ID NO: 388857 - DNA, 689 bp, Homo sapiens
gtgtaagaatgcttgtttttccacaccctcaacaacactatgccttgctgcattattaatgtgtggaaatagccagtgattttaagtattatttgccttagagattatagtagtagaactcagatttatagtgtgacatgctgttctggaagagcaaagttattaccttaaatgacccagagtctcactctgcctttgcacctgttttagttactttcaaagttaacttggctggaaacttgactgtatatcaagttagcagttactgtaatagtatagtttgtcaggaagtgtatgtcattctctttgacataatggatggtattttgtgaggaaaaataacagtgattctaatgatggagtcatttctcattatggtaactaatggtcatcttaacagttggtgaaaaaagaggtggcagtttttatagttaacatattagtagcattctatttgggattttcctcttttcctgatttgtaattcctttgccatgtgttgtgaatactgagttccaaattaaatttttattcagctggaattttggtttttttttttgatgaatggtatgcagtatgactaaagcctaggtttttttgcccccttgagcagttagccacttccaacattatttgttgaaataaaccattcttcctaacttgagataccatatttatctttatcatat

SEQ ID NO: 388858 - DNA, 981 bp, Homo sapiens
cccaagaggcagagctagattgcaatgagctatgaccactccattgtactccagcctgggcaacagagtgagaccctgtctcaaaaaaaaaaaaaggccgcctgggttcaagtcgatcaccttttgctgtgtgaccttgggtgagttactcagtttctctgtgcctcagtgccaacattaatatgaagataggatttacttcatagggtggttgtgaggaagaaaggtgatgtgggtgaagttcttggcacagtgcctggaagtgagctcttaccaactggcactgtcatcagaattgtggcttccatggagtttgagattctgccttagtccccttgcatcttggctcggcacatgcactttctgatcccctggcccattcattcattccttggtgtgtgtagtccctcagcagcctcctccagctctggggcttcaagtcacatgtctggtcagaaactctccagagctttgtgacctcccccgggaatacttggtgcctccccgtgggtggctgaggcatctgagtccaaagcaggccccacagaactgccctgtgttctctgcctgagtgtgacctcacatctggggacgccccgtccacaggttctcagtgcagatcccagggtcaccctggatttccttctttccacgattcccagagtccaacacgtcgtcttgggcaacagagtgagaccctgtctcaaaaaaaaaaaaagggcccctgggttccaggtcgatcacctttggctgtgtgccctggggttgagtactcagttcctctgtgcctcagtgccacctttattttgaagatgggattaactccataggggggttgtgaggaagaatggtgatgtgggtgaatttctgggcacagtgccgggaagtgagctctaaccatgtggcatggtcatcagaattgtggcttcgataaacaccggtgtgtatcgatgccaccatgattgccagagactccacagt

SEQ ID NO: 388859 - DNA, 343 bp, Homo sapiens
atatcgccagtccttacagtgctgcaaaggaggcattatgaccttccatttgaaagctgaggaagtggaagctcagagatgtttagtaacctattcaagatcaccatgctcttttttctataccaggtcagcctgagaggttgagtgagctctgcaatgctcctggtttactcaggaggattagggcaataggcagaccttttcttgtttttcttactgtctttccttttgatcaaaatgtccatctcaaaatgtttaaatcatctccagagcaagttcgagttctcctgtgtctgcttttgatgacctttctgtctcttcctttgctaccacactgccttct

SEQ ID NO: 388860 - DNA, 2058 bp, Homo sapiens
aaactacctgtggggtgatctgggtttgctacagaaactaacggacactggcaaggggtcagaggcattcaacccaattctacaacacaggcaggtggtcaaaaccaacctttccaaccagaatcagcctgatatggatagatgctgtcccttatggagggacgcagacttcagaactgtgcccatgactgctgactgccaccaccaaggccctcaggtacacagcctgcctcctgcaggatgatgtgggcagatttcagccctagttaacagaagagtcccccaggaggtagggggcccccatcactggagacatgccagcagagcctctggccacctaaccaggaggtcttctgaaatgactatacgaggtaaagaagtagtaccagatggtcccaaagttcccttttagcctgaaagcttttctttgtccctccttagtgaatctgtgttccgagccctactctaaagttcagtggtcaatacaatagtccaccaagagactgggaatgattagaagtgaaattggtccctccttaccaaggaggggcagatgatctccattgcacagggcgattagattctggagctgaggtggggactgcaggaggccacctagtctggtaggtttcaacccaagctgtgtacattagaattcccttgggagcgtgcaggaaatacagatgcccatgccacattccagaccaactgaagctgaatctccagagtagggcctgtatgttcatataagctccacaggtgatctgcagtacagtgaagatggaagactgcatgtgtacctatttgcaataaagatgaagaggacagcaagctccagacaggagctgggactcaacccagatctcttaagtcctgcctggtggctccttaaaagtccagaagtgttgccccaagccctccctcaacatctctgggaaccgcagctgcagcacgatgggggttcagtgcccctgtttgccccttacccagctgtggtttattctgcttgtatgtctgcacaggccggatgctcgtgttccttgtcttattctccatttactcagtcactggggctcactcccgtctgatgcactagccaagattgccttagtgtgctccagaaaagaaggccaaatcccaggcattgtcagggcagcagagctctacaggataggcttacctttcccacctgtgtggctagcacttcacagtttacaaattcctcccacctccactcagtgacacatgctgttctaacacaggtcaggcaggcattacagtccccatgttcagaatcaaagacctagcctcagagaagtgaagaaacatcatgccaaggtcattgactgccaagcggtagaggtggggttgcatccagagagcttcccggtatgcctctgcacaatgccattccttggccagctccctccaccccaagggacccagactgcacacttaacaaacaggacacaggtgtctttgaacaaacttttttgtattattatttttacatctagaataaattatttaaattatttcacagcaagggagagggataggtaatttttatcagatatttttttaaaccatctgttttttaaattacatttttgtttatgttcttgagctgatgtagtggaacttgcctagcacattcaggtcccagccagttggcagagcatgctctcatctccttattccataccctgggcgtcccctttctgttgactcaggaactttctgagaatgaggacagcactaggagatgagctttggcaggtatccaccttaacgctacaataattgtgcttcctgaaacaaaacttgagattgtatcatagaaggaaacaggaagtcagaaatcaaatctatgcttttaattgaaaccgtgcctgaaacagtttgaatgattgttttaatgttgtttctgaaattccttgtacctttgtgaaaaataatgataataaataaaagtgaaaataaatagatgtggaatatgcaatggaaataatgtaacaaaataataaacatctggccattttactacaaaaaaaaaaa

SEQ ID NO: 388861 - DNA, 434 bp, Homo sapiens
ggggttttatacctattttactttctagttagtcactgtagaaaagtcatatagctcaaaagttttttgtctacattacttgtaaagatgtagagtttcattttatctagttggtaatcaaagggatttatatgacgtgtccttccagttcccttccagattttaagaaaccagatttgctggtgatatattattcggatgacctttaggatgtgagctgatacataaaattaagcaaagggcaaaagctttgcccttccatccccctcaaacagtaaccattaatgagactgaaatgcagatatcaaagaaataaaagttacagttaagtgaaaccatgatatataatttataataaataatttggggccaggtgcggtgactcatgcctgtaatagcagcactttgggaggccaaggcaggcggatcacctg

SEQ ID NO: 388862 - DNA, 230 bp, Homo sapiens
ctctgtggtagagtctctttgtatccaaattcccactaagctcagtagcccatctgcctaaacaatattgctgggtgctccaccccctcaaaacatgtttgtagcaagttatcttcaaaattgaggcccaagggttgggagaaaatggggagtgaatactaatgggtatgggatttcttttgggggtgatgaaaatgttttgggtttttttttgttttgttttgtttttg

SEQ ID NO: 388863 - DNA, 453 bp, Homo sapiens
aaatactggatcaggccacagaaaggtaatctaggatcttgttcaaagtgtggtccatagcaacatcagtttcacttgggagttactgagaaaggcagaatctctgcagacctactgaacgaggatctgcattgtaaaccatttatcaaggctgggcatggtggctcacacatgtaatcccagcattttgggagcctgaggcaagaggatacttgagaccaggatttcgagaccagcctgggctacacggtgagaccccatctctacaacaaattaaaaaattagccaggcatgctggctcatgcctgtggtgccagctaggaggatcccttgagcctaggaggttgtggtaccaggtaggaggatcccttaagcccaggagattgaggctgcagtgagcccacattgcatcactgcactccagtctgggtgacagagcaagaccctgtctca

SEQ ID NO: 388864 - DNA, 708 bp, Homo sapiens
cctgcctgcctcaagcgctaacatggaatggtcttgcacagagttagagccaagcttccaccagatggcaggcagaaaaaggtcagggcatgtcccaccaccctgctggatttagggcagggagaaatctgtgctgcttgactttaatcaagacatattcagcattttccatgtgttgacactttgcagatagtgatgtcactgtcatgagtaggtctgcctggggaaaacacactttcctaaatgctgacttcttttttttttaaaccaccactgcataaaaaaatacagctgatctagccatatttccacactgaatggtgtgctttccttctgtatactgcaaagtctagacaggcatgcagcaaagacttcagaacgtaattacatgaaagtgaaggatgtaaacagttgtctactcacaagtggttacttgcaagtggtgagatgaaagcccatctccagtgagctgtttaggaatattcctgacagcttcgaaaagcaaagattcttctaaacgatacagacaatctgagaaagcagatttcttggccagcccactaggccaatacagatttgaccctcaaatggcaagagatcgctgactcacagaatgacgaatcaacgtgtgtgtgtgtgtgtgtgtgtgtgtgtgtgtgtgtgtattttaggttccatgtttatttggtgctccacataatcacgaat

SEQ ID NO: 388865 - DNA, 1438 bp, Homo sapiens
  misc_feature (1437)..(1437): n is a, c, g, or t
agcggagataagattcagaggttgaggatggggtgtcctggtggactgaaggtagcctactagctgtacatgggtgacaacttgaaacttcagaaccctgaagtttaaaaaattctaaaggtgcctgtcatctcagagagtgacgtaagtgttctttctttatttgggggaagtccaggagaacatattacagacatgtttaatccacatgcattagatgttcctgctgtaatttttgacaatggttcaggactctgcaaagcaggcctgtctggagagattggaccccgccatgtcatcagctccgtcttgggacattgtaaattcaatgtgcctttagcaagacttaatcagaagtacttcgtggggcaagaagccctgtacaagtatgaggccctacatttgcactaccccattgagcgtggactggtaacaggatgggatgacatggagaaactctggaaacatctctttgagcgggagcttggagtaaaacccagccaacagcctgtacttatgaccgagccctctttgaatcctagggaaattcgagaaaagctagcagaaatgatgtttgagaccttcagtgtgcctggtttctacctgtctaatcatgcggtggcagcgctctatgcctctgcctgtgtcacaggcctggtggtggacagtggagatggggtcacttgcactgtccccatctttgagggttactccctgcctcacgcagtcaccaaactctgtatggcagggagggacatcacagagcacctcacccggctcctctttgctagcgggtttaacttcccttgcatactcaacaaggccgtggtaaataacatcaaagagaagttgtgctacatcgccttggagccagagaaagagctacgcaagagccggggagaggtcctgggagcatacagactgccagatggacatgtcatccactttggggatgagctgtaccaagtgcccgaggttctttttgcacctgaccagctgggcatccacagcccaggactctcaaaaatggtctccagcagcatcatgaagtgtgacactgacatccagaataaactttatgcagacattgtactctccgggggcaccactctcctccctgggctggaggaaaggctcatgaaggaagtggaacagctggcttccaaaggtactcccatcaagatcacagcttctcctgatagatgcttctctgcatggattggtgcatccatcatgacctctatgagcagtttcaagcagatgtgggtcacctcggcagacttcaaggagtatgggacatctgtggttcaaagaaggtgcttttaaagatccttgagcagaggagacatcttgaagtgtcagattacaggagtaccagtgggagatggcattttcttctgggcttcagcatgatgttcaataaaagttttgccattnc

SEQ ID NO: 388866 - DNA, 618 bp, Homo sapiens
caagatggggtgaggtcttgctgtgttgcccaggctggagtgcagtggcctgatcgtaacttactgcagcctttgcatcctgggctcaacctgtctcagcctccccaggagctggaactataggcgcatcccaccatgcccagctaattttttattttttgtagagatggggtcttgctgtgttgtccaggcaggtctcaaactcctgggctcaagcactcctcccacctggccttcccaaagtgctgggattacaggtgtgagctaccatgcccggcatatcttcagatcattcatatctggcacagacagttgacctttttttagtcaacagagctggtttgcacaggagattgtaagtgggtctatagagatggaaagttacaggttccatctagtagaggctactagtttttgaatagagggagagaaatctattccaaaggaattgcttcctcaatccccactggccactgcttgtgcggtgccaggcaagagggtggactacaggggcaggcagtccagctagcggcacagccattcagtgagtcaggagtctttgtgcaaggaaggctgaggtgatgacagagctaacagcaaactcagacaatctgaaaa

SEQ ID NO: 388867 - DNA, 357 bp, Homo sapiens
tgggcatggcagagcaaggggtggtgagaaacaccgtgcagacactcattcgtgggcaagagtcagagcctgtgaaacactagctaaaatttagcgcgtctcaaacttcactgcaattggagccccggggaagcgcctagaaattacctttgccttgggggtggttcctggaaatctgtagcggtaaaaggtctgcacttggtgtggcagccatctaagaactggctttaggaaccagagctctcctcacagtgtggtcctcacatctgcagctctggggagtaggcgctgtgggtgttcacttcccctttcctaggccaggacagctgtgagtgaccatgtgaatggctcacagct

SEQ ID NO: 388868 - DNA, 287 bp, Homo sapiens
gtggaggatcaagatttcccttatggatgtgtgatagttgagttgtctattagtcttccaattggtgataattggtagataattagatatgagtctaaattttagaggagaggtaggagctggaaatatgtgttcatggaccatgcacatatacatagaatttaatgccattgggcttcatgagatcacagaagcatgagtgcacctagaaaaacggttgagaactgagacctgggatactcccttgttaaaaggtaaatgttccttctacattttgaatttataga

SEQ ID NO: 388869 - DNA, 207 bp, Homo sapiens
aaagtctgttactttcctatgcaatagtaataaacatttagattttgaaagtcaaaacatagtaccatttaccttagcaccaaaaaccttaagcataaagctaacaaaacatgcacaggaagaaaactacaaaaaactctgatgagagatatcaaagaaaatctaaataaaaggaaacatttaaaaagtatatttttattgtgaaga

SEQ ID NO: 388870 - DNA, 241 bp, Homo sapiens
gatacattattattaactaaagtacatagtttacattagggctcaatctgtgtattgtacattttacaggttttcacaaatgtgtgacatgtatctgtcattaaagtatcttacagaatagtttcgctggcctaaaattccttgtgtgacacctaattatttctttcacctatgcctgagctgttgaaagacaatactgttattgtctctatggtttttcctttttcaaaatgaaatattt

SEQ ID NO: 388871 - DNA, 790 bp, Homo sapiens
catttttatcagttttggaaccacagctcctccatggccaaatttctctttatgtctcaggtttcagagcatggcctaatatttcccgtacagacaggccgctccgctgcccttctgattcagctgaccactgtgcactgtagcgacgtgcaaggggtaggagtggacacattccagctcgctggggtttggaacggcacctctcattcccagagaagggattctctgtggaggctgagttggcagtgctcaagcttgccttgcggttggcacgtaggccatcagcaatcatctgagtatcaacctgccaagctgaggccgtcctggggcacagagatttattgctaacagaggaaagaaaagaaaccatttccttaattctgctttgcaggccactctcatggaaaggaactcccctgctgccctgatcagttcaatatctaactcatcatgcctgtgttcttccccagcagctcaggccggtctgctaccaggaacaggtgccaaatcagagtgtggaattttcccagcaggccccagggtgtgttgctgccaaggcaactgtggtagggttggggaataactagcgaaccacaaatccagaaaaggaagaggaggcctccttttcggcttgggccaactcaggtacaggctgtcccttgaggaaagctgtgggacacccccaacaccaagtgccaaggccagacaaggccagggcaggccaggctggaccctacgggcagcttgccagacctaggttaaccagaccaggtaaagacaactgagaatg

SEQ ID NO: 388872 - DNA, 382 bp, Homo sapiens
tcctactttttttattttgttgtaagccatctaaaattctcaatgggatgaaactgggtataaatgaatacatgcatacaggaattatagtagcatattccttttcttttttctttttttttttttttgagacagagtcttgctctgtagcccaggctggagtgcagtggtgcgatctcggctcactatagcctccacctcccaggttcaagcaattctcgtgcctcaacctcccgagtaattgggactacaggtgcatgccaccacacctggctaatttttgtattttttagtagagatggggtttcaccatgttggccaggctgatctcaaactcctgacctcaaagtgatctgcctgccttggtttcccaaagtgctgg

SEQ ID NO: 388873 - DNA, 324 bp, Homo sapiens
aattttttgttctgatgcttaccaagcctttagagaccctcaggtaacacaaagtattattaagttagaaacaattcaagtaagtattttctgaagcaaaagagaaactagacacagggcagactctcccgctgaaggtttcctgaacaattaccttgattctgcttaatgtcatctaaacccagtgctcagggcacatgcaataatcatgatagattcccttgttcggaggtagacatggaaagccttagtaggcagacttctcagatggtctccactgatacccatctcctggcatttgtgccctggtggaatttctttccc

SEQ ID NO: 388874 - DNA, 181 bp, Homo sapiens
tgtggggttggggcaggtccccctcccggagagctttgtcttccacaaacacaaaacctggaaatggttgaggaagatggaacctcctaacgaccattgttcgggggcaggagtgggtgcccggaagcatgggtggtagtaggggacccacagctgcagctggcctgctgggcttctgttc

SEQ ID NO: 388875 - DNA, 306 bp, Homo sapiens
actgcactccagcctgggcaacatagtgagaccctgtctcaaaaagaaaagtgataaattatgtttaaaaaatagtttaagccaggcgcagtggctcatgcctataatcctagcactttgggaggctgaggcgggtagatcatgaggtcaggagttcaagaccagcctggccaacatggtgaaaccccgtctctactaaaaatacaaaaactagccaggcgtgatggcgggcacctgtagtccagctactcgggaggctggggcagagaattgcttgaacccaggaggcggaggttgcagtgatct

SEQ ID NO: 388876 - DNA, 522 bp, Homo sapiens
ggacatggagctacctgaaaatggagatctacagacttagggaccactcatggaggagaggagtcaagaggagcacccagccaccgtgcctggctgaacacacattactcagatggggacccaggaggaggaggagcaggttaggttggagtgccaggagctgcggggcaggtgtccagaaggcagatggatctatggagccagggttcagaagaatggcctaaatgtctttaatattctcaggattctacatgggagagggtggggactggggagtgagcctgcccaaacccatccccaatccaagactcgagggagaggccagaccatacacaccatgtccaggcacgttcctggtgttaccagaattagggggcatgggcctgcagttttggggaaggccctgggaccagttatggcgtgagggaggggggcaggaagcatgaggcctactgtgcctgggtcctcatgccccaaactgagctcctccaggcctgctctgccggcacggtcagaagatta

SEQ ID NO: 388877 - DNA, 612 bp, Homo sapiens
gcagtgaacacaacctttcccctgagccactggaattggacagaatgccccattctcctctgatctccattcctcatgtgtggtgtcacccagaagaggaggaaagaatgcatgatgaacttctacaagcagtatccaaggggccggtgatgttcagggatgtttccatagacttctctcaagaggaatgggaatgcctggacgctgatcagatgaatttatacaaagaagtgatgttggagaatttcagcaacctggtttcagtgggactttccaattctaagccagctgtgatctccttattggaacaaggaaaagagccctggatggttgatagagagctgactagaggcctgtgttcagatctggaatcaatgtgtgagaccaaaatattatctctaaagaagagacatttcagtcaagtaataattacccgtgaagacatgtctacttttattcagcccacatttcttattccacctcaaaaaactatgagtgaagagaaaccatgggaatgtaagatatgtggaaagacctttaatcaaaactcacaatttatccaacatcagagaattcattttggtgaaaaacactatgaatctaaggagtatg

SEQ ID NO: 388878 - DNA, 334 bp, Homo sapiens
ggaggagctgagagcagttgttgatggccgtgaaaaaacggagccccacactgcaagaggctgagcagcatcgttttctccagggtgagcagaccgctcctgggtgagatgggcctggcagcattttacggccttctcctgaatggtggcccagctctgcctggctggtctggtgatgggaactgtcattgctcagctgacaccaccatctccccagttccacgttgaacaggatgcacggccataggagtcaaaaggccttcattgctgatgtgaaattcaagttagctgggcatggctggtcctggggccctgggacacagatgattagctc

SEQ ID NO: 388879 - DNA, 345 bp, Homo sapiens
catacatcagctaacagaacaaaaagttttacagtgctttctcatacaatgtctagaatttacagataacaccagtagttttggtcaggggttaataatattattattattttagccaccagggccaggtggtggtgccaaggtcgtctagctatttatcttacttctgtttctttccaactttttgctttctcccttttctcctgtcttataaactagggaaaaggggaggttggagagaaactaagaaggccaacaggagaagtggtggcctcataccatactgtaacagtgctgagttagctgttatttttctgggacctagagaagttgaatagttaggaa

SEQ ID NO: 388880 - DNA, 513 bp, Homo sapiens
caggtccttgcttcattatcttatgagtatgtgttttactttaaatgtgctggttcatatggcctatttttaataaaattaagtcaatgagctaaaatcagatatttaaacaaatagttatactttatgaaatgagaaagacgatatcaaactatatattacaggggcttatttagagagagtaagatttacccagtgattaatttttagggctcagaagtaaattgtgtctgagtacggtggctcatgcctgtaatcccagcactttggggggggcagggtaggcgaatcgctcgagccctcaagtttgagaccagcctgggcaacatgacaaaaccccgtccctacaaaaaaaataaaaaaattagctggtgtggtggcataagcctgtagtcttagccactcgggaggttgaggtaggaggatcacttgagcctgggtgatcaaggctgcagtgagctgagatcgctccactgtactccagcctgggcaacagagtgagaccctgtctcc

SEQ ID NO: 388881 - DNA, 657 bp, Homo sapiens
atagatgaagaaaccaaggctcagtgcctaatctagctacataggtaattagtggcagaactatctaatgcagtgttcagggactgcacgttaactagtttcttatatatttttctgttgccttctaattggtgaaacaaagttttgtctgtagtttttgtttttgttgttttgttttgtttttgagatggagtctcactctgtcatccaggctggagtgcagtagtgcgatcttggcttactgcaacctccgcctcctgggttcaagcgattcttctgcctcagcctcccgagtaggtgggactacaggtgcacgccaccacacccagctaatttttgtatttttagtagagatgggggtttcaccatattggccaggctggtctcaaactcctgatgttaagtaatctgcctgctttggcctcccaaattgctggaattataggtgtgagccactgcgcccagccttttttttttttttttgagacagagtttcacccttgttgcccaggctggagtgcaatggtgtgatctcggctcaccgcaacctctgcctcctgggttcaagcgattctcctgcctcagccttccaagtagctgggattacaggcgtgtgccaccacatctggccaatttttgtattttcagtagagacgg

SEQ ID NO: 388882 - DNA, 787 bp, Homo sapiens
ggacctgcagggtaaacttgggtgcctccatctgggaaagctgatgatgtgttcatgcagtcgatgaccctcactgctttttcagccagggtttctctgccttctgcctggcagagaaaacacactgctatggggaaaatcacagggagggcgctgtgaccagcgcactcaggcaccaagtgtcggcatggctcactgtgctgggtgaaggcctccccgagcattaggtcctccacggggctgtgtcaaatgccctcccacattgtgtcaagtctgcccatggcccaccctccccacagtccaaaaccacacagccctggttctccagctgttctgctgctgtttctgtgctctccctgattaagagcattcagttcctgggctctccctttgagcaggaaatggtgaaagcatgtggctatggtatagcccacagggctgagattgctgtgttgcagtattgatgtaaaatttgttaagaaggaagtacccacagatcactgccatcaactccccagaagttgcactcaagctagtgagcagcccttgtgcttgtcacagttactgtaacaggtagtgtgtatttgcacctggcatcgtgcagcctgcacgtcaacacgttgttttgtgtaactagaacagcacatggaaccactatctctttctcttttttccttctttttcttttttttttttttattttaattttttgagacggagtttccctcttgtcacccaggctggagtgcaatggcgtgatctcggctcactgcaccctccacctccc

SEQ ID NO: 388883 - DNA, 994 bp, Homo sapiens
ccaggaaacactccgaccaactgccacgccctcctttgctccaaaatgacaagctcttttcatctgggagcaaaagctgaagtccccacatttgaactaaattagtttagtgtaaaagtagtacaagattatctcagacaattgtattttaatagtatttttttctagtgataaatgtaatatatgtctactatggtcatttggaaaattctgagacgtatagagcagaaaagaaattctccataaccctaacccacaaaaaataacttttgaaatgcttgtgtattttttaattcttttttaatgcatattgtaggacaacttactgaacatttggatttttagaaatatttttaataaaacgtgttgaagtacagcatacaaaaaagtgtacaaattacaaatacagttcagtaaactttcaaagattaacacaaacatgtccgggcaaccacaactcagctcaagaaattaactaatagtagcattcttcatccccctgttagttttgtctattctgacatttcacatgaaatgaattacttggtaaatattttatagtatttggtttatttccctttatattatatttgaattcatccgtgtcgttgcatgtaacaagtcttttttacaattttattctatgctgtatgaaattcagttatatgagtatacacaaaaaaaaaaaaaaaacgacacacatgacaaccacagtacagaccaacaaacacaaactacacagacggggggggcgcacccaataaattcctccagaagcccgacaatataagacgacctacccacactttcttgtatttctacaagaggacggcccaacaataaagagaccgtcagttataaaacgagagaacacccagccagcaattataaaagcactgtgtcggcgaggaaaaacactcgtagccacggagagaacttttagaaggagagacagcacacttatcgggaggggagcacacctgcgccaacccct

SEQ ID NO: 388884 - DNA, 313 bp, Homo sapiens
acctagcatgctgtgctagtttgacaggtactgtgtattaatcatagtcccaggttgtttgagttgactattattttagcattgaaaataaacatgatttattcctttctcacctacttttaatttctctgtatatccctttttcagttttgactaggaacatcatttatctcttattattagaaataatttcagcaatataaaattttaagggttttttcaatacattttatgacaggtatatatatctatatatatgatatatagattatatataggtgtatatatatcatatatgatatatatatatatt

SEQ ID NO: 388885 - DNA, 744 bp, Homo sapiens
tttttttttgagaactggacattatgaatactatgttgtggtaactctggtaacttaattattttgctcttcagggattgtcaaatcttggttgttgtggctcagagtcatttggtcatgattttttcccaactatttttattctctgttgtgcatggtcattgaaatctctgttctgttatctctgctgtcagccagttatctaataaaaattgtcttaaatgactgcttcctaaagggaggaaaaacacatactatttatttaaatccttgggaagccacttcagctgatgaggactgatgcaatgatagcccacttctgtgtctgcccctcagcattcaaaggcagaaatcagcaataaccctgatatttggacaaaaaggtgcttattgttcaccctggctgcaggaattcattacaagaacatgggcagcagttcccatggatccctgcaataatggggtatggaaaatagttattattgagtggaaaggctgaaattcaccaacattaaccaaaatttatcatcctctttatcaaactcttcccttgatgcttccagtgtttaactagactcgagaattccaaaatagttacttcagacagtttttgacagttcaatagttttctcagtgggaggaacagatttctgtagctttttagtctaccaacctctatgacatcattcttgcttgacttattgtttttattttattatttttttgagatagagtctcactctg

SEQ ID NO: 388886 - DNA, 732 bp, Homo sapiens
gtgaacatgaaggcagagatccaggtgatgcacctacaagccaaagtatgccaaagatgaccagcaaaccaccagaagccaggggagaggcatggaacataaggtttctcacagttgtcgaagaaaccaactctaacaacgtgatctagaacttctagtctccagatctatgagataataaatttctgttgtctaagccacccagtttgtggtactttgttgcagcaagcctagcaaactaatgcacacatattctatattttgaagaaaaaattcccagagaatcatttttaaaatggttaaattaagcaaaataaaacaaaccaaaaaaagagaagtcccaactacctgaaatatttaattgtcttaggaaactgacttaaaaatatctaatacaggccgggcgcggtggctcacgcctgtaatcccagcactttgggaggccgaggtgggtggatcacaaggtcaggagttcaagaccagcccggccaagatgatgaaatcctgtgtctactaaaaatacaaaaatttgctgggcatggtggcaggtgtctgtaatcccagctactcaggaggcagaggcagagatttgcttgaacccaggaggtggaggctgcagtgatccgagatcacaccactgcactccagcctgggggacagatcaagactccgtctcaaaaataaaaaaataaaaataaagaggaagaacgctatggaatttgactagaatta

SEQ ID NO: 388887 - DNA, 397 bp, Homo sapiens
actcactactggaggcccagggtaactacatcaacccctgatacagatctctgggcctgctcacagctacagctcaatgggggctcctttggcaatgacacccaacaatggagtaaaccagggacctggtgaacacgctcaaaagcccatgaacaggttgagaaacaaagccagttgcaccaccctcctcccaaccatggtcttccagaacaggaagcagaacccacccgctccgaacaaatctgatgacttcttaccattgtcgtcaccagaatctgactggaaggagctgagggactgaacttcagagttgctgcctttattactacctgcaaagcaggtcacttctcccgggtcatcaacccctttgtcttcatggacagtgaaagagaaagca

SEQ ID NO: 388888 - DNA, 374 bp, Homo sapiens
ccccaagccatccgtgatttggccccatcctgctattcactctcatctcctatctcacacaatactccattacatagatgtgttccagttacacgggaacacttgtcattgacctgcatccccaccttcagggttgggcacatgctgttttcttggcttagtaaaccctttccccaaatcttgtcctccttcaagatccaggtccaaagcttgcctcctccatgaatcctttcccaagtccggcaatcagaagggatctctcagtcgtctgaagtctcatagccctcatgcttctttcctgttctctctcactctctgctttgcagcatagttatcagtgtccacatacttcctcccctttgtggtattcaaac

SEQ ID NO: 388889 - DNA, 1073 bp, Homo sapiens
gaaagaaaaatattaattatataatatggcagttcctatgagagtgtggcaaaaatcaatgagaagctagtgcagctcatcgaagactatagccttgtctcctttatccctctcaacatccaggacaaggagagcatccagcgagtcctgcaggctgtggataaagccaatggatactgtttcggagcccaagagcagcgaagcttggaagccatgatgtctgccgcaatgggagccgacttccatttctcttccacactgggcatccaggagaagtacctggcaccctcgaaccagtcagtggagcaggaagccatgcagctgtagcaacaaggtggaccctggagagcaggatgcataatccagcactggggaaagtggaggctcctgatgcaggctgcagacccaagagcaagtcctcccagccagagctggcgggctggcaaggggatattcagctctgcaaaggacttctggccaaaaagccagacatggtgccaagcagaacaccccccatactgtcagtggtgtccgtgagctctgggccctgccaccagaaagtcgagcactggtcctagtcaggctgtgatgaaatgtgctacaatacaagagtttattttctactttttgtgacttccaaacttttcttcagtcttccgggcccaggggtttggggaagaatgagggagtgtcacctagccttggaataatcagtatttccccaaagcatataattcacattcagtcacataggatttacattcagtctccagtcatgtgtttttattaatcttcagtttttggttctgaggtttgttttttaaaagatggggtcttgctatatggcccaggctggactcaaactcctgggctcatgtgatcttcccgcctcagacgcctgagtaactgggactacaggtgtgagccaccatgtcccacaattttcagttttaacagagcctcaagcttcagctttcacaggcaacacttcctaactagaactttgttaatgttttatattcactgtatttgttttatggttttattctattgttgacaagtgttaactagtt

SEQ ID NO: 388890 - DNA, 2255 bp, Homo sapiens
ttgaaaagctgggttgagtgaggctatcagcacagccttccttggggactctgaaggtgtccccacgaaggccagaaagggggaaagggacctgggcgaggagaggatttgtggtgcttggaagagccggccttgggtgggccctccaccgcctctaccctcactgggtgggactgccagcggagagtccgcgggaggtggcttgggtgtgcgacgtcacggaagaataaagacgtttactactggagctcccttacttttctaattcgagtctgaaggttagagaaattccgagagcgattttcccgcaaagaccccacattcgacccactacccgcgagagaaatgcggctgcgccgcccgcccctcggcgtctagcttcgtccccgccgtgagggcgggacttcctctcgttggctcgccgtttccgacgctgtccggaagtcgagttagtctagttagtatcggcctgttatctccttttgcgcgacacggtctcagctgttccgcctgaggcgagtgacgctggccgccaacgaggtatacgtactgggaccctcgccctcagtctcgtctccggcgcggctacctgccccgttttccctgtgagttgacctgctccgggccgcgggccgccaatggcaggggccgctccgaccacggccttcgggcaggcggtgatcggcccgccgggctcagggaagaccacgtactgcctgggcatgagtgagttcctgcgcgcgctgggccggcgcgtggcggtggtgaacctggacccggccaacgaggggctgccgtacgagtgtgccgtggacgtgggcgagctggtggggctgggcgacgtgatggacgcgctgcgcctggggcccaacggcggcctgctctactgcatggagtacctggaagccaacctggactggctgcgtgccaagctcgaccccctccgcggccactacttcctcttcgactgcccaggccaggtggagctctgcacgcatcacggcgccttgcgcagcatcttctcccaaatggcgcagtgggacctcaggctgactgccgtccacctcgtggattctcactactgcacagaccctgccaagttcatttcagtactgtgtacctccctggccaccatgctgcacgtggaactgcccacatcaacctcctttccaagatggacctcattgagcattatgggaagctggccttcaacctggactactacacagaggttctggacctctcctacctgcttgaccacctggcttctgaccctttcttccgccactaccgccagctcaatgagaagctagtgcagctcatcgaagactatagccttgtctcctttatccctctcaacatccaggacaaggagagcatccagcgagtcctgcaggctgtggataaagccaatggatactgtttcggagcccaagagcagcgaagcttggaagccatgatgtctgccgcaatgggagccgacttccatttctcttccacactgggcatccaggagaagtacctggcaccctcgaaccagtcagtggagcaggaagccatgcagctgtagcaacaaggtggaccctggagagcaggatgcataatccagcactggggaaagtggaggctcctgatgcaggctgcagacccaagagcaagtcctcccagccagagctggcgggctggcaaggggatattcagctctgcaaaggacttctggccaaaaagccagacatggtgccaagcagaacaccccccatactgtcagtggtgtccgtgagctctgggccctgccaccagaaagtcgagcactggtcctagtcaggctgtgatgaaatgtgctacaatacaagagtttattttctaaaaaaaaaaaaaaaaaaaaaaaaaaaaaaaaaaaaaaaaaaaaaaaaaagccaaaaaaaatctaggtttaactcttaatagaactgagagtccttaatgtactctgttggatgcttttctgtccctacagattttgatgaacagacagccgatgactgggatgtggacatgagtgtgtactatgacagaggtactgggcaaggagtggcaatactggaggtgaaacaggtgccctggccttgcagtgacactttaccagagctagcaaaggctgagacagggtaccgttcccgttcccttggggtagcccactgagagggttcctcttaaaacatctttggttgtgtacattaagtgctagttttggacagagccttcatcctttcttg

SEQ ID NO: 388891 - DNA, 2316 bp, Homo sapiens
ttgaaaagctgggttgagtgaggctatcagcacagccttccttggggactctgaaggtgtccccacgaaggccagaaagggggaaagggacctgggcgaggagaggatttgtggtgcttggaagagccggccttgggtgggccctccaccgcctctaccctcactgggtgggactgccagcggagagtccgcgggaggtggcttgggtgtgcgacgtcacggaagaataaagacgtttactactggagctcccttacttttctaattcgagtctgaaggttagagaaattccgagagcgattttcccgcaaagaccccacattcgacccactacccgcgagagaaatgcggctgcgccgcccgcccctcggcgtctagcttcgtccccgccgtgagggcgggacttcctctcgttggctcgccgtttccgacgctgtccggaagtcgagttagtctagttagtatcggcctgttatctccttttgcgcgacacggtctcagctgttccgcctgaggcgagtgacgctggccgccaacgaggtatacgtactgggaccctcgccctcagtctcgtctccggcgcggctacctgccccgttttccctgtgagttgacctgctccgggccgcgggccgccaatggcaggggccgctccgaccacggccttcgggcaggcggtgatcggcccgccgggctcagggaagaccacgtactgcctgggcatgagtgagttcctgcgcgcgctgggccggcgcgtggcggtggtgaacctggacccggccaacgaggggctgccgtacgagtgtgccgtggacgtgggcgagctggtggggctgggcgacgtgatggacgcgctgcgcctggggcccaacggcggcctgctctactgcatggagtacctggaagccaacctggactggctgcgtgccaagctcgaccccctccgcggccactacttcctcttcgactgcccaggccaggtggagctctgcacgcatcacggcgccttgcgcagcatcttctcccaaatggcgcagtgggacctcaggctgactgccgtccacctcgtggattctcactactgcacagaccctgccaagttcatttcagtactgtgtacctccctggccaccatgctgcacgtggaactgcccacatcaacctcctttccaagatggacctcattgagcattatgggaagctggccttcaacctggactactacacagaggttctggacctctcctacctgcttgaccacctggcttctgaccctttcttccgccactaccgccagctcaatgagaagctagtgcagctcatcgaagactatagccttgtctcctttatccctctcaacatccaggacaaggagagcatccagcgagtcctgcaggctgtggataaagccaatggatactgtttcggagcccaagagcagcgaagcttggaagccatgatgtctgccgcaatgggagccgacttccatttctcttccacactgggcatccaggagaagtacctggcaccctcgaaccagtcagtggagcaggaagccatgcagctgtagcaacaaggtggaccctggagagcaggatgcataatccagcactggggaaagtggaggctcctgatgcaggctgcagacccaagagcaagtcctcccagccagagctggcgggctggcaaggggatattcagctctgcaaaggacttctggccaaaaagccagacatggtgccaagcagaacaccccccatactgtcagtggtgtccgtgagctctgggccctgccaccagaaagtcgagcactggtcctagtcaggctgtgatgaaatgtgctacaatacaagagtttattttctactttttgtgacttccaaacttttcttcagtcttccgggcccaggggtttggggaagaatgagggagtgtcacctagccttggaataatcagtatttccccaaagcatataattcacattcagtcacataggatttacattcagtctccagtcatgtgtttttattaatcttcagtttttggttctgaggtttgttttttaaaagatggggtcttgctatatggcccaggctggactcaaactcctgggctcatgtgatcttcccgcctcagacgcctgagtaactgggactacaggtgtgagccaccatgtcccacaattttcagttttaacagagcctcaagcttcagctttcacaggcaacacttcctaactagaactttgttaatgttttatattcactgtatttgttttatggttttattctattgttgacaagtgttaactagtt

SEQ ID NO: 388892 - DNA, 2173 bp, Homo sapiens
  misc_feature (7)..(7): n is a, c, g, or t
  misc_feature (2173)..(2173): n is a, c, g, or t
aacttanggctaggtacgaggcctgggtgttagtcgagttagtctagttagtatcggcctgttatctccttttgcgcgacacggtctcagctgttccgcctgaggcgagtgacgctggccgccaacgaggtatacgtactgggaccctcgccctcagtctcgtctccggcgcggctacctgccccgttttccctgtgagttgacctgctccgggccgcgggccgccaatggcaggggccgctccgaccacggccttcgggcaggcggtgatcggcccgccgggctcagggaagaccacgtactgcctgggcatgagtgagttcctgcgcgcgctgggccggcgcgtggcggtggtgaacctggacccggccaacgaggggctgccgtacgagtgtgccgtggacgtgggcgagctggtggggctgggcgacgtgatggacgcgctgcgcctggggcccaacggcggcctgctctactgcatggagtacctggaagccaacctggactggctgcgtgccaagctcgaccccctccgcggccactacttcctcttcgactgcccaggccaggtggagctctgcacgcatcacggcgccttgcgcagcatcttctcccaaatggcgcagtgggacctcaggctgactgccgtccacctcgtggattctcactactgcacagaccctgccaagttcatttcagtactgtgtacctccctggccaccatgctgcacgtggaactgcccacatcaacctcctttccaagatggacctcattgagcattatgggaagctggccttcaacctggactactacacagaggttctggacctctcctacctgcttgaccacctggcttctgaccctttcttccgccactaccgccagctcaatgagaagctagtgcagctcatcgaagactatagccttgtctcctttatccctctcaacatccaggacaaggagagcatccagcgagtcctgcaggctgtggataaagccaatggatactgtttcggagcccaagagcagcgaagcttggaagccatgatgtctgccgcaatgggagccgacttccatttctcttccacactgggcatccaggagaagtacctggcaccctcgaaccagtcagtggagcaggaagccatgcagctgtagcaacaaggtggaccctggagagcaggatgcataatccagcactggggaaagtggaggctcctgatgcaggctgcagacccaagagcaagtcctcccagccagagctggcgggctggcaaggggatattcagctctgcaaaggacttctggccaaaaagccagacatggtgccaagcagaacaccccccatactgtcagtggtgtccgtgagctctgggccctgccaccagaaagtcgagcactggtcctagtcaggctgtgatgaaatgtgctacaatacaagagtttattttctaaaaaaaaaaaaaaaaaaaaaaaaaaaaaaaaaaaaaaaaaaaaaaaaaaagggggggggcgcccaaaagagtacccccagggggggcccaagaaataagcgaagataccacccaggacatcattggcgaacaaaagaggggccaccataaaggagagacggcgctgaattataacaccccgaacaggagaccggcggaccgaggcggcttaacaacacaacggcacagcagagcgaaggagaaacacgagcgcacaagccaggggagcgaactcatcagaggaggagaaagagaagaacgcactaatcgaacaccaagggaggagggaggaggtgctgagcaacacatatatgtagtgggagagacagaaaaattatagcacctataagcaaagcgaagagctatagtacaaagagcgcggtctctggacgagagggtgaacgtatatttctactaacactatctgatccgacgagagggttgtgtaatatacagcgtgtggtgtgtacaagcagacgacggaacgggtgtagaaacatattatatgcagaagtgaggaacgagggatagttggggaagggagatagtatgtaggagcacgataacagcgggagaactgtatgattgtagatatataggagggagagacaagtatttattattataacgcagggggggagggtacgttgacatgttgtcaagaacgagaacgaggaan

SEQ ID NO: 388893 - DNA, 2656 bp, Homo sapiens
  misc_feature (2656)..(2656): n is a, c, g, or t
ttgaaaagctgggttgagtgaggctatcagcacagccttccttggggactctgaaggtgtccccacgaaggccagaaagggggaaagggacctgggcgaggagaggatttgtggtgcttggaagagccggccttgggtgggccctccaccgcctctaccctcactgggtgggactgccagcggagagtccgcgggaggtggcttgggtgtgcgacgtcacggaagaataaagacgtttactactggagctcccttacttttctaattcgagtctgaaggttagagaaattccgagagcgattttcccgcaaagaccccacattcgacccactacccgcgagagaaatgcggctgcgccgcccgcccctcggcgtctagcttcgtccccgccgtgagggcgggacttcctctcgttggctcgccgtttccgacgctgtccggaagtcgagttagtctagttagtatcggcctgttatctccttttgcgcgacacggtctcagctgttccgcctgaggcgagtgacgctggccgccaacgaggtatacgtactgggaccctcgccctcagtctcgtctccggcgcggctacctgccccgttttccctgtgagttgacctgctccgggccgcgggccgccaatggcaggggccgctccgaccacggccttcgggcaggcggtgatcggcccgccgggctcagggaagaccacgtactgcctgggcatgagtgagttcctgcgcgcgctgggccggcgcgtggcggtggtgaacctggacccggccaacgaggggctgccgtacgagtgtgccgtggacgtgggcgagctggtggggctgggcgacgtgatggacgcgctgcgcctggggcccaacggcggcctgctctactgcatggagtacctggaagccaacctggactggctgcgtgccaagctcgaccccctccgcggccactacttcctcttcgactgcccaggccaggtggagctctgcacgcatcacggcgccttgcgcagcatcttctcccaaatggcgcagtgggacctcaggctgactgccgtccacctcgtggattctcactactgcacagaccctgccaagttcatttcagtactgtgtacctccctggccaccatgctgcacgtggaactgcccacatcaacctcctttccaagatggacctcattgagcattatgggaagctgggtaagagcttctgttccaggcgaagagcagggcagcagctgggctagaatgaagcagacatctcagctgaagccttcaacctggactactacacagaggttctggacctctcctacctgcttgaccacctggcttctgaccctttcttccgccactaccgccagctcaatgagaagctagtgcagctcatcgaagactatagccttgtctcctttatccctctcaacatccaggacaaggagagcatccagcgagtcctgcaggctgtggataaagccaatggatactgtttcggagcccaagagcagcgaagcttggaagccatgatgtctgccgcaatgggagccgacttccatttctcttccacactgggcatccaggagaagtacctggcaccctcgaaccagtcagtggagcaggaagccatgcagctgtagcaacaaggtggaccctggagagcaggatgcataatccagcactggggaaagtggaggctcctgatgcaggctgcagacccaagagcaagtcctcccagccagagctggcgggctggcaaggggatattcagctctgcaaaggacttctggccaaaaagccagacatggtgccaagcagaacaccccccatactgtcagtggtgtccgtgagctctgggccctgccaccagaaagtcgagcactggtcctagtcaggctgtgatgaaatgtgctacaatacaagagtttattttctaaaaaaaaaaaaaaaaaaaaaaaaaaaaaaaaaaaaaaaaaaaaaaaaaaagggggggggcgcccaaaagagtacccccagggggggcccaagaaataagcgaagataccacccaggacatcattggcgaacaaaagaggggccaccataaaggagagacggcgctgaattataacaccccgaacaggagaccggcggaccgaggcggcttaacaacacaacggcacagcagagcgaaggagaaacacgagcgcacaagccaggggagcgaactcatcagaggaggagaaagagaagaacgcactaatcgaacaccaagggaggagggaggaggtgctgagcaacacatatatgtagtgggagagacagaaaaattatagcacctataagcaaagcgaagagctatagtacaaagagcgcggtctctggacgagagggtgaacgtatatttctactaacactatctgatccgacgagagggttgtgtaatatacagcgtgtggtgtgtacaagcagacgacggaacgggtgtagaaacatattatatgcagaagtgaggaacgagggatagttggggaagggagatagtatgtaggagcacgataacagcgggagaactgtatgattgtagatatataggagggagagacaagtatttattattataacgcagggggggagggtacgttgacatgttgtcaagaacgagaacgaggaan

SEQ ID NO: 388894 - DNA, 2170 bp, Homo sapiens
  misc_feature (2170)..(2170): n is a, c, g, or t
gggacagaagagcagcacaaggaaggcaccgatgagactgaaacggattgccagagaattggcagaagtatgacaggtcgatattacatacgtgacgtgaccctggctatccgactccttgtgtgacctagccacgcggtatgcaactagatagcattccgtgcttggtttgcttgtggaacagacagagagacacagagaacaaatgagaaagggaagcacgcatcacagaaacaacaggacttcggagacaagagacagcggtgatcggcccgccgggctcagggaagaccacgtactgcctgggcatgagtgagttcctgcgcgcgctgggccggcgcgtggcggtggtgaacctggacccggccaacgaggggctgccgtacgagtgtgccgtggacgtgggcgagctggtggggctgggcgacgtgatggacgcgctgcgcctggggcccaacggcggcctgctctactgcatggagtacctggaagccaacctggactggctgcgtgccaagctcgaccccctccgcggccactacttcctcttcgactgcccaggccaggtggagctctgcacgcatcacggcgccttgcgcagcatcttctcccaaatggcgcagtgggacctcaggctgactgccgtccacctcgtggattctcactactgcacagaccctgccaagttcatttcagtactgtgtacctccctggccaccatgctgcacgtggaactgcccacatcaacctcctttccaagatggacctcattgagcattatgggaagctggccttcaacctggactactacacagaggttctggacctctcctacctgcttgaccacctggcttctgaccctttcttccgccactaccgccagctcaatgagaagctagtgcagctcatcgaagactatagccttgtctcctttatccctctcaacatccaggacaaggagagcatccagcgagtcctgcaggctgtggataaagccaatggatactgtttcggagcccaagagcagcgaagcttggaagccatgatgtctgccgcaatgggagccgacttccatttctcttccacactgggcatccaggagaagtacctggcaccctcgaaccagtcagtggagcaggaagccatgcagctgtagcaacaaggtggaccctggagagcaggatgcataatccagcactggggaaagtggaggctcctgatgcaggctgcagacccaagagcaagtcctcccagccagagctggcgggctggcaaggggatattcagctctgcaaaggacttctggccaaaaagccagacatggtgccaagcagaacaccccccatactgtcagtggtgtccgtgagctctgggccctgccaccagaaagtcgagcactggtcctagtcaggctgtgatgaaatgtgctacaatacaagagtttattttctaaaaaaaaaaaaaaaaaaaaaaaaaaaaaaaaaaaaaaaaaaaaaaaaaaagggggggggcgcccaaaagagtacccccagggggggcccaagaaataagcgaagataccacccaggacatcattggcgaacaaaagaggggccaccataaaggagagacggcgctgaattataacaccccgaacaggagaccggcggaccgaggcggcttaacaacacaacggcacagcagagcgaaggagaaacacgagcgcacaagccaggggagcgaactcatcagaggaggagaaagagaagaacgcactaatcgaacaccaagggaggagggaggaggtgctgagcaacacatatatgtagtgggagagacagaaaaattatagcacctataagcaaagcgaagagctatagtacaaagagcgcggtctctggacgagagggtgaacgtatatttctactaacactatctgatccgacgagagggttgtgtaatatacagcgtgtggtgtgtacaagcagacgacggaacgggtgtagaaacatattatatgcagaagtgaggaacgagggatagttggggaagggagatagtatgtaggagcacgataacagcgggagaactgtatgattgtagatatataggagggagagacaagtatttattattataacgcagggggggagggtacgttgacatgttgtcaagaacgagaacgaggaan

SEQ ID NO: 388895 - DNA, 1720 bp, Homo sapiens
ttgaaaagctgggttgagtgaggctatcagcacagccttccttggggactctgaaggtgtccccacgaaggccagaaagggggaaagggacctgggcgaggagaggatttgtggtgcttggaagagccggccttgggtgggccctccaccgcctctaccctcactgggtgggactgccagcggagagtccgcgggaggtggcttgggtgtgcgacgtcacggaagaataaagacgtttactactggagctcccttacttttctaattcgagtctgaaggttagagaaattccgagagcgattttcccgcaaagaccccacattcgacccactacccgcgagagaaatgcggctgcgccgcccgcccctcggcgtctagcttcgtccccgccgtgagggcgggacttcctctcgttggctcgccgtttccgacgctgtccggaagtcgagttagtctagttagtatcggcctgttatctccttttgcgcgacacggtctcagctgttccgcctgaggcgagtgacgctggccgccaacgaggtatacgtactgggaccctcgccctcagtctcgtctccggcgcggctacctgccccgttttccctgtgagttgacctgctccgggccgcgggccgccaatggcaggggccgctccgaccacggccttcgggcaggcggtgatcggcccgccgggctcagggaagaccacgtactgcctgggcatgagtgagttcctgcgcgcgctgggccggcgcgtggcggtggtgaacctggacccggccaacgaggggctgccgtacgagtgtgccgtggacgtgggcgagctggtggggctgggcgacgtgatggacgcgctgcgcctggggcccaacggcggcctgctctactgcatggagtacctggaagccaacctggactggctgcgtgccaagctcgaccccctccgcggccactacttcctcttcgactgcccaggccaggtggagctctgcacgcatcacggcgccttgcgcagcatcttctcccaaatggcgcagtgggacctcaggctgactgccgtccacctcgtggattctcactactgcacagaccctgccaagttcatttcagtactgtgtacctccctggccaccatgctgcacgtggaactgcccacatcaacctcctttccaagatggacctcattgagcattatgggaagctgggtaagagcttctgttccaggcgaagagcagggcagcagctgggctagaatgaagcagacatctcagctgaaggtagctgcctctggtgccttgtgtggtctggtgatagtagccacaggcaggttctaactcctgcccatttattttgtgccactctgtgctagttaccgttgtagattttggagacaagagagctacagatggtgttaggtgttacaaaggaattaaagtgatacgacagtgaatatttgggagtgaagtgagtgagctttggagtaaaacaggcatgagtttaaattctggatctgccactgaatcatcgtgtggtctgggtaagtcagttcatctctctggacctcagtttctcacttctgctctgaagcagtggcatctgagctgagacatgaatggtgagaaggagccagccaagggaggactgttctatgcagaggcactgtttggactttgagcactgtttagactctgggcactgtttgggctctgggcactgtttg

SEQ ID NO: 388896 - DNA, 1587 bp, Homo sapiens
  misc_feature (1587)..(1587): n is a, c, g, or t
tcctatgaagtagatacctgcctatatagctagtaaatagcagagccagcaggtaaaaccaaatgctttttttcttagtaacttcattttactgtgtcaagaaatatttgagtgcatgagtgcacaaaggaaaaaaggaaaaaggaacctcgtcctcaggtctttagcctgatactggttgctcctgaacactggtttctctctttagccttcaacctggactactacacagaggttctggacctctcctacctgcttgaccacctggcttctgaccctttcttccgccactaccgccagctcaatgagaagctagtgcagctcatcgaagactatagccttgtctcctttatccctctcaacatccaggacaaggagagcatccagcgagtcctgcaggctgtggataaagccaatggatactgtttcggagcccaagagcagcgaagcttggaagccatgatgtctgccgcaatgggagccgacttccatttctcttccacactgggcatccaggagaagtacctggcaccctcgaaccagtcagtggagcaggaagccatgcagctgtagcaacaaggtggaccctggagagcaggatgcataatccagcactggggaaagtggaggctcctgatgcaggctgcagacccaagagcaagtcctcccagccagagctggcgggctggcaaggggatattcagctctgcaaaggacttctggccaaaaagccagacatggtgccaagcagaacaccccccatactgtcagtggtgtccgtgagctctgggccctgccaccagaaagtcgagcactggtcctagtcaggctgtgatgaaatgtgctacaatacaagagtttattttctaaaaaaaaaaaaaaaaaaaaaaaaaaaaaaaaaaaaaaaaaaaaaaaaaaagggggggggcgcccaaaagagtacccccagggggggcccaagaaataagcgaagataccacccaggacatcattggcgaacaaaagaggggccaccataaaggagagacggcgctgaattataacaccccgaacaggagaccggcggaccgaggcggcttaacaacacaacggcacagcagagcgaaggagaaacacgagcgcacaagccaggggagcgaactcatcagaggaggagaaagagaagaacgcactaatcgaacaccaagggaggagggaggaggtgctgagcaacacatatatgtagtgggagagacagaaaaattatagcacctataagcaaagcgaagagctatagtacaaagagcgcggtctctggacgagagggtgaacgtatatttctactaacactatctgatccgacgagagggttgtgtaatatacagcgtgtggtgtgtacaagcagacgacggaacgggtgtagaaacatattatatgcagaagtgaggaacgagggatagttggggaagggagatagtatgtaggagcacgataacagcgggagaactgtatgattgtagatatataggagggagagacaagtatttattattataacgcagggggggagggtacgttgacatgttgtcaagaacgagaacgaggaan

SEQ ID NO: 388897 - DNA, 974 bp, Homo sapiens
caagccctcattctcatgagggaatgcttatcctgtttctccaggccactctcaccctgtctattccctcccagctgactgccgtccacctcgtggattctcactactgcacagaccctgccaagttcatttcagtactgtgtacctccctggccaccatgctgcacgtggaactgcccacatcaacctcctttccaagatggacctcattgagcattatgggaagctgggtaagagcttctgttccaggcgaagagcagggcagcagctgggctagaatgaagcagacatctcagctgaaggtagctgcctctggtgccttgtgtggtctggtgatagtagccacaggcaggttctaactcctgcccatttattttgtgccactctgtgctagttaccgttgtagattttggagacaagagagctacagatggtgttaggtgttacaaaggaattaaagtgatacgacagtgaatatttgggagtgaagtgagtgagctttggagtaaaacaggcatgagtttaaattctggatctgccactgaatcatcgtgtggtctgggtaagtcagttcatctctctggacctcagtttctcacttctgctctgaagcagtggcatctgagctgagacatgaatggtgagaaggagccagccaagggaggactgttctatgcagaggcactagtaggaataaaggccttgtcttagtcagtttgtgctgccatcacaaaaataccatagaccagatggcttagccaataaatatttatttctcacagttctggaggctggtaagtccaagatcaagacacaagccgatctggtgtctggtgagagtctgcttcctggctcctagacagcctccttctgtcctcacagaaggaggctatattctcacctggcacagagacagagaaggggtgggaggccagggacaaaatagggaagattgaggtagaagcaggctggta

SEQ ID NO: 388898 - DNA, 2584 bp, Homo sapiens
  misc_feature (2584)..(2584): n is a, c, g, or t
ttgaaaagctgggttgagtgaggctatcagcacagccttccttggggactctgaaggtgtccccacgaaggccagaaagggggaaagggacctgggcgaggagaggatttgtggtgcttggaagagccggccttgggtgggccctccaccgcctctaccctcactgggtgggactgccagcggagagtccgcgggaggtggcttgggtgtgcgacgtcacggaagaataaagacgtttactactggagctcccttacttttctaattcgagtctgaaggttagagaaattccgagagcgattttcccgcaaagaccccacattcgacccactacccgcgagagaaatgcggctgcgccgcccgcccctcggcgtctagcttcgtccccgccgtgagggcgggacttcctctcgttggctcgccgtttccgacgctgtccggaagtcgagttagtctagttagtatcggcctgttatctccttttgcgcgacacggtctcagctgttccgcctgaggcgagtgacgctggccgccaacgaggtatacgtactgggaccctcgccctcagtctcgtctccggcgcggctacctgccccgttttccctgtgagttgacctgctccgggccgcgggccgccaatggcaggggccgctccgaccacggccttcgggcaggcggtgatcggcccgccgggctcagggaagaccacgtactgcctgggcatgagtgagttcctgcgcgcgctgggccggcgcgtggcggtggtgaacctggacccggccaacgaggggctgccgtacgagtgtgccgtggacgtgggcgagctggtggggctgggcgacgtgatggacgcgctgcgcctggggcccaacggcggcctgctctactgcatggagtacctggaagccaacctggactggctgcgtgccaagctcgaccccctccgcggccactacttcctcttcgactgcccaggccaggtggagctctgcacgcatcacggcgccttgcgcagcatcttctcccaaatggcgcagtgggacctcaggctgactgccgtccacctcgtggattctcactactgcacagaccctgccaagttcatttcagtactgtgtacctccctggccaccatgctgcacgtggaactgcccacatcaacctcctttccaagatggacctcattgagcattatgggaagctggccttcaacctggactactacacagaggttctggacctctcctacctgcttgaccacctggcttctgaccctttcttccgccactaccgccagctcaatgagaagctagtgcagctcatcgaagactatagccttgtctcctttatccctctcaacatccaggacaaggagagcatccagcgagtcctgcaggctgtggataaagccaatggatactgtttcggagcccaagagcagcgaagcttggaagccatgatgtctgccgcaatgggagccgacttccatttctcttccacactgggcatccaggagaagtacctggcaccctcgaaccagtcagtggagcaggaagccatgcagctgtagcaacaaggtggaccctggagagcaggatgcataatccagcactggggaaagtggaggctcctgatgcaggctgcagacccaagagcaagtcctcccagccagagctggcgggctggcaaggggatattcagctctgcaaaggacttctggccaaaaagccagacatggtgccaagcagaacaccccccatactgtcagtggtgtccgtgagctctgggccctgccaccagaaagtcgagcactggtcctagtcaggctgtgatgaaatgtgctacaatacaagagtttattttctaaaaaaaaaaaaaaaaaaaaaaaaaaaaaaaaaaaaaaaaaaaaaaaaaaagggggggggcgcccaaaagagtacccccagggggggcccaagaaataagcgaagataccacccaggacatcattggcgaacaaaagaggggccaccataaaggagagacggcgctgaattataacaccccgaacaggagaccggcggaccgaggcggcttaacaacacaacggcacagcagagcgaaggagaaacacgagcgcacaagccaggggagcgaactcatcagaggaggagaaagagaagaacgcactaatcgaacaccaagggaggagggaggaggtgctgagcaacacatatatgtagtgggagagacagaaaaattatagcacctataagcaaagcgaagagctatagtacaaagagcgcggtctctggacgagagggtgaacgtatatttctactaacactatctgatccgacgagagggttgtgtaatatacagcgtgtggtgtgtacaagcagacgacggaacgggtgtagaaacatattatatgcagaagtgaggaacgagggatagttggggaagggagatagtatgtaggagcacgataacagcgggagaactgtatgattgtagatatataggagggagagacaagtatttattattataacgcagggggggagggtacgttgacatgttgtcaagaacgagaacgaggaan

SEQ ID NO: 388899 - DNA, 1470 bp, Homo sapiens
ttgaaaagctgggttgagtgaggctatcagcacagccttccttggggactctgaaggtgtccccacgaaggccagaaagggggaaagggacctgggcgaggagaggatttgtggtgcttggaagagccggccttgggtgggccctccaccgcctctaccctcactgggtgggactgccagcggagagtccgcgggaggtggcttgggtgtgcgacgtcacggaagaataaagacgtttactactggagctcccttacttttctaattcgagtctgaaggttagagaaattccgagagcgattttcccgcaaagaccccacattcgacccactacccgcgagagaaatgcggctgcgccgcccgcccctcggcgtctagcttcgtccccgccgtgagggcgggacttcctctcgttggctcgccgtttccgacgctgtccggaagtcgagttagtctagttagtatcggcctgttatctccttttgcgcgacacggtctcagctgttccgcctgaggcgagtgacgctggccgccaacgaggtatacgtactgggaccctcgccctcagtctcgtctccggcgcggctacctgccccgttttccctgtgagttgacctgctccgggccgcgggccgccaatggcaggggccgctccgaccacggccttcgggcaggcggtgatcggcccgccgggctcagggaagaccacgtactgcctgggcatgagtgagttcctgcgcgcgctgggccggcgcgtggcggtggtgaacctggacccggccaacgaggggctgccgtacgagtgtgccgtggacgtgggcgagctggtggggctgggcgacgtgatggacgcgctgcgcctggggcccaacggcggcctgctctactgcatggagtacctggaagccaacctggactggctgcgtgccaagctcgaccccctccgcggccactacttcctcttcgactgcccaggccaggtggagctctgcacgcatcacggcgccttgcgcagcatcttctcccaaatggcgcagtgggacctcaggctgactgccgtccacctcgtggattctcactactgcacagaccctgccaagttcatttcagtactgtgtacctccctggccaccatgctgcacgtggaactgcccacatcaacctcctttccaagatggacctcattgagcattatgggaagctggccttcaacctggactactacacagaggttctggacctctcctacctgcttgaccacctggcttctgaccctttttcgcatacgcagtcaagaaagtaggagtcatcgaaatatgctgttcttaaccccccaaccggcaggagcccggagcgcggggtaagcggttgttcgcccagcgatggagttgcgcaggcggccttcccaggcgaatcgcccatggaaggtgaggccgaaaccgggggcgccacccggggtcccgcggtata

SEQ ID NO: 388900 - DNA, 1949 bp, Homo sapiens
ttgaaaagctgggttgagtgaggctatcagcacagccttccttggggactctgaaggtgtccccacgaaggccagaaagggggaaagggacctgggcgaggagaggatttgtggtgcttggaagagccggccttgggtgggccctccaccgcctctaccctcactgggtgggactgccagcggagagtccgcgggaggtggcttgggtgtgcgacgtcacggaagaataaagacgtttactactggagctcccttacttttctaattcgagtctgaaggttagagaaattccgagagcgattttcccgcaaagaccccacattcgacccactacccgcgagagaaatgcggctgcgccgcccgcccctcggcgtctagcttcgtccccgccgtgagggcgggacttcctctcgttggctcgccgtttccgacgctgtccggaagtcgagttagtctagttagtatcggcctgttatctccttttgcgcgacacggtctcagctgttccgcctgaggcgagtgacgctggccgccaacgaggtatacgtactgggaccctcgccctcagtctcgtctccggcgcggctacctgccccgttttccctgtgagttgacctgctccgggccgcgggccgccaatggcaggggccgctccgaccacggccttcgggcaggcggtgatcggcccgccgggctcagggaagaccacgtactgcctgggcatgagtgagttcctgcgcgcgctgggccggcgcgtggcggtggtgaacctggacccggccaacgaggggctgccgtacgagtgtgccgtggacgtgggcgagctggtggggctgggcgacgtgatggacgcgctgcgcctggggcccaacggcggcctgctctactgcatggagtacctggaagccaacctggactggctgcgtgccaagctcgaccccctccgcggccactacttcctcttcgactgcccaggccaggtggagctctgcacgcatcacggcgccttgcgcagcatcttctcccaaatggcgcagtgggacctcaggctgactgccgtccacctcgtggattctcactactgcacagaccctgccaagttcatttcagtactgtgtacctccctggccaccatgctgcacgtggaactgcccacatcaacctcctttccaagatggacctcattgagcattatgggaagctgggtaagagcttctgttccaggcgaagagcagggcagcagctgggctagaatgaagcagacatctcagctgaaggtagctgcctctggtgccttgtgtggtctggtgatagtagccacaggcaggttctaactcctgcccatttattttgtgccactctgtgctagttaccgttgtagattttggagacaagagagctacagatggtgttaggtgttacaaaggaattaaagtgatacgacagtgaatatttgggagtgaagtgagtgagctttggagtaaaacaggcatgagtttaaattctggatctgccactgaatcatcgtgtggtctgggtaagtcagttcatctctctggacctcagtttctcacttctgctctgaagcagtggcatctgagctgagacatgaatggtgagaaggagccagccaagggaggactgttctatgcagaggcactagtaggaataaaggccttgtcttagtcagtttgtgctgccatcacaaaaataccatagaccagatggcttagccaataaatatttatttctcacagttctggaggctggtaagtccaagatcaagacacaagccgatctggtgtctggtgagagtctgcttcctggctcctagacagcctccttctgtcctcacagaaggaggctatattctcacctggcacagagacagagaaggggtgggaggccagggacaaaatagggaagattgaggtagaagcaggctggta

SEQ ID NO: 388901 - DNA, 2371 bp, Homo sapiens
  misc_feature (2371)..(2371): n is a, c, g, or t
ttgaaaagctgggttgagtgaggctatcagcacagccttccttggggactctgaaggtgtccccacgaaggccagaaagggggaaagggacctgggcgaggagaggatttgtggtgcttggaagagccggccttgggtgggccctccaccgcctctaccctcactgggtgggactgccagcggagagtccgcgggaggtggcttgggtgtgcgacgtcacggaagaataaagacgtttactactggagctcccttacttttctaattcgagtctgaaggttagagaaattccgagagcgattttcccgcaaagaccccacattcgacccactacccgcgagagaaatgcggctgcgccgcccgcccctcggcgtctagcttcgtccccgccgtgagggcgggacttcctctcgttggctcgccgtttccgacgctgtccggaagtcgagttagtctagttagtatcggcctgttatctccttttgcgcgacacggtctcagctgttccgcctgaggcgagtgacgctggccgccaacgaggtatacgtactgggaccctcgccctcagtctcgtctccggcgcggctacctgccccgttttccctgtgagttgacctgctccgggccgcgggccgccaatggcaggggccgctccgaccacggccttcgggcaggcggtgatcggcccgccgggctcagggaagaccacgtactgcctgggcatgagtgagttcctgcgcgcgctgggccggcgcgtggcggtggtgaacctggacccggccaacgagggggccttgcgcagcatcttctcccaaatggcgcagtgggacctcaggctgactgccgtccacctcgtggattctcactactgcacagaccctgccaagttcatttcagtactgtgtacctccctggccaccatgctgcacgtggaactgcccacatcaacctcctttccaagatggacctcattgagcattatgggaagctggccttcaacctggactactacacagaggttctggacctctcctacctgcttgaccacctggcttctgaccctttcttccgccactaccgccagctcaatgagaagctagtgcagctcatcgaagactatagccttgtctcctttatccctctcaacatccaggacaaggagagcatccagcgagtcctgcaggctgtggataaagccaatggatactgtttcggagcccaagagcagcgaagcttggaagccatgatgtctgccgcaatgggagccgacttccatttctcttccacactgggcatccaggagaagtacctggcaccctcgaaccagtcagtggagcaggaagccatgcagctgtagcaacaaggtggaccctggagagcaggatgcataatccagcactggggaaagtggaggctcctgatgcaggctgcagacccaagagcaagtcctcccagccagagctggcgggctggcaaggggatattcagctctgcaaaggacttctggccaaaaagccagacatggtgccaagcagaacaccccccatactgtcagtggtgtccgtgagctctgggccctgccaccagaaagtcgagcactggtcctagtcaggctgtgatgaaatgtgctacaatacaagagtttattttctaaaaaaaaaaaaaaaaaaaaaaaaaaaaaaaaaaaaaaaaaaaaaaaaaaagggggggggcgcccaaaagagtacccccagggggggcccaagaaataagcgaagataccacccaggacatcattggcgaacaaaagaggggccaccataaaggagagacggcgctgaattataacaccccgaacaggagaccggcggaccgaggcggcttaacaacacaacggcacagcagagcgaaggagaaacacgagcgcacaagccaggggagcgaactcatcagaggaggagaaagagaagaacgcactaatcgaacaccaagggaggagggaggaggtgctgagcaacacatatatgtagtgggagagacagaaaaattatagcacctataagcaaagcgaagagctatagtacaaagagcgcggtctctggacgagagggtgaacgtatatttctactaacactatctgatccgacgagagggttgtgtaatatacagcgtgtggtgtgtacaagcagacgacggaacgggtgtagaaacatattatatgcagaagtgaggaacgagggatagttggggaagggagatagtatgtaggagcacgataacagcgggagaactgtatgattgtagatatataggagggagagacaagtatttattattataacgcagggggggagggtacgttgacatgttgtcaagaacgagaacgaggaan

SEQ ID NO: 388902 - DNA, 1551 bp, Homo sapiens
ttgaaaagctgggttgagtgaggctatcagcacagccttccttggggactctgaaggtgtccccacgaaggccagaaagggggaaagggacctgggcgaggagaggatttgtggtgcttggaagagccggccttgggtgggccctccaccgcctctaccctcactgggtgggactgccagcggagagtccgcgggaggtggcttgggtgtgcgacgtcacggaagaataaagacgtttactactggagctcccttacttttctaattcgagtctgaaggttagagaaattccgagagcgattttcccgcaaagaccccacattcgacccactacccgcgagagaaatgcggctgcgccgcccgcccctcggcgtctagcttcgtccccgccgtgagggcgggacttcctctcgttggctcgccgtttccgacgctgtccggaagtcgagttagtctagttagtatcggcctgttatctccttttgcgcgacacggtctcagctgttccgcctgaggcgagtgacgctggccgccaacgaggtatacgtactgggaccctcgccctcagtctcgtctccggcgcggctacctgccccgttttccctgtgagttgacctgctccgggccgcgggccgccaatggcaggggccgctccgaccacggccttcgggcaggcggtgatcggcccgccgggctcagggaagaccacgtactgcctgggcatgagtgagttcctgcgcgcgctgggccggcgcgtggcggtggtgaacctggacccggccaacgaggggctgccgtacgagtgtgccgtggacgtgggcgagctggtggggctgggcgacgtgatggacgcgctgcgcctggggcccaacggcggcctgctctactgcatggagtacctggaagccaacctggactggctgcgtgccaagctcgaccccctccgcggccactacttcctcttcgactgcccaggccaggtggagctctgcacgcatcacggcgccttgcgcagcatcttctcccaaatggcgcagtgggacctcaggcccccatactgtcagtggtgtccgtgagctctgggccctgccaccagaaagtcgagcactggtcctagtcaggctgtgatgaaatgtgctacaatacaagagtttattttctaaaaaaaaaaaaaaaaaaaaaaaaaaaaaaaaaaaaaaaaaaaaaaaaaagccaaaaaaaatctaggtttaactcttaatagaactgagagtccttaatgtactctgttggatgcttttctgtccctacagattttgatgaacagacagccgatgactgggatgtggacatgagtgtgtactatgacagaggtactgggcaaggagtggcaatactggaggtgaaacaggtgccctggccttgcagtgacactttaccagagctagcaaaggctgagacagggtaccgttcccgttcccttggggtagcccactgagagggttcctcttaaaacatctttggttgtgtacattaagtgctagttttggacagagccttcatcctttcttg

SEQ ID NO: 388903 - DNA, 347 bp, Homo sapiens
ttttcacatagatataatgtccaaaagtgtatatgctttaaaaaaattgtgattctactaacttgctttttccctcttcctcaataagattattacaggatttatttttaatttttaattaagatccaggttatacaagtagtttaaaataatgagttctacaaagtttgttaagaaaaacagtagtccaggttctggttccagataagatggagtaagcgcacttcactctgtctctcccactgaatgcagctaaaaacctgggcaaaattcttggagtggctatttgaggactctgaaaagtaaattgtaggagacagactggggaagaagaccaaaattcaaag

SEQ ID NO: 388904 - DNA, 701 bp, Homo sapiens
tgccctgtgaagaaggtgcctgcttctcctttgccttctgtcatgactgtaagtttcctgaggccccccagcaatgtggaagtgtgggtcaattaaacctctttcctttataaattacccagtcttgggtatttcttcatagcagtgtgagaatggactatatacaacctccagtgattgttgacaggagtcaggataagtaaactgtggcacattcccatttgccacatgggagtaccatgcaaatgaatgaatagctatggccaatcaacatgggtatgaaacctaatattgaaccaaaaatattgttatggaatgcttgatgtttgattctacttttacaaactttaaaaattataaactaaatgtatattgttaaggattacatttatatattattaagggatgtgtttataaaaaaatttaaaaatcaataggacaatagagacaaaattcaggagagtggctacaactgcattaggaggaagaggaacacagggttaatttttttggtaatagcttcactgaggtataatttacatactgttgacggtgattgtgagacctctgttcttgtcttcttggttaaaataattttaacaagagacacaaccatagaggatcgcttgaggctaggaattcaatactagcctggggaaaagaaaagaaaaagaggaaggaaagccaaagaagaagaaaaa

SEQ ID NO: 388905 - DNA, 813 bp, Homo sapiens
tgccctgtgaagaaggtgcctgcttctcctttgccttctgtcatgactgtaagtttcctgaggccccccagcaatgtggaagtgtgggtcaattaaacctctttcctttataaattacccagtcttgggtatttcttcatagcagtgtgagaatggactatatacaacctccagtgattgttgacaggagtcaggataagtaaactgtggcacattcccatttgccacatgggagtaccatgcaaatgaatgaatagctatggccaatcaacatgggtatgaaacctaatattgaaccaaaaatattgttatggaatgcttgatgtttgattctacttttacaaactttaaaaattataaactaaatgtatattgttaaggattacatttatatattattaagggatgtgtttataaaaaaatttaaaaatcaataggacaatagagacaaaattcaggagagtggctacaactgcattaggaggaagaggaacacagggttaatttttttggtaatagcttcactgaggtataatttacatactgttgacggtgattgtgagacctctgttcttgtcttcttggttaaaataattttaacaagagacacaaccatagaggaacaacagaaagcaatgtattgcaaaagagaaagaacactctgaaagctgagtgtaaaaagaaacagctgaaagtaatttagtgcaaagataaaactctgaaagatacactctgaaaggtacactctgaaagataagtcagagtgggctgatcaagagtgagtcagcaaagactggctctgagggaactccc

SEQ ID NO: 388906 - DNA, 832 bp, Homo sapiens
ctacccttttccccaccctcggcccccattcctatgagtagaagcctgcccagctgcggtggtggggtttgaggaggctaggacttagagcagggaaaaacaaggaagcagaatgaaaaacagaaacacttagaaatctgggattggtacttctccttatgtaaagattgtggctgacgaccagcttcttagaggaagcaagtctaggagaagggctcatacctggtccgtgagggcctatgggggatcagggcataagaccacctgaccctgggccttgcatccacaagaaccttgagtttagatttttagacatattcttcgaacaaggttttacatatatagtcactgagaaatcctgagaggattgaaaaatagcatctattttacagctttaaattgtgccctgagctgagcgtggtggctcatgcctgtaatcccagcactttgggaggctgaggtgggaggattgcttgagttcagttcaggaccagcctgggcaacagcaagacctcatctctactaaaaataaaaaaattagctgggcatggtggtgtgcacctgtagtcccaattactcaggaggctgaggtgggaggatcgcttgagcctgggaggttgaggctgcagtgagctgtgattgtgccactgcactccagcttgggtgacagagtgagaccctgtctcaaaaaaaattctgccctgttattagatcgggctgctctaagtccattatcaattaacattctttatatgtcctgtgtttatcttgtgcacggtataattgccctatgctgtattttttaaaataaaaacattgctttttaaaacgc

SEQ ID NO: 388907 - DNA, 517 bp, Homo sapiens
gtaacaaatgctgtcaaaccttcccacatcccttatacttttcccactattagtatctgcacatgcacccaaagagctgttttttcctaaaactgcagaaatatgtgttgcctatgcaagtggcaggcaggaaacttcaagaactcaacacttgataggtgaggtaattttgagcagggttttaaataagtttccttgcagaattaagttcaagtagctcactgtagatctgacttactaatacgccacgctatcgtccctgcatttcccaaataagctacttgcattaaaaaaaaaaaaaattatcgaactacttttgaccacctctaccatcactctgggacaagcctccatcatcacttaattgaattatttaaataagttcttaactggtattctttcttccttcttcccttcagtatattttttacaacagccagaatgatcctgttaatacataaatcacattctaccattctgtttaaaatttttaaatgacttcccatcctactcacag

SEQ ID NO: 388908 - DNA, 419 bp, Homo sapiens
ctctcagctgtttcccaccatgtgtttcctcttctttctgatatacagccaaaatacatttcccagtctgccttgcagttaagggaaactgaggtctcgtcaatggaatatgaatagagaaatgtgtaccacttccaggcctggcccatgaaaacctcccatatgctctctctctttcatcttccttttcccttcaggctggctggaggggaggcagctcctgggagagatttggaagttggcagagctgctattaagctgggttcctgaatgatggcaagaaagaggcccactcctctatcgtattcacctgccaagtattgtttgtgagcaagaaaaaaaatatctactgtagttgaggccatcttaaatacagtttctcttttaaagccattccacgtccaccatttggcattaag

SEQ ID NO: 388909 - DNA, 3551 bp, Homo sapiens
gaagcagtactactttgactgcacatgtgaacactgccagaaaaaactgaaggatgacctcttcctgggggtgaaagacaaccccaagccctctcaggaagtggtgaaggagatgatacaattctccaaggatacattggaaaagatagacaaggctcgttccgagggtttgtatcatgaggttgtgaaattatgccgggagtgcctggagaagcaggagccagtgtttgctgacaccaacatctacatgctgcggatgctgagcattgtttcggaggtcctttcctacctccaggcctttgaggaggcctcgttctatgccaggaggatggtggacggctatatgaagctctaccaccccaacaatgcccaactgggcatggccgtgatgcgggcagggctgaccaactggcatgctggtaacattgaggtggggcacgggatgatctgcaaagcctatgccattctcctggtgacacacggaccctcccaccccatcactaaggacttagaggccatgcgggtgcagacggagatggagctacgcatgttccgccagaacgaattcatgtactacaagatgcgcgaggctgccctgaacaaccagcccatgcaggtcatggccgagcccagcaatgagccatccccagctctgttccacaagaagcaatgaggactgcccagtggaggaggggcgatgtggctggggagctagggagagactctggaggtggtgggtctctggggagacccctaatgaggaagttgaggtaatgcttaacattgttgctgtgagaatttactgccctgtgtttcccagagccattttggctcaattcaagtctattcaattcaagttaactctagcccagcccagatcaactcctcctacaaatattattggatgataggccctagaacccaataaaggagctccaaatgtcgttgggtggggaagcaaaatgtagagaaacatttaaagcacactgtaataataaatgcaattataaactatatggaggagggtgcagaggagggaatgtgtctggtgtgtgatgtgtgtgtgtgcagtgggggtatcacagagagtatgacatctgagttgagggtagcaggtgcctggagtctcaggtggctgctcacccatctgtgcaggtgtctctggggctgctggtctcacctgtggtctgcagtagacacaattggctgagcaggatatgtgatactgtgtggttggtgtggagttttgaagaaggggctgtgtttgggccacgtaggctctactcagagacctgaaaccacttcagaatggtgcatatgtcgaaagagctggctgggggccttgcccaaaccaactgaggtcttaaagtccggggaaaaaaagtctgggttccaactagaattctagaaatatttctagaacacacagagagggaataagtccctctatcacccttattaccaagccttgtggttccctgtgattttagataatgtctgatatttttctggctatttgcctagtaggatttaaaaaatattttcaaagtgaagctgagagagaatcttggaaacacacatacctgttgatcatgggccctgcagaattggcccttgggggctttatttggttacgtgtgcctgggtggtctttaccagcttagactctatcatgggcccccatgaagctccattctcaatactgaataattattacttcccttgttgagtttctttttctgtcatgccctgggggcttctgctcttctcaccagaaagaacatttgaatctggattcttgtacacctgggttagaccctgttcagaggtgtggccaatttatcccgatctcctggaaggctgttgtgatttccatctaagaaatgagggtcttgagaatcaaccagtcccaagattagcctgttatcctgttatctactgagaccccaaatttctcaccaatgttttgggagatcctggaaaagatcccttcagtttggggtgtcaccaagacttctacacaacccaggactaccattgacctcagagctgtaccccacatcttgaagtaaattgatcccaccaggtcccacgtttgttatctctgcctaaatgttagcttctccatcctcaccacatgatgacctgctgtgtccctctgagcactacccagtggctgaaaactctgcaaatgggccacacttttgcaaaatacttgtatctgacacttaggtcttgttgaagaatttcctttctggaaggttttacaagaagactgatagtctttcaagcccccacatcacaggcttagggacggcactaactttctcccagggatctaactggctagttcaaattatcactcttttaccttcatataaaatgtctcccccaaacctttttcccttctttgtcattgttatctgctaagccactggtcatttccccatattcgtagtctttttttccatcctatctttctaatatttgttgtctttaacaaactgtgttctgtgtctgtgctcctccttccctctcagaccattggaatgcaagtccttcttccctttggaatgtactctggatcccttcccctgctttgacccccagactttgctccatctattattgcttctccatcctggatccttgacatttgtcaccccactggccttctcaggtgcaatcagtaaaaatgctgagaactcttggatcttaatcttcatgactgagttttttttagttgtatagttatcatctgcctttcttcactttgcatttcttcttgaatccattgcagattgacttccactcccactccttcactaaaagggctcttaccaagatcaaatctaatgggtacattttagttcctatgtgatttggcctttcgatgtcaatcatcactcccagccattgattttggtgacccacttccctgtgatgatcttctgatctagtttctcaggttccttcgctggtcctttttctttccctgcccctgacatattgacatttcctggagttggttttgtccttgattcattctcatgtcattctgcacacagtctctgcatgaactcaggcagacccttcatttaatgaccaccttagggctgatgattctcaaatctgtattccccgatcttgcatttgagctccagccccactcatcctctcggatgttctgcaggcccagcaaactcatcatgtccaaagtgaaactttttctctttcctgtctcctctcctctgatctgttctttcttggaacaccacccaagaacgtcacctcctccatcagattgtgagctcctggagggcaggagctgtgtccttctattcatcttcctatccccagaaccttgcacagatcctggaatgtggtaggtgctcagtaaatgtgtgttgaataaatgaatgaatgaatgaacaaatgaatgaatttgcttacttcaaggcaaaagaaccatgaaactgtattttgagtttctatgttatagcagtcagcaaatcctattaaatactttgtgtttccaagcaaaaaagtgt

SEQ ID NO: 388910 - DNA, 3167 bp, Homo sapiens
gaagcagtactactttgactgcacatgtgaacactgccagaaaaaactgaaggatgacctcttcctgggggtgaaagacaaccccaagccctctcaggaagtggtgaaggagatgatacaattctccaaggatacattggaaaagatagacaaggctcgttccgagggtttgtatcatgaggttgtgaaattatgccgggagtgcctggagaagcaggagccagtgtttgctgacaccaacatctacatgctgcggatgctgagcattgtttcggaggtcctttcctacctccaggcctttgaggaggcctcgttctatgccaggaggatggtggacggctatatgaagctctaccaccccaacaatgcccaactgggcatggccgtgatgcgggcagggctgaccaactggcatgctggtaacattgaggtggggcacgggatgatctgcaaagcctatgccattctcctggtgacacacggaccctcccaccccatcactaaggacttagaggccatgcgggtgcagacggagatggagctacgcatgttccgccagaacgaattcatgtactacaagatgcgcgaggctgccctgaacaaccagcccatgcaggtcatggccgagcccagcaatgagccatccccagctctgttccacaagaagcaatgaggactgcccagtggaggaggggcgatgtggctggggagctagggagagactctggaggtggtgggtctctggggagacccctaatgaggaagttgaggtaatgcttaacattgttgctgtgagaatttactgccctgtgtttcccagagccattttggctcaattcaagtctattcaattcaagttaactctagcccagcccagatcaactcctcctacaaatattattggatgataggccctagaacccaataaaggagctccaaatgtcgttgggtggggaagcaaaatgtagagaaacatttaaagcacactgtaataataaatgcaattataaactatatggaggagggtgcagaggagggaatgtgtctggtgtgtgatgtgtgtgtgtgcagtgggggtatcacagagagtatgacatctgagttgagggtagcaggtgcctggagtctcaggtggctgctcacccatctgtgcaggtgtctctggggctgctggtctcacctgtggtctgcagtagacacaattggctgagcaggatatgtgatactgtgtggttggtgtggagttttgaagaaggggctgtgtttgggccacgtaggctctactcagagacctgaaaccacttcagaatggtgcatatgtcgaaagagctggctgggggccttgcccaaaccaactgaggtcttaaagtccggggaaaaaaagtctgggttccaactagaattctagaaatatttctagaacacacagagagggaataagtccctctatcacccttattaccaagccttgtggttccctgtgattttagataatgtctgatatttttctggctatttgcctagtaggatttaaaaaatattttcaaagtgaagctgagagagaatcttggaaacacacatacctgttgatcatgggccctgcagaattggcccttgggggctttatttggttacgtgtgcctgggtggtctttaccagcttagactctatcatgggcccccatgaagctccattctcaatactgaataattattacttcccttgttgagtttctttttctgtcatgccctgggggcttctgctcttctcaccagaaagaacatttgaatctggattcttgtacacctgggttagaccctgttcagaggtgtggccaatttatcccgatctcctggaaggctgttgtgatttccatctaagaaatgagggtcttgagaatcaaccagtcccaagattagcctgttatcctgttatctactgagaccccaaatttctcaccaatgttttgggagatcctggaaaagatcccttcagtttggggtgtcaccaagacttctacacaacccaggactaccattgacctcagagctgtaccccacatcttgaagtaaattgatcccaccaggtcccacgtttgttatctctgcctaaatgttagcttctccatcctcaccacatgatgacctgctgtgtccctcattggaatgcaagtccttcttccctttggaatgtactctggatcccttcccctgctttgacccccagactttgctccatctattattgcttctccatcctggatccttgacatttgtcaccccactggccttctcaggtgcaatcagtaaaaatgctgagaactcttggatcttaatcttcatgactgagttttttttagttgtatagttatcatctgcctttcttcactttgcatttcttcttgaatccattgcagattgacttccactcccactccttcactaaaagggctcttaccaagatcaaatctaatgggtacattttagttcctatgtgatttggcctttcgatgtcaatcatcactcccagccattgattttggtgacccacttccctgtgatgatcttctgatctagtttctcaggttccttcgctggtcctttttctttccctgcccctgacatattgacatttcctggagttggttttgtccttgattcattctcatgtcattctgcacacagtctctgcatgaactcaggcagacccttcatttaatgaccaccttagggctgatgattctcaaatctgtattccccgatcttgcatttgagctccagccccactcatcctctcggatgttctgcaggcccagcaaactcatcatgtccaaagtgaaactttttctctttcctgtctcctctcctctgatctgttctttcttggaacaccacccaagaacgtcacctcctccatcagattgtgagctcctggagggcaggagctgtgtccttctattcatcttcctatccccagaaccttgcacagatcctggaatgtggtaggtgctcagtaaatgtgtgttgaataaatgaatgaatgaatgaacaaatgaatgaatttgcttacttcaaggcaaaagaaccatgaaactgtattttgagtttctatgttatagcagtcagcaaatcctattaaatactttgtgtttccaagcaaaaaagtgt

SEQ ID NO: 388911 - DNA, 707 bp, Homo sapiens
  misc_feature (352)..(352): n is a, c, g, or t
gaagcagtactactttgactgcacatgtgaacactgccagaaaaaactgaaggatgacctcttcctgggggtgaaagacaaccccaagccctctcaggaagtggtgaaggagatgatacaattctccaaggatacattggaaaagatagacaaggctcgttccgagggtttgtatcatgaggttgtgaaattatgccgggagtgcctggagaagcaggagccagtgtttgctgacaccaacatctacatgctgcggatgctgagcattgtttcggaggtcctttcctacctccaggcctttgaggaggcctcgttctatgccaggaggatggtggacggctatataagcttnccaccccaacaatgcccaactgtactgtcatatttaacaatggcaatcatgaggcagtgaaatccatgtttcatacccagatgagaattgagctccgggccctaggcaagatctcagaaggagaggagctgactgtgtccttctattcatcttcctatccccagaaccttgcacagatcctggaatgtggtaggtgctcagtaaatgtgtgttgaataaatgaatgaatgaatgaacaaatgaatgaatttgcttacttcaaggcaaaagaaccatgaaactgtattttgagtttctatgttatagcagtcagcaaatcctattaaatactttgtgtttccaagcaaaaaagtgt

SEQ ID NO: 388912 - DNA, 175 bp, Homo sapiens
taggcatcttccccaacctgggcctggtgaaccatgactgttggcccaactgtactgtcatatttaacaatggcaatcatgaggcagtgaaatccatgtttcatacccagatgagaattgaactgcgggccctaggcaagatctcagaaggagaggagctgactgtgtcctatat

SEQ ID NO: 388913 - DNA, 3150 bp, Homo sapiens
tgcggccgctccaacatcagaatggcataggctttgcagataacaatgacaaagcctatgccattctcctggtgacacacggaccctcccaccccatcactaaggacttagaggccatgcgggtgcagacggagatggagctacgcatgttccgccagaacgaattcatgtactacaagatgcgcgaggctgccctgaacaaccagcccatgcaggtcatggccgagcccagcaatgagccatccccagctctgttccacaagaagcaatgaggactgcccagtggaggaggggcgatgtggctggggagctagggagagactctggaggtggtgggtctctggggagacccctaatgaggaagttgaggtaatgcttaacattgttgctgtgagaatttactgccctgtgtttcccagagccattttggctcaattcaagtctattcaattcaagttaactctagcccagcccagatcaactcctcctacaaatattattggatgataggccctagaacccaataaaggagctccaaatgtcgttgggtggggaagcaaaatgtagagaaacatttaaagcacactgtaataataaatgcaattataaactatatggaggagggtgcagaggagggaatgtgtctggtgtgtgatgtgtgtgtgtgcagtgggggtatcacagagagtatgacatctgagttgagggtagcaggtgcctggagtctcaggtggctgctcacccatctgtgcaggtgtctctggggctgctggtctcacctgtggtctgcagtagacacaattggctgagcaggatatgtgatactgtgtggttggtgtggagttttgaagaaggggctgtgtttgggccacgtaggctctactcagagacctgaaaccacttcagaatggtgcatatgtcgaaagagctggctgggggccttgcccaaaccaactgaggtcttaaagtccggggaaaaaaagtctgggttccaactagaattctagaaatatttctagaacacacagagagggaataagtccctctatcacccttattaccaagccttgtggttccctgtgattttagataatgtctgatatttttctggctatttgcctagtaggatttaaaaaatattttcaaagtgaagctgagagagaatcttggaaacacacatacctgttgatcatgggccctgcagaattggcccttgggggctttatttggttacgtgtgcctgggtggtctttaccagcttagactctatcatgggcccccatgaagctccattctcaatactgaataattattacttcccttgttgagtttctttttctgtcatgccctgggggcttctgctcttctcaccagaaagaacatttgaatctggattcttgtacacctgggttagaccctgttcagaggtgtggccaatttatcccgatctcctggaaggctgttgtgatttccatctaagaaatgagggtcttgagaatcaaccagtcccaagattagcctgttatcctgttatctactgagaccccaaatttctcaccaatgttttgggagatcctggaaaagatcccttcagtttggggtgtcaccaagacttctacacaacccaggactaccattgacctcagagctgtaccccacatcttgaagtaaattgatcccaccaggtcccacgtttgttatctctgcctaaatgttagcttctccatcctcaccacatgatgacctgctgtgtccctctgagcactacccagtggctgaaaactctgcaaatgggccacacttttgcaaaatacttgtatctgacacttaggtcttgttgaagaatttcctttctggaaggttttacaagaagactgatagtctttcaagcccccacatcacaggcttagggacggcactaactttctcccagggatctaactggctagttcaaattatcactcttttaccttcatataaaatgtctcccccaaacctttttcccttctttgtcattgttatctgctaagccactggtcatttccccatattcgtagtctttttttccatcctatctttctaatatttgttgtctttaacaaactgtgttctgtgtctgtgctcctccttccctctcagaccattggaatgcaagtccttcttccctttggaatgtactctggatcccttcccctgctttgacccccagactttgctccatctattattgcttctccatcctggatccttgacatttgtcaccccactggccttctcaggtgcaatcagtaaaaatgctgagaactcttggatcttaatcttcatgactgagttttttttagttgtatagttatcatctgcctttcttcactttgcatttcttcttgaatccattgcagattgacttccactcccactccttcactaaaagggctcttaccaagatcaaatctaatgggtacattttagttcctatgtgatttggcctttcgatgtcaatcatcactcccagccattgattttggtgacccacttccctgtgatgatcttctgatctagtttctcaggttccttcgctggtcctttttctttccctgcccctgacatattgacatttcctggagttggttttgtccttgattcattctcatgtcattctgcacacagtctctgcatgaactcaggcagacccttcatttaatgaccaccttagggctgatgattctcaaatctgtattccccgatcttgcatttgagctccagccccactcatcctctcggatgttctgcaggcccagcaaactcatcatgtccaaagtgaaactttttctctttcctgtctcctctcctctgatctgttctttcttggaacaccacccaagaacgtcacctcctccatcagattgtgagctcctggagggcaggagctgtgtccttctattcatcttcctatccccagaaccttgcacagatcctggaatgtggtaggtgctcagtaaatgtgtgttgaataaatgaatgaatgaatgaacaaatgaatgaatttgcttacttcaaggcaaaagaaccatgaaactgtattttgagtttctatgttatagcagtcagcaaatcctattaaatactttgtgtttccaagcaaaaaagtgt

SEQ ID NO: 388914 - DNA, 1588 bp, Homo sapiens
tgagatgacaatagggagaatggagaacgtggaggtcttcaccgctgagggcaaaggaaggggtctgaaggccaccaaggagttctgggctgcagatatcatctttgctgagcgggcttattccgcagtggtttttgacagccttgttaattttgtgtgccacacctgcttcaagaggcaggagaagctccatcgctgtgggcagtgcaagtttgcccattactgcgaccgcacctgccagaaggatgcttggctgaaccacaagaatgaatgttcggccatcaagagatatgggaaggttttacaagaagactgatagtctttcaagcccccacatcacaggcttagggacggcactaactttctcccagggatctaactggctagttcaaattatcactcttttaccttcatataaaatgtctcccccaaacctttttcccttctttgtcattgttatctgctaagccactggtcatttccccatattcgtagtctttttttccatcctatctttctaatatttgttgtctttaacaaactgtgttctgtgtctgtgctcctccttccctctcagaccattggaatgcaagtccttcttccctttggaatgtactctggatcccttcccctgctttgacccccagactttgctccatctattattgcttctccatcctggatccttgacatttgtcaccccactggccttctcaggtgcaatcagtaaaaatgctgagaactcttggatcttaatcttcatgactgagttttttttagttgtatagttatcatctgcctttcttcactttgcatttcttcttgaatccattgcagattgacttccactcccactccttcactaaaagggctcttaccaagatcaaatctaatgggtacattttagttcctatgtgatttggcctttcgatgtcaatcatcactcccagccattgattttggtgacccacttccctgtgatgatcttctgatctagtttctcaggttccttcgctggtcctttttctttccctgcccctgacatattgacatttcctggagttggttttgtccttgattcattctcatgtcattctgcacacagtctctgcatgaactcaggcagacccttcatttaatgaccaccttagggctgatgattctcaaatctgtattccccgatcttgcatttgagctccagccccactcatcctctcggatgttctgcaggcccagcaaactcatcatgtccaaagtgaaactttttctctttcctgtctcctctcctctgatctgttctttcttggaacaccacccaagaacgtcacctcctccatcagattgtgagctcctggagggcaggagctgtgtccttctattcatcttcctatccccagaaccttgcacagatcctggaatgtggtaggtgctcagtaaatgtgtgttgaataaatgaatgaatgaatgaacaaatgaatgaatttgcttacttcaaggcaaaagaaccatgaaactgtattttgagtttctatgttatagcagtcagcaaatcctattaaatactttgtgtttccaagcaaaaaagtgt

SEQ ID NO: 388915 - DNA, 1536 bp, Homo sapiens
gaagcagtactactttgactgcacatgtgaacactgccagaaaaaactgaaggatgacctcttcctgggggtgaaagacaaccccaagccctctcaggaagtggtgaaggagatgatacaattctccaaggatacattggaaaagatagacaaggctcgttccgagggtttgtatcatgaggttgtgaaattatgccgggagtgcctggagaagcaggagccagtgtttgctgacaccaacatctacatgctgcggatgctgagcattgtttcggaggtcctttcctacctccaggcctttgaggaggcctcgttctatgccaggaggatggtggacggctatatgaagctctaccaccccaacaatgcccaactgggcatggccgtgatgcgggcagggctgaccaactggcatgctggtaacattgaggtggggcacgggatgatctgcaaagcctatgccattctcctggtgacacacggaccctcccaccccatcactaaggacttagaggccatgcgggtgcagacggagatggagctacgcatgttccgccagaacgaattcatgtactacaagatgcgcgaggctgccctgaacaaccagcccatgcaggtcatggccgagcccagcaatgagccatccccagctctgttccacaagaatgcaatcagtaaaaatgctgagaactcttggatcttaatcttcatgactgagttttttttagttgtatagttatcatctgcctttcttcactttgcatttcttcttgaatccattgcagattgacttccactcccactccttcactaaaagggctcttaccaagatcaaatctaatgggtacattttagttcctatgtgatttggcctttcgatgtcaatcatcactcccagccattgattttggtgacccacttccctgtgatgatcttctgatctagtttctcaggttccttcgctggtcctttttctttccctgcccctgacatattgacatttcctggagttggttttgtccttgattcattctcatgtcattctgcacacagtctctgcatgaactcaggcagacccttcatttaatgaccaccttagggctgatgattctcaaatctgtattccccgatcttgcatttgagctccagccccactcatcctctcggatgttctgcaggcccagcaaactcatcatgtccaaagtgaaactttttctctttcctgtctcctctcctctgatctgttctttcttggaacaccacccaagaacgtcacctcctccatcagattgtgagctcctggagggcaggagctgtgtccttctattcatcttcctatccccagaaccttgcacagatcctggaatgtggtaggtgctcagtaaatgtgtgttgaataaatgaatgaatgaatgaacaaatgaatgaatttgcttacttcaaggcaaaagaaccatgaaactgtattttgagtttctatgttatagcagtcagcaaatcctattaaatactttgtgtttccaagcaaaaaagtgt

SEQ ID NO: 388916 - DNA, 318 bp, Homo sapiens
actttgtgtagagatgagttctccctatgttatccatgctggtctcgaactcctggactgaagtgatcctttcaccttggcctctcaaagtgctgggattactggtgtgagccaccgctcacccggcctccacatgttactcattcagtaacattactacttgtttttaatcaagagtgatagaaattccttgacctgataaatacaacatatggaatatgttttaagttttctttggcgacttaacaccattattaatatcaattactatactcatctctaattaaaaccataaatggaattttagctgctcaccaa

SEQ ID NO: 388917 - DNA, 410 bp, Homo sapiens
ttctgcagattggacaaggagcatggcaccagaatctgcctttggtgaggtcctcaggctgcttccactcatggcagaaggtgaaggggcttcagcctgtgcagagatcacatggtgagagcagaggcaagagagaagaggtagatgccagactctgtttaacaaccaacaaccagcaatcattggaactaatggagtaaaaactcatttattactgggaagactgcagtaagccattcatgatctgccccatggcccccaaacccccccccttaggccccacctccaacactggggatcaaatttcaacatgaggtttggaggatcaactacccaaactatagcagaatgtcactagacccatgaaatataatttgtattttattgttcttactagaaattaacacatt

SEQ ID NO: 388918 - DNA, 425 bp, Homo sapiens
aggggcatttttttaaagcctcactgaaaatccacaggattatcagtagaatttagtaagtgcccttggtgggtaactccccatggaagcttttccttccacacggtcagtaggtctaagaacacaaaaagtattttttggctttcctatattttcactggtggaagtcagcccattcacacctagtgaatagaaaaaaaaagtagctttaggttaatattacaataaatcaaaaagaggcagatggctgcatcttctcagagctacctctattcctgcctaagaatcaacctcatgagcttggtagaaggacattctgctagttattctttcttgaaagaccaggaatatcaagagatttggatttcagaaaaacaatcccctaatttttaaggtttttattcatcttgtcttccacccgtagc

SEQ ID NO: 388919 - DNA, 322 bp, Homo sapiens
caagatgggatggggaaaaagtgagatgcgtttctttagttgagtcagtcagcttatgcagaaggaatgagagttcctagcctagcaatggatacttcagacactgtttcccatttctacaaagggaccttattagggtttattaggtgacaaaatggggtggaaaaaaggagcacataattagaagggactaattaaaataccttcctctctggatactggagatggaatgaaaaatgattagtattgataagaggtggtagagtggcaaggaagaatttgggaattagaggacagaggagtgctctgcatgcttgtcatt

SEQ ID NO: 388920 - DNA, 5433 bp, Homo sapiens
caagtgccgtcgccgcgccccttccccctcccgcctccccggccccctccccggaaccggcggtcgagctacggtcgcggagcagtggaaccgagactgccccgcggagccgccggtatgagcgcccctcgccaccccgtgtcccaggcccggcctttctgacaagagctagacttcgggctccttgaggatattcagttttgtatgtttgaatatcctctcaccatgttcagcataaagtaccattcttaatgattatcctcaacaagacaggtgtgagagggttgctgttgtattgcaatcatggtgcagaaataccagtccccagtgagggtgtacaaatacccctttgaattaattatggctgcctatgaaaggaggttccctacatgtcctttgattccgatgttcgtgggcagtgacactgtgaatgaattcaagagcgaagatggggctattcatgtcattgaaaggcgctgcaagctggatgtagatgcacccagactgctgaagaagattgcaggagttgattatgtttattttgtccagaaaaactcactgaattctcgggaacgtactttgcacattgaggcttataatgaaacgttttccaatcgggtcatcattaatgagcattgctgctacaccgttcaccctgaaaatgaagattggacctgttttgaacagtctgcaagtttagatattaaatctttctttggttttgaaagtacagtggaaaaaattgcaatgaaacaatataccagcaacattaaaaaaggaaaggaaatcatcgaatactaccttcgccaattagaagaagaaggcataacctttgtgccccgttggagtccgccttccatcacgccctcttcagagacatcttcatcatcctccaagaaacaagcagcgtccatggccgtcgtcatcccagaagctgccctcaaggaggggctgagtggtgatgccctcagcagccccagtgcacctgagcccgtggtgggcacccctgacgacaaactagatgccgactacatcaagagatacctgggcgatttgactccgctgcaggagagctgcctcattagacttcgccagtggctccaggagacccacaagggcaaaattccaaaagatgagcatattcttcggttcctccgtgcacgggattttaatattgacaaagccagagagatcatgtgtcagtctttgacgtggagaaagcagcatcaggtagactacattcttgaaacctggacccctcctcaggtccttcaggattactacgcgggaggctggcatcatcacgacaaagatgggcggcccctctacgtgctcaggctggggcagatggacaccaaaggcttggtgagagcgctcggggaggaagccctgctgagatacgttctctccataaatgaagaagggctaaggcgatgcgaagagaatacaaaagtctttggtcggcctatcagctcatggacctgcctggtggacttggaagggctgaacatgcgccacttgtggagacctggtgtgaaagcgctgctgcggatcatcgaggtggtggaggccaactaccctgagacactgggccgccttctcatcctgcgggcgcccagggtatttcctgtgctctggacgctggttagtccgttcattgatgacaacaccagaaggaagttcctcatttatgcaggaaatgactaccagggtcctggaggcctgctggattacatcgacaaagagattattccagatttcctgagtggggagtgcatgtgcgaagtgccagagggtggactggtccccaaatctctgtaccggactgcagaggagctggagaacgaagacctgaagctctggactgagaccatctaccagtctgcaagcgtcttcaaaggagccccacatgagattctcattcagattgtggatgcctcgtcagtcatcacttgggatttcgacgtgtgcaaaggggacattgtgtttaacatctatcactccaagaggtcgccacaaccacccaaaaaggactccctgggagcccacagcatcacctctccgggtgggaacaatgtgcagctcatagacaaagtctggcagctgggccgcgactacagcatggtggagtcgcctctgatctgcaaagaaggagaaagcgtgcagggttcccatgtgaccaggtggccgggcttctacatcctgcagtggaaattccacagcatgcctgcgtgcgccgccagcagccttccccgggtggacgacgtgcttgcgtccctgcaggtctcttcgcacaagtgtaaagtgatgtactacaccgaggtgatcggctcggaggatttcagaggttccatgacgagcctggagtccagccacagcggcttctcccagctgagtgccgccaccacctcctccagccagtcccactccagctccatgatctccaggtagtgccgcgctgcctgcacctagtgtgcagaggggacggccgcccctcctcggacagccagctgcacccgcccacccagcggcgacattgtacagactcctctcacctctagatagcaaatagctctcagatggtaaacgtagtcgtttgatcccaaaactaccttggcaggtagttttaactctgatcctaacttaactcaatagccatagattttgtatacgttgtgcacaaaatccaaccagagcgcaagggctctcttgaaagaaaagtagtttctgtaccaattaaaggattgacgtggtctcagatattgatgcaaaaaatttttccaacgaactccgcattgtccattagtgaatgaattcctgtgacatcctccagagatggcccctcctcacctgggacggaagctgccagctcgcttcccccaagctgcctcatggcccgcacgccgcctcacggcccccatgcttcccgccagtcaagatggtctgtggacttagggccagcccttgaggtccttatcctctgaggattcagaggttgcctgcggagtaccttgtcccagggccagacacacccacaccacccactgtctgcagtggggccgggggctcaggaggggctctcagggactcctggtgactccaggaaaatgctgccatcgttaaacattactttctctttcctccttttcaaatctttttgatactttttagagcaggatttttctgtatgtgaacttgggtgggggggttcttcccgtttccttccgtgcgtcgcccctctcacctgcagtcagctcccagcccagtgtaggccatctcctctgtgccctctggtggctcattgtcctcagagcccagacagttccagccactaggaggccgtcttggaaccagcaagtcgcatttgccacttgacactgtccatggggttttattagtagctaagcagcagctctcgcatccacttcagggtggcgtgtggcatgtaggagtcctgcttctttgtacatgggaattgtggactcatgcgtgtgtgtgtgtgcatgtgctgtgtgtgtgcatgtgtgcatgacggtgggggtgctggggggacggggtgagtggaaacttagtttgagtaatgaaggaatcttcacagaagcaaatcagaatatgggatttgtttgccttttacattttgtttaattcctgattttaaagcctgctctatctggtacaggcccttattttttcagctttttatgggaaaagcaggttatttgagaatctgtccagaagttgcataggggatggcctccacgataaggacatgcaacacgtgtttctgtgtgcagcagaggccgtgtttttcatgccaaaccccacgcggctgtcaactgtgtgcgtggtaggcatggagatcctggttgtgccgtctcagctccgctctgaaggcactgtgtgggtgctgcgtgactggagagctgtgtggaggccatgtgtgccccgtgcaaggatcaggagggcgggggagggaccgagcagccctcttgcccggtcgggtcagccctagtggctgcctgcacactgtagacgtcccagggcctgtgctgtgatcacctgcctttggaccacatttgtgtttgctcttagagatcgagctcctcagtggtacctgaagcctttgcttccggaaagcgcggtagggttcgtaggtagggctagtaggtagggttagtaggtagggctagtaggtagggctagtaggtagggttagtaggtagggttcgtaggtagggctggtaggtagggttagtaggtagggctagtaggtagggttcgtaggtagggctagtaggtagggttagtaggtagggctagtaggtagggctagtaggtagggttagtaggtagggttcgtaggtagggctggtaggtagggttagtaggtagggctagtaggtagggttcgtaggtagggctagtaggtagggctagtaggtagggttcgtaggtagggttagtaggtagggttagtaggtagggttcgtaggtagggttggtaggtagggttagtaggtagggctagtaggtagggctagtaggtagggctagtaggtagggttagtaggtagggctagtaggtagggttagtaggtagggttcgtaggtagggttagtaggtagggttcgtaggtagggttagtaggtagggctagtaggtagggctagtaggtagggttagtaggtagggctagtaggtagggctagtaggtagggctagtaggtagggctagtaggtagggttcgtaggtagggttcgtaggtagggttcgtaggtagggttagtagcgcgtctgtgctgcttccacctggtgcttcctgttcccaaatcacaagggcctgaaggtggtccctgctttctctttctctttctctgtgtctcagatggcgattttgctgacagctgccaagaaaatgcttcactcaacagtcctcatgtgcccagagatgtttatagaactgtttgaattgcagccatcccctgccccctcccaggctgaagatctgttctttttaagttgattcgggagtggcattcttttatacccaaagactgtagtgcatcttgaagagctcaaagcacatgaccgcacaaatgcttacagggtttcctcccgagtaatccaatctcactccccttgtaagggaattctggggcagctatggtttgagtatgcagtttgcatcgtgtttctacctttagtaccttgccactcttttaaaacgctgctgtcatttcccatttcttagtactaatgattctttgattctccctctattatgtcttaattcactttccttcctaaatttgttatttgcatatcaaattctgtaaatgttttgtaaacatattacctcacttggtaatacaatactgatagtctttaaaagatttttttattgttatcaataataaatgtgaactattta

SEQ ID NO: 388921 - DNA, 446 bp, Homo sapiens
catcaacagtgcagctacaaaatcctcacgtccgtggaccaatacctggagctcattggcaactccttaccagggaccacggcaaagtgcggcagtgcccccttcctcccgagtaatccaatctcactccccttgtaagggaattctggggcagctatggtttgagtatgcagtttgcatcgtgtttctacctttagtaccttgccactcttttaaaacgctgctgtcatttcccatttcttagtactaatgattctttgattctccctctattatgtcttaattcactttccttcctaaatttgttatttgcatatcaaattctgtaaatgttttgtaaacatattacctcacttggtaatacaatactgatagtctttaaaagatttttttattgttatcaataataaatgtgaactatttaaagaaaaaagaatgtctttttc

SEQ ID NO: 388922 - DNA, 567 bp, Homo sapiens
caagtgccgtcgccgcgccccttccccctcccgcctccccggccccctccccggaaccggcggtcgagctacggtcgcggagcagtggaaccgagactgccccgcggagccgccggtatgagcgcccctcgccaccccgtgtcccaggcccggcctttctgacaagagctagacttcgggctccttgaggatattcagttttgtatgtttgaatatcctctcaccatgttcagcataaagtaccattcttaatgattatcctcaacaagacaggtgtgagagggttgctgttgtattgcaatcatggtgcagaaataccagtccccagtgagggtgtacaaatacccctttgaattaattatggctgtaagtacttgacatttcaatttactctttggcttcttatttataaagtacagtgttagaatttgatgatctatagatttattgttcgtctccatggcatcacttgaacttactctgtttttatgcttatgaaccgtatctagagtgtgtaaaatgtttttaaaatacaagcctctgaaaataaaaatctgcttattaaaa

SEQ ID NO: 388923 - DNA, 399 bp, Homo sapiens
ccacattgtcattttaatcttggacactcaggcagcagagaaatatgactgcatggtcttctcctcctcacaggttagtccgttcattgatgacaacaccagaaggaagttcctcatttatgcaggaaatgactaccagggtcctggaggcctgctggattacatcgacaaagagattattccagatttcctgagtggggagtgcatggtatgtcctgaggcgaggaactgcacatttggccccttatgcaggtggaagggtggggggaagacattcaagtttatatacttcttctgtaaagtctatttgcatggcattaggacactcacattttgtttttcccctttcttaaacaatttgagaaattttatatctttgcatgtattactttctggggc

SEQ ID NO: 388924 - DNA, 5304 bp, Homo sapiens
caagtgccgtcgccgcgccccttccccctcccgcctccccggccccctccccggaaccggcggtcgagctacggtcgcggagcagtggaaccgagactgccccgcggagccgccggtatgagcgcccctcgccaccccgtgtcccaggcccggcctttctgacaagagctagacttcgggctccttgaggatattcagttttgtatgtttgaatatcctctcaccatgttcagcataaagtaccattcttaatgattatcctcaacaagacaggtgtgagagggttgctgttgtattgcaatcatggtgcagaaataccagtccccagtgagggtgtacaaatacccctttgaattaattatggctgcctatgaaaggaggttccctacatgtcctttgattccgatgttcgtgggcagtgacactgtgaatgaattcaagagcgaagatggggctattcatgtcattgaaaggcgctgcaagctggatgtagatgcacccagactgctgaagaagattgcaggagttgattatgtttattttgtccagaaaaactcactgaattctcgggaacgtactttgcacattgaggcttataatgaaacgttttccaatcgggtcatcattaatgagcattgctgctacaccggaaaggaaatcatcgaatactaccttcgccaattagaagaagaaggcataacctttgtgccccgttggagtccgccttccatcacgccctcttcagagacatcttcatcatcctccaagaaacaagcagcgtccatggccgtcgtcatcccagaagctgccctcaaggaggggctgagtggtgatgccctcagcagccccagtgcacctgagcccgtggtgggcacccctgacgacaaactagatgccgactacatcaagagatacctgggcgatttgactccgctgcaggagagctgcctcattagacttcgccagtggctccaggagacccacaagggcaaaattccaaaagatgagcatattcttcggttcctccgtgcacgggattttaatattgacaaagccagagagatcatgtgtcagtctttgacgtggagaaagcagcatcaggtagactacattcttgaaacctggacccctcctcaggtccttcaggattactacgcgggaggctggcatcatcacgacaaagatgggcggcccctctacgtgctcaggctggggcagatggacaccaaaggcttggtgagagcgctcggggaggaagccctgctgagatacgttctctccataaatgaagaagggctaaggcgatgcgaagagaatacaaaagtctttggtcggcctatcagctcatggacctgcctggtggacttggaagggctgaacatgcgccacttgtggagacctggtgtgaaagcgctgctgcggatcatcgaggtggtggaggccaactaccctgagacactgggccgccttctcatcctgcgggcgcccagggtatttcctgtgctctggacgctggttagtccgttcattgatgacaacaccagaaggaagttcctcatttatgcaggaaatgactaccagggtcctggaggcctgctggattacatcgacaaagagattattccagatttcctgagtggggagtgcatgtgcgaagtgccagagggtggactggtccccaaatctctgtaccggactgcagaggagctggagaacgaagacctgaagctctggactgagaccatctaccagtctgcaagcgtcttcaaaggagccccacatgagattctcattcagattgtggatgcctcgtcagtcatcacttgggatttcgacgtgtgcaaaggggacattgtgtttaacatctatcactccaagaggtcgccacaaccacccaaaaaggactccctgggagcccacagcatcacctctccgggtgggaacaatgtgcagctcatagacaaagtctggcagctgggccgcgactacagcatggtggagtcgcctctgatctgcaaagaaggagaaagcgtgcagggttcccatgtgaccaggtggccgggcttctacatcctgcagtggaaattccacagcatgcctgcgtgcgccgccagcagccttccccgggtggacgacgtgcttgcgtccctgcaggtctcttcgcacaagtgtaaagtgatgtactacaccgaggtgatcggctcggaggatttcagaggttccatgacgagcctggagtccagccacagcggcttctcccagctgagtgccgccaccacctcctccagccagtcccactccagctccatgatctccaggtagtgccgcgctgcctgcacctagtgtgcagaggggacggccgcccctcctcggacagccagctgcacccgcccacccagcggcgacattgtacagactcctctcacctctagatagcaaatagctctcagatggtaaacgtagtcgtttgatcccaaaactaccttggcaggtagttttaactctgatcctaacttaactcaatagccatagattttgtatacgttgtgcacaaaatccaaccagagcgcaagggctctcttgaaagaaaagtagtttctgtaccaattaaaggattgacgtggtctcagatattgatgcaaaaaatttttccaacgaactccgcattgtccattagtgaatgaattcctgtgacatcctccagagatggcccctcctcacctgggacggaagctgccagctcgcttcccccaagctgcctcatggcccgcacgccgcctcacggcccccatgcttcccgccagtcaagatggtctgtggacttagggccagcccttgaggtccttatcctctgaggattcagaggttgcctgcggagtaccttgtcccagggccagacacacccacaccacccactgtctgcagtggggccgggggctcaggaggggctctcagggactcctggtgactccaggaaaatgctgccatcgttaaacattactttctctttcctccttttcaaatctttttgatactttttagagcaggatttttctgtatgtgaacttgggtgggggggttcttcccgtttccttccgtgcgtcgcccctctcacctgcagtcagctcccagcccagtgtaggccatctcctctgtgccctctggtggctcattgtcctcagagcccagacagttccagccactaggaggccgtcttggaaccagcaagtcgcatttgccacttgacactgtccatggggttttattagtagctaagcagcagctctcgcatccacttcagggtggcgtgtggcatgtaggagtcctgcttctttgtacatgggaattgtggactcatgcgtgtgtgtgtgtgcatgtgctgtgtgtgtgcatgtgtgcatgacggtgggggtgctggggggacggggtgagtggaaacttagtttgagtaatgaaggaatcttcacagaagcaaatcagaatatgggatttgtttgccttttacattttgtttaattcctgattttaaagcctgctctatctggtacaggcccttattttttcagctttttatgggaaaagcaggttatttgagaatctgtccagaagttgcataggggatggcctccacgataaggacatgcaacacgtgtttctgtgtgcagcagaggccgtgtttttcatgccaaaccccacgcggctgtcaactgtgtgcgtggtaggcatggagatcctggttgtgccgtctcagctccgctctgaaggcactgtgtgggtgctgcgtgactggagagctgtgtggaggccatgtgtgccccgtgcaaggatcaggagggcgggggagggaccgagcagccctcttgcccggtcgggtcagccctagtggctgcctgcacactgtagacgtcccagggcctgtgctgtgatcacctgcctttggaccacatttgtgtttgctcttagagatcgagctcctcagtggtacctgaagcctttgcttccggaaagcgcggtagggttcgtaggtagggctagtaggtagggttagtaggtagggctagtaggtagggctagtaggtagggttagtaggtagggttcgtaggtagggctggtaggtagggttagtaggtagggctagtaggtagggttcgtaggtagggctagtaggtagggttagtaggtagggctagtaggtagggctagtaggtagggttagtaggtagggttcgtaggtagggctggtaggtagggttagtaggtagggctagtaggtagggttcgtaggtagggctagtaggtagggctagtaggtagggttcgtaggtagggttagtaggtagggttagtaggtagggttcgtaggtagggttggtaggtagggttagtaggtagggctagtaggtagggctagtaggtagggctagtaggtagggttagtaggtagggctagtaggtagggttagtaggtagggttcgtaggtagggttagtaggtagggttcgtaggtagggttagtaggtagggctagtaggtagggctagtaggtagggttagtaggtagggctagtaggtagggctagtaggtagggctagtaggtagggctagtaggtagggttcgtaggtagggttcgtaggtagggttcgtaggtagggttagtagcgcgtctgtgctgcttccacctggtgcttcctgttcccaaatcacaagggcctgaaggtggtccctgctttctctttctctttctctgtgtctcagatggcgattttgctgacagctgccaagaaaatgcttcactcaacagtcctcatgtgcccagagatgtttatagaactgtttgaattgcagccatcccctgccccctcccaggctgaagatctgttctttttaagttgattcgggagtggcattcttttatacccaaagactgtagtgcatcttgaagagctcaaagcacatgaccgcacaaatgcttacagggtttcctcccgagtaatccaatctcactccccttgtaagggaattctggggcagctatggtttgagtatgcagtttgcatcgtgtttctacctttagtaccttgccactcttttaaaacgctgctgtcatttcccatttcttagtactaatgattctttgattctccctctattatgtcttaattcactttccttcctaaatttgttatttgcatatcaaattctgtaaatgttttgtaaacatattacctcacttggtaatacaatactgatagtctttaaaagatttttttattgttatcaataataaatgtgaactattta

SEQ ID NO: 388925 - DNA, 4939 bp, Homo sapiens
caagtgccgtcgccgcgccccttccccctcccgcctccccggccccctccccggaaccggcggtcgagctacggtcgcggagcagtggaaccgagactgccccgcggagccgccggtatgagcgcccctcgccaccccgtgtcccaggcccggcctttctgacaagagctagacttcgggctccttgaggatattcagttttgtatgtttgaatatcctctcaccatgttcagcataaagtaccattcttaatgattatcctcaacaagacaggtgtgagagggttgctgttgtattgcaatcatggtgcagaaataccagtccccagtgagggtgtacaaatacccctttgaattaattatggctgcctatgaaaggaggttccctacatgtcctttgattccgatgttcgtgggcagtgacactgtgaatgaattcaagagcgaagatggggctattcatgtcattgaaaggcgctgcaagctggatgtagatgcacccagactgctgaagaagattgcaggagttgattatgtttattttgtccagaaaaactcactgaattctcgggaacgtactttgcacattgaggcttataatgaaacgttttccaatcgggtcatcattaatgagcattgctgctacaccgttcaccctgaaaatgaagattggacctgttttgaacagtctgcaagtttagatattaaatctttctttggttttgaaagtacagtggaaaaaattgcaatgaaacaatataccagcaacattaaaaaaggaaaggaaatcatcgaatactaccttcgccaattagaagaagaaggcataacctttgtgccccgttggagtccgccttccatcacgccctcttcagagacatcttcatcatcctccaagaaacaagcagcgtccatggccgtcgtcatcccagaagctgccctcaaggaggggctgagtggtgatgccctcagcagccccagtgcacctgagcccgtggtgggcacccctgacgacaaactagatgccgactacatcaagagatacctgggcgatttgactccgctgcaggagagctgcctcattagacttcgccagtggctccaggagacccacaagggcaaaattccaaaagatgagcatattcttcggttcctccgtgcacgggattttaatattgacaaagccagagagatcatgtgtcagtctttgacgtggagaaagcagcatcaggtagactacattcttgaaacctggacccctcctcaggtccttcaggattactacgcgggaggctggcatcatcacgacaaagatgggcggcccctctacgtgctcaggctggggcagatggacaccaaaggcttggtgagagcgctcggggaggaagccctgctgagatacgttctctccataaatgaagaagggctaaggcgatgcgaagagaatacaaaagtctttggtcggcctatcagctcatggacctgcctggtggacttggaagggctgaacatgcgccacttgtggagacctggtgtgaaagcgctgctgcggatcatcgaggtggtggaggccaactaccctgagacactgggccgccttctcatcctgcgggcgcccagggtatttcctgtgctctggacgctggttagtccgttcattgatgacaacaccagaaggaagttcctcatttatgcaggaaatgactaccagggtcctggaggcctgctggattacatcgacaaagagattattccagatttcctgagtggggagtgcatgtgcgaagtgccagagggtggactggtccccaaatctctgtaccggactgcagaggagctggagaacgaagacctgaagctctggactgagaccatctaccagtctgcaagcgtcttcaaaggagccccacatgagattctcattcagattgtggatgcctcgtcagtcatcacttgggatttcgacgtgtgcaaaggggacattgtgtttaacatctatcactccaagaggtcgccacaaccacccaaaaaggactccctgggagcccacagcatcacctctccgggtgggaacaatgtgcagctcatagacaaagtctggcagctgggccgcgactacagcatggtggagtcgcctctgatctgcaaagaaggagaaagcgtgcagggttcccatgtgaccaggtggccgggcttctacatcctgcagtggaaattccacagcatgcctgcgtgcgccgccagcagccttccccgggtggacgacgtgcttgcgtccctgcaggtctcttcgcacaagtgtaaagtgatgtactacaccgaggtgatcggctcggaggatttcagaggttccatgacgagcctggagtccagccacagcggcttctcccagctgagtgccgccaccacctcctccagccagtcccactccagctccatgatctccaggtagtgccgcgctgcctgcacctagtgtgcagaggggacggccgcccctcctcggacagccagctgcacccgcccacccagcggcgacattgtacagactcctctcacctctagatagcaaatagctctcagatggtaaacgtagtcgtttgatcccaaaactaccttggcaggtagttttaactctgatcctaacttaactcaatagccatagattttgtatacgttgtgcacaaaatccaaccagagcgcaagggctctcttgaaagaaaagtagtttctgtaccaattaaaggattgacgtggtctcagatattgatgcaaaaaatttttccaacgaactccgcattgtccattagtgaatgaattcctgtgacatcctccagagatggcccctcctcacctgggacggaagctgccagctcgcttcccccaagctgcctcatggcccgcacgccgcctcacggcccccatgcttcccgccagtcaagatggtctgtggacttagggccagcccttgaggtccttatcctctgaggattcagaggttgcctgcggagtaccttgtcccagggccagacacacccacaccacccactgtctgcagtggggccgggggctcaggaggggctctcagggactcctggtgactccaggaaaatgctgccatcgttaaacattactttctctttcctccttttcaaatctttttgatactttttagagcaggatttttctgtatgtgaacttgggtgggggggttcttcccgtttccttccgtgcgtcgcccctctcacctgcagtcagctcccagcccagtgtaggccatctcctctgtgccctctggtggctcattgtcctcagagcccagacagttccagccactaggaggccgtcttggaaccagcaagtcgcatttgccacttgacactgtccatggggttttattagtagctaagcagcagctctcgcatccacttcagggtggcgtgtggcatgtaggagtcctgcttctttgtacatgggaattgtggactcatgcgtgtgtgtgtgtgcatgtgctgtgtgtgtgcatgtgtgcatgacggtgggggtgctggggggacggggtgagtggaaacttagtttgagtaatgaaggaatcttcacagaagcaaatcagaatatgggatttgtttgccttttacattttgtttaattcctgattttaaagcctgctctatctggtacaggcccttattttttcagctttttatgggaaaagcaggttatttgagaatctgtccagaagttgcataggggatggcctccacgataaggacatgcaacacgtgtttctgtgtgcagcagaggccgtgtttttcatgccaaaccccacgcggctgtcaactgtgtgcgtggtaggcatggagatcctggttgtgccgtctcagctccgctctgaaggcactgtgtgggtgctgcgtgactggagagctgtgtggaggccatgtgtgccccgtgcaaggatcaggagggcgggggagggaccgagcagccctcttgcccggtcgggtcagccctagtggctgcctgcacactgtagacgtcccagggcctgtgctgtgatcacctgcctttggaccacatttgtgtttgctcttagagatcgagctcctcagtggtacctgaagcctttgcttccggaaagcgcggtagggttcgtaggtagggctagtaggtagggctagtaggtagggttagtaggtagggctagtaggtagggctagtaggtagggctagtaggtagggctagtaggtagggttcgtaggtagggttcgtaggtagggttcgtaggtagggttagtagcgcgtctgtgctgcttccacctggtgcttcctgttcccaaatcacaagggcctgaaggtggtccctgctttctctttctctttctctgtgtctcagatggcgattttgctgacagctgccaagaaaatgcttcactcaacagtcctcatgtgcccagagatgtttatagaactgtttgaattgcagccatcccctgccccctcccaggctgaagatctgttctttttaagttgattcgggagtggcattcttttatacccaaagactgtagtgcatcttgaagagctcaaagcacatgaccgcacaaatgcttacagggtttcctcccgagtaatccaatctcactccccttgtaagggaattctggggcagctatggtttgagtatgcagtttgcatcgtgtttctacctttagtaccttgccactcttttaaaacgctgctgtcatttcccatttcttagtactaatgattctttgattctccctctattatgtcttaattcactttccttcctaaatttgttatttgcatatcaaattctgtaaatgttttgtaaacatattacctcacttggtaatacaatactgatagtctttaaaagatttttttattgttatcaataataaatgtgaactattta

SEQ ID NO: 388926 - DNA, 4384 bp, Homo sapiens
tttcaggctggtacgcccccgcggtatgggctatcgtggacccacggcgtcgagggagacccacaagtgcacaattccaaaagatgagcatattcttcggttcctccgtgcacgggattttaatattgacaaagccagagagatcatgtgtcagtctttgacgtggagaaagcagcatcaggtagactacattcttgaaacctggacccctcctcaggtccttcaggattactacgcgggaggctggcatcatcacgacaaagatgggcggcccctctacgtgctcaggctggggcagatggacaccaaaggcttggtgagagcgctcggggaggaagccctgctgagatacgttctctccataaatgaagaagggctaaggcgatgcgaagagaatacaaaagtctttggtcggcctatcagctcatggacctgcctggtggacttggaagggctgaacatgcgccacttgtggagacctggtgtgaaagcgctgctgcggatcatcgaggtggtggaggccaactaccctgagacactgggccgccttctcatcctgcgggcgcccagggtatttcctgtgctctggacgctggttagtccgttcattgatgacaacaccagaaggaagttcctcatttatgcaggaaatgactaccagggtcctggaggcctgctggattacatcgacaaagagattattccagatttcctgagtggggagtgcatgtgcgaagtgccagagggtggactggtccccaaatctctgtaccggactgcagaggagctggagaacgaagacctgaagctctggactgagaccatctaccagtctgcaagcgtcttcaaaggagccccacatgagattctcattcagattgtggatgcctcgtcagtcatcacttgggatttcgacgtgtgcaaaggggacattgtgtttaacatctatcactccaagaggtcgccacaaccacccaaaaaggactccctgggagcccacagcatcacctctccgggtgggaacaatgtgcagctcatagacaaagtctggcagctgggccgcgactacagcatggtggagtcgcctctgatctgcaaagaaggagaaagcgtgcagggttcccatgtgaccaggtggccgggcttctacatcctgcagtggaaattccacagcatgcctgcgtgcgccgccagcagccttccccgggtggacgacgtgcttgcgtccctgcaggtctcttcgcacaagtgtaaagtgatgtactacaccgaggtgatcggctcggaggatttcagaggttccatgacgagcctggagtccagccacagcggcttctcccagctgagtgccgccaccacctcctccagccagtcccactccagctccatgatctccaggtagtgccgcgctgcctgcacctagtgtgcagaggggacggccgcccctcctcggacagccagctgcacccgcccacccagcggcgacattgtacagactcctctcacctctagatagcaaatagctctcagatggtaaacgtagtcgtttgatcccaaaactaccttggcaggtagttttaactctgatcctaacttaactcaatagccatagattttgtatacgttgtgcacaaaatccaaccagagcgcaagggctctcttgaaagaaaagtagtttctgtaccaattaaaggattgacgtggtctcagatattgatgcaaaaaatttttccaacgaactccgcattgtccattagtgaatgaattcctgtgacatcctccagagatggcccctcctcacctgggacggaagctgccagctcgcttcccccaagctgcctcatggcccgcacgccgcctcacggcccccatgcttcccgccagtcaagatggtctgtggacttagggccagcccttgaggtccttatcctctgaggattcagaggttgcctgcggagtaccttgtcccagggccagacacacccacaccacccactgtctgcagtggggccgggggctcaggaggggctctcagggactcctggtgactccaggaaaatgctgccatcgttaaacattactttctctttcctccttttcaaatctttttgatactttttagagcaggatttttctgtatgtgaacttgggtgggggggttcttcccgtttccttccgtgcgtcgcccctctcacctgcagtcagctcccagcccagtgtaggccatctcctctgtgccctctggtggctcattgtcctcagagcccagacagttccagccactaggaggccgtcttggaaccagcaagtcgcatttgccacttgacactgtccatggggttttattagtagctaagcagcagctctcgcatccacttcagggtggcgtgtggcatgtaggagtcctgcttctttgtacatgggaattgtggactcatgcgtgtgtgtgtgtgcatgtgctgtgtgtgtgcatgtgtgcatgacggtgggggtgctggggggacggggtgagtggaaacttagtttgagtaatgaaggaatcttcacagaagcaaatcagaatatgggatttgtttgccttttacattttgtttaattcctgattttaaagcctgctctatctggtacaggcccttattttttcagctttttatgggaaaagcaggttatttgagaatctgtccagaagttgcataggggatggcctccacgataaggacatgcaacacgtgtttctgtgtgcagcagaggccgtgtttttcatgccaaaccccacgcggctgtcaactgtgtgcgtggtaggcatggagatcctggttgtgccgtctcagctccgctctgaaggcactgtgtgggtgctgcgtgactggagagctgtgtggaggccatgtgtgccccgtgcaaggatcaggagggcgggggagggaccgagcagccctcttgcccggtcgggtcagccctagtggctgcctgcacactgtagacgtcccagggcctgtgctgtgatcacctgcctttggaccacatttgtgtttgctcttagagatcgagctcctcagtggtacctgaagcctttgcttccggaaagcgcggtagggttcgtaggtagggctagtaggtagggttagtaggtagggctagtaggtagggctagtaggtagggttagtaggtagggttcgtaggtagggctggtaggtagggttagtaggtagggctagtaggtagggttcgtaggtagggctagtaggtagggttagtaggtagggctagtaggtagggctagtaggtagggttagtaggtagggttcgtaggtagggctggtaggtagggttagtaggtagggctagtaggtagggttcgtaggtagggctagtaggtagggctagtaggtagggttcgtaggtagggttagtaggtagggttagtaggtagggttcgtaggtagggttggtaggtagggttagtaggtagggctagtaggtagggctagtaggtagggctagtaggtagggttagtaggtagggctagtaggtagggttagtaggtagggttcgtaggtagggttagtaggtagggttcgtaggtagggttagtaggtagggctagtaggtagggctagtaggtagggttagtaggtagggctagtaggtagggctagtaggtagggctagtaggtagggctagtaggtagggttcgtaggtagggttcgtaggtagggttcgtaggtagggttagtagcgcgtctgtgctgcttccacctggtgcttcctgttcccaaatcacaagggcctgaaggtggtccctgctttctctttctctttctctgtgtctcagatggcgattttgctgacagctgccaagaaaatgcttcactcaacagtcctcatgtgcccagagatgtttatagaactgtttgaattgcagccatcccctgccccctcccaggctgaagatctgttctttttaagttgattcgggagtggcattcttttatacccaaagactgtagtgcatcttgaagagctcaaagcacatgaccgcacaaatgcttacagggtttcctcccgagtaatccaatctcactccccttgtaagggaattctggggcagctatggtttgagtatgcagtttgcatcgtgtttctacctttagtaccttgccactcttttaaaacgctgctgtcatttcccatttcttagtactaatgattctttgattctccctctattatgtcttaattcactttccttcctaaatttgttatttgcatatcaaattctgtaaatgttttgtaaacatattacctcacttggtaatacaatactgatagtctttaaaagatttttttattgttatcaataataaatgtgaactattta

SEQ ID NO: 388927 - DNA, 3750 bp, Homo sapiens
  misc_feature (95)..(95): n is a, c, g, or t
ttgctgtggttgatctagaggatcccgctacaatgccaaggtgatcggtcggaggatttcagaggttccatgacgagcctggagtcagccacagnggttctcccagctgagtgcgccaccacccccaaatctctgtaccggactgcagaggagctggagaacgaagacctgaagctctggactgagaccatctaccagtctgcaagcgtcttcaaaggagccccacatgagattctcattcagattgtggatgcctcgtcagtcatcacttgggatttcgacgtgtgcaaaggggacattgtgtttaacatctatcactccaagaggtcgccacaaccacccaaaaaggactccctgggagcccacagcatcacctctccgggtgggaacaatgtgcagctcatagacaaagtctggcagctgggccgcgactacagcatggtggagtcgcctctgatctgcaaagaaggagaaagcgtgcagggttcccatgtgaccaggtggccgggcttctacatcctgcagtggaaattccacagcatgcctgcgtgcgccgccagcagccttccccgggtggacgacgtgcttgcgtccctgcaggtctcttcgcacaagtgtaaagtgatgtactacaccgaggtgatcggctcggaggatttcagaggttccatgacgagcctggagtccagccacagcggcttctcccagctgagtgccgccaccacctcctccagccagtcccactccagctccatgatctccaggtagtgccgcgctgcctgcacctagtgtgcagaggggacggccgcccctcctcggacagccagctgcacccgcccacccagcggcgacattgtacagactcctctcacctctagatagcaaatagctctcagatggtaaacgtagtcgtttgatcccaaaactaccttggcaggtagttttaactctgatcctaacttaactcaatagccatagattttgtatacgttgtgcacaaaatccaaccagagcgcaagggctctcttgaaagaaaagtagtttctgtaccaattaaaggattgacgtggtctcagatattgatgcaaaaaatttttccaacgaactccgcattgtccattagtgaatgaattcctgtgacatcctccagagatggcccctcctcacctgggacggaagctgccagctcgcttcccccaagctgcctcatggcccgcacgccgcctcacggcccccatgcttcccgccagtcaagatggtctgtggacttagggccagcccttgaggtccttatcctctgaggattcagaggttgcctgcggagtaccttgtcccagggccagacacacccacaccacccactgtctgcagtggggccgggggctcaggaggggctctcagggactcctggtgactccaggaaaatgctgccatcgttaaacattactttctctttcctccttttcaaatctttttgatactttttagagcaggatttttctgtatgtgaacttgggtgggggggttcttcccgtttccttccgtgcgtcgcccctctcacctgcagtcagctcccagcccagtgtaggccatctcctctgtgccctctggtggctcattgtcctcagagcccagacagttccagccactaggaggccgtcttggaaccagcaagtcgcatttgccacttgacactgtccatggggttttattagtagctaagcagcagctctcgcatccacttcagggtggcgtgtggcatgtaggagtcctgcttctttgtacatgggaattgtggactcatgcgtgtgtgtgtgtgcatgtgctgtgtgtgtgcatgtgtgcatgacggtgggggtgctggggggacggggtgagtggaaacttagtttgagtaatgaaggaatcttcacagaagcaaatcagaatatgggatttgtttgccttttacattttgtttaattcctgattttaaagcctgctctatctggtacaggcccttattttttcagctttttatgggaaaagcaggttatttgagaatctgtccagaagttgcataggggatggcctccacgataaggacatgcaacacgtgtttctgtgtgcagcagaggccgtgtttttcatgccaaaccccacgcggctgtcaactgtgtgcgtggtaggcatggagatcctggttgtgccgtctcagctccgctctgaaggcactgtgtgggtgctgcgtgactggagagctgtgtggaggccatgtgtgccccgtgcaaggatcaggagggcgggggagggaccgagcagccctcttgcccggtcgggtcagccctagtggctgcctgcacactgtagacgtcccagggcctgtgctgtgatcacctgcctttggaccacatttgtgtttgctcttagagatcgagctcctcagtggtacctgaagcctttgcttccggaaagcgcggtagggttcgtaggtagggctagtaggtagggttagtaggtagggctagtaggtagggctagtaggtagggttagtaggtagggttcgtaggtagggctggtaggtagggttagtaggtagggctagtaggtagggttcgtaggtagggctagtaggtagggttagtaggtagggctagtaggtagggctagtaggtagggttagtaggtagggttcgtaggtagggctggtaggtagggttagtaggtagggctagtaggtagggttcgtaggtagggctagtaggtagggctagtaggtagggttcgtaggtagggttagtaggtagggttagtaggtagggttcgtaggtagggttggtaggtagggttagtaggtagggctagtaggtagggctagtaggtagggctagtaggtagggttagtaggtagggctagtaggtagggttagtaggtagggttcgtaggtagggttagtaggtagggttcgtaggtagggttagtaggtagggctagtaggtagggctagtaggtagggttagtaggtagggctagtaggtagggctagtaggtagggctagtaggtagggctagtaggtagggttcgtaggtagggttcgtaggtagggttcgtaggtagggttagtagcgcgtctgtgctgcttccacctggtgcttcctgttcccaaatcacaagggcctgaaggtggtccctgctttctctttctctttctctgtgtctcagatggcgattttgctgacagctgccaagaaaatgcttcactcaacagtcctcatgtgcccagagatgtttatagaactgtttgaattgcagccatcccctgccccctcccaggctgaagatctgttctttttaagttgattcgggagtggcattcttttatacccaaagactgtagtgcatcttgaagagctcaaagcacatgaccgcacaaatgcttacagggtttcctcccgagtaatccaatctcactccccttgtaagggaattctggggcagctatggtttgagtatgcagtttgcatcgtgtttctacctttagtaccttgccactcttttaaaacgctgctgtcatttcccatttcttagtactaatgattctttgattctccctctattatgtcttaattcactttccttcctaaatttgttatttgcatatcaaattctgtaaatgttttgtaaacatattacctcacttggtaatacaatactgatagtctttaaaagatttttttattgttatcaataataaatgtgaactattta

SEQ ID NO: 388928 - DNA, 5609 bp, Homo sapiens
  misc_feature (5441)..(5441): n is a, c, g, or t
caagtgccgtcgccgcgccccttccccctcccgcctccccggccccctccccggaaccggcggtcgagctacggtcgcggagcagtggaaccgagactgccccgcggagccgccggtatgagcgcccctcgccaccccgtgtcccaggcccggcctttctgacaagagctagacttcgggctccttgaggatattcagttttgtatgtttgaatatcctctcaccatgttcagcataaagtaccattcttaatgattatcctcaacaagacaggtgtgagagggttgctgttgtattgcaatcatggtgcagaaataccagtccccagtgagggtgtacaaatacccctttgaattaattatggctgcctatgaaaggaggttccctacatgtcctttgattccgatgttcgtgggcagtgacactgtgaatgaattcaagagcgaagatggggctattcatgtcattgaaaggcgctgcaagctggatgtagatgcacccagactgctgaagaagattgcaggagttgattatgtttattttgtccagaaaaactcactgaattctcgggaacgtactttgcacattgaggcttataatgaaacgttttccaatcgggtcatcattaatgagcattgctgctacaccgttcaccctgaaaatgaagattggacctgttttgaacagtctgcaagtttagatattaaatctttctttggttttgaaagtacagtggaaaaaattgcaatgaaacaatataccagcaacattaaaaaaggaaaggaaatcatcgaatactaccttcgccaattagaagaagaaggcataacctttgtgccccgttggagtccgccttccatcacgccctcttcagagacatcttcatcatcctccaagaaacaagcagcgtccatggccgtcgtcatcccagaagctgccctcaaggaggggctgagtggtgatgccctcagcagccccagtgcacctgagcccgtggtgggcacccctgacgacaaactagatgccgactacatcaagagatacctgggcgatttgactccgctgcaggagagctgcctcattagacttcgccagtggctccaggagacccacaagggcaaaattccaaaagatgagcatattcttcggttcctccgtgcacgggattttaatattgacaaagccagagagatcatgtgtcagtctttgacgtggagaaagcagcatcaggtagactacattcttgaaacctggacccctcctcaggtccttcaggattactacgcgggaggctggcatcatcacgacaaagatgggcggcccctctacgtgctcaggctggggcagatggacaccaaaggcttggtgagagcgctcggggaggaagccctgctgagatacgttctctccataaatgaagaagggctaaggcgatgcgaagagaatacaaaagtctttggtcggcctatcagctcatggacctgcctggtggacttggaagggctgaacatgcgccacttgtggagacctggtgtgaaagcgctgctgcggatcatcgaggtggtggaggccaactaccctgagacactgggccgccttctcatcctgcgggcgcccagggtatttcctgtgctctggacgctggttagtccgttcattgatgacaacaccagaaggaagttcctcatttatgcaggaaatgactaccagggtcctggaggcctgctggattacatcgacaaagagattattccagatttcctgagtggggagtgcatgtgcgaagtgccagagggtggactggtccccaaatctctgtaccggactgcagaggagctggagaacgaagacctgaagctctggactgagaccatctaccagtctgcaagcgtcttcaaaggagccccacatgagattctcattcagattgtggatgcctcgtcagtcatcacttgggatttcgacgtgtgcaaaggggacattgtgtttaacatctatcactccaagaggtcgccacaaccacccaaaaaggactccctgggagcccacagcatcacctctccgggtgggaacaatgtgcagctcatagacaaagtctggcagctgggccgcgactacagcatggtggagtcgcctctgatctgcaaagaaggagaaagcgtgcagggttcccatgtgaccaggtggccgggcttctacatcctgcagtggaaattccacagcatgcctgcgtgcgccgccagcagccttccccgggtggacgacgtgcttgcgtccctgcaggtctcttcgcacaagtgtaaagtgatgtactacaccgaggtgatcggctcggaggatttcagaggttccatgacgagcctggagtccagccacagcggcttctcccagctgagtgccgccaccacctcctccagccagtcccactccagctccatgatctccaggtagtgccgcgctgcctgcacctagtgtgcagaggggacggccgcccctcctcggacagccagctgcacccgcccacccagcggcgacattgtacagactcctctcacctctagatagcaaatagctctcagatggtaaacgtagtcgtttgatcccaaaactaccttggcaggtagttttaactctgatcctaacttaactcaatagccatagattttgtatacgttgtgcacaaaatccaaccagagcgcaagggctctcttgaaagaaaagtagtttctgtaccaattaaaggattgacgtggtctcagatattgatgcaaaaaatttttccaacgaactccgcattgtccattagtgaatgaattcctgtgacatcctccagagatggcccctcctcacctgggacggaagctgccagctcgcttcccccaagctgcctcatggcccgcacgccgcctcacggcccccatgcttcccgccagtcaagatggtctgtggacttagggccagcccttgaggtccttatcctctgaggattcagaggttgcctgcggagtaccttgtcccagggccagacacacccacaccacccactgtctgcagtggggccgggggctcaggaggggctctcagggactcctggtgactccaggaaaatgctgccatcgttaaacattactttctctttcctccttttcaaatctttttgatactttttagagcaggatttttctgtatgtgaacttgggtgggggggttcttcccgtttccttccgtgcgtcgcccctctcacctgcagtcagctcccagcccagtgtaggccatctcctctgtgccctctggtggctcattgtcctcagagcccagacagttccagccactaggaggccgtcttggaaccagcaagtcgcatttgccacttgacactgtccatggggttttattagtagctaagcagcagctctcgcatccacttcagggtggcgtgtggcatgtaggagtcctgcttctttgtacatgggaattgtggactcatgcgtgtgtgtgtgtgcatgtgctgtgtgtgtgcatgtgtgcatgacggtgggggtgctggggggacggggtgagtggaaacttagtttgagtaatgaaggaatcttcacagaagcaaatcagaatatgggatttgtttgccttttacattttgtttaattcctgattttaaagcctgctctatctggtacaggcccttattttttcagctttttatgggaaaagcaggttatttgagaatctgtccagaagttgcataggggatggcctccacgataaggacatgcaacacgtgtttctgtgtgcagcagaggccgtgtttttcatgccaaaccccacgcggctgtcaactgtgtgcgtggtaggcatggagatcctggttgtgccgtctcagctccgctctgaaggcactgtgtgggtgctgcgtgactggagagctgtgtggaggccatgtgtgccccgtgcaaggatcaggagggcgggggagggaccgagcagccctcttgcccggtcgggtcagccctagtggctgcctgcacactgtagacgtcccagggcctgtgctgtgatcacctgcctttggaccacatttgtgtttgctcttagagatcgagctcctcagtggtacctgaagcctttgcttccggaaagcgcggtagggttcgtaggtagggctagtaggtagggttagtaggtagggctagtaggtagggctagtaggtagggttagtaggtagggttcgtaggtagggctggtaggtagggttagtaggtagggctagtaggtagggttcgtaggtagggctagtaggtagggttagtaggtagggctagtaggtagggctagtaggtagggttagtaggtagggttcgtaggtagggctggtaggtagggttagtaggtagggctagtaggtagggttcgtaggtagggctagtaggtagggctagtaggtagggttcgtaggtagggttagtaggtagggttagtaggtagggttcgtaggtagggttggtaggtagggttagtaggtagggctagtaggtagggctagtaggtagggctagtaggtagggttagtaggtagggctagtaggtagggttagtaggtagggttcgtaggtagggttagtaggtagggttcgtaggtagggttagtaggtagggctagtaggtagggctagtaggtagggttagtaggtagggctagtaggtagggctagtaggtagggctagtaggtagggctagtaggtagggttcgtaggtagggttcgtaggtagggttcgtaggtagggttagtagcgcgtctgtgctgcttccacctggtgcttcctgttcccaaatcacaagggcctgaaggtggtccctgctttctctttctctttctctgtgtctcagatggcgattttgctgacagctgccaagaaaatgcttcactcaacagtcctcatgtgcccagagatgtttatagaactgtttgaattgcagccatcccctgccccctcccaggctgaagatctgttctttttaagttgattcgggagtggcattcttttatacccaaagactgtagtgcatcttgaagagctcaaagcacatgaccgcacaaatgcttacagggtttcctcccgagtaatccaatctcactccccttgtaagggaattctggggcagctatggtttgagtatgcagtttgcatcgtgtttctacctttagtaccttgccactcttttaaaacgctgctgtcatttcccatttcttagtactaatgattctttgattctccctctattatgtcttaattcactttccttcctaaatttgttatttgcatatcaaattctgtaaatgttttgtaaacatattacctcacttggtaatacaatactgatagtctttaaaagatttttttattgttatcaataataaatgtgaactatttacgaacacnacacaaccggcgccgcgtcctaatttccccggagggccccagttacgcgctcgcgcgttctgatcacggcccaacggagcgttttaacagccggccgtacacgtcggctgaaaagggacggatcgcaggccacttcgggggcacggacccccgcgtggtagaaacgtc

SEQ ID NO: 388929 - DNA, 2253 bp, Homo sapiens
cgcacacgcacgccaacacacctacggctaggtagcgaggcctgggtgtttagccatcctcactgacagttcagctcccagcccagtgtaggccatctcctctgtgccctctggtggctcattgtcctcagagcccagacagttccagccactaggaggccgtcttggaaccagcaagtcgcatttgccacttgacactgtccatggggttttattagtagctaagcagcagctctcgcatccacttcagggtggcgtgtggcatgtaggagtcctgcttctttgtacatgggaattgtggactcatgcgtgtgtgtgtgtgcatgtgctgtgtgtgtgcatgtgtgcatgacggtgggggtgctggggggacggggtgagtggaaacttagtttgagtaatgaaggaatcttcacagaagcaaatcagaatatgggatttgtttgccttttacattttgtttaattcctgattttaaagcctgctctatctggtacaggcccttattttttcagctttttatgggaaaagcaggttatttgagaatctgtccagaagttgcataggggatggcctccacgataaggacatgcaacacgtgtttctgtgtgcagcagaggccgtgtttttcatgccaaaccccacgcggctgtcaactgtgtgcgtggtaggcatggagatcctggttgtgccgtctcagctccgctctgaaggcactgtgtgggtgctgcgtgactggagagctgtgtggaggccatgtgtgccccgtgcaaggatcaggagggcgggggagggaccgagcagccctcttgcccggtcgggtcagccctagtggctgcctgcacactgtagacgtcccagggcctgtgctgtgatcacctgcctttggaccacatttgtgtttgctcttagagatcgagctcctcagtggtacctgaagcctttgcttccggaaagcgcggtagggttcgtaggtagggctagtaggtagggttagtaggtagggctagtaggtagggctagtaggtagggttagtaggtagggttcgtaggtagggctggtaggtagggttagtaggtagggctagtaggtagggttcgtaggtagggctagtaggtagggttagtaggtagggctagtaggtagggctagtaggtagggttagtaggtagggttcgtaggtagggctggtaggtagggttagtaggtagggctagtaggtagggttcgtaggtagggctagtaggtagggctagtaggtagggttcgtaggtagggttagtaggtagggttagtaggtagggttcgtaggtagggttggtaggtagggttagtaggtagggctagtaggtagggctagtaggtagggctagtaggtagggttagtaggtagggctagtaggtagggttagtaggtagggttcgtaggtagggttagtaggtagggttcgtaggtagggttagtaggtagggctagtaggtagggctagtaggtagggttagtaggtagggctagtaggtagggctagtaggtagggctagtaggtagggctagtaggtagggttcgtaggtagggttcgtaggtagggttcgtaggtagggttagtagcgcgtctgtgctgcttccacctggtgcttcctgttcccaaatcacaagggcctgaaggtggtccctgctttctctttctctttctctgtgtctcagatggcgattttgctgacagctgccaagaaaatgcttcactcaacagtcctcatgtgcccagagatgtttatagaactgtttgaattgcagccatcccctgccccctcccaggctgaagatctgttctttttaagttgattcgggagtggcattcttttatacccaaagactgtagtgcatcttgaagagctcaaagcacatgaccgcacaaatgcttacagggtttcctcccgagtaatccaatctcactccccttgtaagggaattctggggcagctatggtttgagtatgcagtttgcatcgtgtttctacctttagtaccttgccactcttttaaaacgctgctgtcatttcccatttcttagtactaatgattctttgattctccctctattatgtcttaattcactttccttcctaaatttgttatttgcatatcaaattctgtaaatgttttgtaaacatattacctcacttggtaatacaatactgatagtctttaaaagatttttttattgttatcaataataaatgtgaactattta

SEQ ID NO: 388930 - DNA, 4810 bp, Homo sapiens
caagtgccgtcgccgcgccccttccccctcccgcctccccggccccctccccggaaccggcggtcgagctacggtcgcggagcagtggaaccgagactgccccgcggagccgccggtatgagcgcccctcgccaccccgtgtcccaggcccggcctttctgacaagagctagacttcgggctccttgaggatattcagttttgtatgtttgaatatcctctcaccatgttcagcataaagtaccattcttaatgattatcctcaacaagacaggtgtgagagggttgctgttgtattgcaatcatggtgcagaaataccagtccccagtgagggtgtacaaatacccctttgaattaattatggctgcctatgaaaggaggttccctacatgtcctttgattccgatgttcgtgggcagtgacactgtgaatgaattcaagagcgaagatggggctattcatgtcattgaaaggcgctgcaagctggatgtagatgcacccagactgctgaagaagattgcaggagttgattatgtttattttgtccagaaaaactcactgaattctcgggaacgtactttgcacattgaggcttataatgaaacgttttccaatcgggtcatcattaatgagcattgctgctacaccgttcaccctgaaaatgaagattggacctgttttgaacagtctgcaagtttagatattaaatctttctttggttttgaaagtacagtggaaaaaattgcaatgaaacaatataccagcaacattaaaaaaggaaaggaaatcatcgaatactaccttcgccaattagaagaagaaggcataacctttgtgccccgttggagtccgccttccatcacgccctcttcagagacatcttcatcatcctccaagaaacaagcagcgtccatggccgtcgtcatcccagaagctgccctcaaggaggggctgagtggtgatgccctcagcagccccagtgcacctgagcccgtggtgggcacccctgacgacaaactagatgccgactacatcaagagatacctgggcgatttgactccgctgcaggagagctgcctcattagacttcgccagtggctccaggagacccacaagggcaaaattccaaaagatgagcatattcttcggttcctccgtgcacgggattttaatattgacaaagccagagagatcatgtgtcagtctttgacgtggagaaagcagcatcaggtagactacattcttgaaacctggacccctcctcaggtccttcaggattactacgcgggaggctggcatcatcacgacaaagatgggcggcccctctacgtgctcaggctggggcagatggacaccaaaggcttggtgagagcgctcggggaggaagccctgctgagatacgttctctccataaatgaagaagggctaaggcgatgcgaagagaatacaaaagtctttggtcggcctatcagctcatggacctgcctggtggacttggaagggctgaacatgcgccacttgtggagacctggtgtgaaagcgctgctgcggatcatcgaggtggtggaggccaactaccctgagacactgggccgccttctcatcctgcgggcgcccagggtatttcctgtgctctggacgctggttagtccgttcattgatgacaacaccagaaggaagttcctcatttatgcaggaaatgactaccagggtcctggaggcctgctggattacatcgacaaagagattattccagatttcctgagtggggagtgcatgtgcgaagtgccagagggtggactggtccccaaatctctgtaccggactgcagaggagctggagaacgaagacctgaagctctggactgagaccatctaccagtctgcaagcgtcttcaaaggagccccacatgagattctcattcagattgtggatgcctcgtcagtcatcacttgggatttcgacgtgtgcaaaggggacattgtgtttaacatctatcactccaagaggtcgccacaaccacccaaaaaggactccctgggagcccacagcatcacctctccgggtgggaacaatgtgcagctcatagacaaagtctggcagctgggccgcgactacagcatggtggagtcgcctctgatctgcaaagaaggagaaagcgtgcagggttcccatgtgaccaggtggccgggcttctacatcctgcagtggaaattccacagcatgcctgcgtgcgccgccagcagccttccccgggtggacgacgtgcttgcgtccctgcaggtctcttcgcacaagtgtaaagtgatgtactacaccgaggtgatcggctcggaggatttcagaggttccatgacgagcctggagtccagccacagcggcttctcccagctgagtgccgccaccacctcctccagccagtcccactccagctccatgatctccaggtagtgccgcgctgcctgcacctagtgtgcagaggggacggccgcccctcctcggacagccagctgcacccgcccacccagcggcgacattgtacagactcctctcacctctagatagcaaatagctctcagatggtaaacgtagtcgtttgatcccaaaactaccttggcaggtagttttaactctgatcctaacttaactcaatagccatagattttgtatacgttgtgcacaaaatccaaccagagcgcaagggctctcttgaaagaaaagtagtttctgtaccaattaaaggattgacgtggtctcagatattgatgcaaaaaatttttccaacgaactccgcattgtccattagtgaatgaattcctgtgacatcctccagagatggcccctcctcacctgggacggaagctgccagctcgcttcccccaagctgcctcatggcccgcacgccgcctcacggcccccatgcttcccgccagtcaagatggtctgtggacttagggccagcccttgaggtccttatcctctgaggattcagaggttgcctgcggagtaccttgtcccagggccagacacacccacaccacccactgtctgcagtggggccgggggctcaggaggggctctcagggactcctggtgactccaggaaaatgctgccatcgttaaacattactttctctttcctccttttcaaatctttttgatactttttagagcaggatttttctgtatgtgaacttgggtgggggggttcttcccgtttccttccgtgcgtcgcccctctcacctgcagtcagctcccagcccagtgtaggccatctcctctgtgccctctggtggctcattgtcctcagagcccagacagttccagccactaggaggccgtcttggaaccagcaagtcgcatttgccacttgacactgtccatggggttttattagtagctaagcagcagctctcgcatccacttcagggtggcgtgtggcatgtaggagtcctgcttctttgtacatgggaattgtggactcatgcgtgtgtgtgtgtgcatgtgctgtgtgtgtgcatgtgtgcatgacggtgggggtgctggggggacggggtgagtggaaacttagtttgagtaatgaaggaatcttcacagaagcaaatcagaatatgggatttgtttgccttttacattttgtttaattcctgattttaaagcctgctctatctggtacaggcccttattttttcagctttttatgggaaaagcaggttatttgagaatctgtccagaagttgcataggggatggcctccacgataaggacatgcaacacgtgtttctgtgtgcagcagaggccgtgtttttcatgccaaaccccacgcggctgtcaactgtgtgcgtggtaggcatggagatcctggttgtgccgtctcagctccgctctgaaggcactgtgtgggtgctgcgtgactggagagctgtgtggaggccatgtgtgccccgtgcaaggatcaggagggcgggggagggaccgagcagccctcttgcccggtcgggtcagccctagtggctgcctgcacactgtagacgtcccagggcctgtgctgtgatcacctgcctttggaccacatttgtgtttgctcttagagatcgagctcctcagtggtacctgaagcctttgcttccggaaagcgcggtagggttcgtaggtagggctagtaggtagggctagtaggtagggttagtaggtagggctagtaggtagggctagtaggtagggctagtaggtagggctagtaggtagggttcgtaggtagggttcgtaggtagggttcgtaggtagggttagtagcgcgtctgtgctgcttccacctggtgcttcctgttcccaaatcacaagggcctgaaggtggtccctgctttctctttctctttctctgtgtctcagatggcgattttgctgacagctgccaagaaaatgcttcactcaacagtcctcatgtgcccagagatgtttatagaactgtttgaattgcagccatcccctgccccctcccaggctgaagatctgttctttttaagttgattcgggagtggcattcttttatacccaaagactgtagtgcatcttgaagagctcaaagcacatgaccgcacaaatgcttacagggtttcctcccgagtaatccaatctcactccccttgtaagggaattctggggcagctatggtttgagtatgcagtttgcatcgtgtttctacctttagtaccttgccactctttttctataaggcatacccactctccttctagatttatttttaccaatcaaccttgcaatgtttgaaccctatacctacttagt

SEQ ID NO: 388931 - DNA, 2760 bp, Homo sapiens
caagtgccgtcgccgcgccccttccccctcccgcctccccggccccctccccggaaccggcggtcgagctacggtcgcggagcagtggaaccgagactgccccgcggagccgccggtatgagcgcccctcgccaccccgtgtcccaggcccggcctttctgacaagagctagacttcgggctccttgaggatattcagttttgtatgtttgaatatcctctcaccatgttcagcataaagtaccattcttaatgattatcctcaacaagacaggtgtgagagggttgctgttgtattgcaatcatggtgcagaaataccagtccccagtgagggtgtacaaatacccctttgaattaattatggctgcctatgaaaggaggttccctacatgtcctttgattccgatgttcgtgggcagtgacactgtgaatgaattcaagagcgaagatggggctattcatgtcattgaaaggcgctgcaagctggatgtagatgcacccagactgctgaagaagattgcaggagttgattatgtttattttgtccagaaaaactcactgaattctcgggaacgtactttgcacattgaggcttataatgaaacgttttccaatcgggtcatcattaatgagcattgctgctacaccgttcaccctgaaaatgaagattggacctgttttgaacagtctgcaagtttagatattaaatctttctttggttttgaaagtacagtggaaaaaattgcaatgaaacaatataccagcaacattaaaaaaggaaaggaaatcatcgaatactaccttcgccaattagaagaagaaggcataacctttgtgccccgttggagtccgccttccatcacgccctcttcagagacatcttcatcatcctccaagaaacaagcagcgtccatggccgtcgtcatcccagaagctgccctcaaggaggggctgagtggtgatgccctcagcagccccagtgcacctgagcccgtggtgggcacccctgacgacaaactagatgccgactacatcaagagatacctgggcgatttgactccgctgcaggagagctgcctcattagacttcgccagtggctccaggagacccacaagggcaaaattccaaaagatgagcatattcttcggttcctccgtgcacgggattttaatattgacaaagccagagagatcatgtgtcagtctttgacgtggagaaagcagcatcaggtagactacattcttgaaacctggacccctcctcaggtccttcaggattactacgcgggaggctggcatcatcacgacaaagatgggcggcccctctacgtgctcaggctggggcagatggacaccaaaggcttggtgagagcgctcggggaggaagccctgctgagatacgttctctccataaatgaagaagggctaaggcgatgcgaagagaatacaaaagtctttggtcggcctatcagctcatggacctgcctggtggacttggaagggctgaacatgcgccacttgtggagacctggtgtgaaagcgctgctgcggatcatcgaggtggtggaggccaactaccctgagacactgggccgccttctcatcctgcgggcgcccagggtatttcctgtgctctggacgctggttagtccgttcattgatgacaacaccagaaggaagttcctcatttatgcaggaaatgactaccagggtcctggaggcctgctggattacatcgacaaagagattattccagatttcctgagtggggagtgcatgtgcgaagtgccagagggtggactggtccccaaatctctgtaccggactgcagaggagctggagaacgaagacctgaagctctggactgagaccatctaccagtctgcaagcgtcttcaaaggagccccacatgagattctcattcagattgtggatgcctcgtcagtcatcacttgggatttcgacgtgtgcaaaggggacattgtgtttaacatctatcactccaagaggtcgccacaaccacccaaaaaggactccctgggagcccacagcatcacctctccgggtgggaacaatgtgcagctcatagacaaagtctggcagctgggccgcgactacagcatggtggagtcgcctctgatctgcaaagaaggagaaagcgtgcagggttcccatgtgaccaggtggccgggcttctacatcctgcagtggaaattccacagcatgcctgcgtgcgccgccagcagccttccccgggtggacgacgtgcttgcgtccctgcaggtctcttcgcacaagtgtaaagtgatgtactacaccgaggtgatcggctcggaggatttcagaggttccatgacgagcctggagtccagccacagcggcttctcccagctgagtgccgccaccacctcctccagccagtcccactccagctccatgatctccaggtagtgccgcgctgcctgcacctagtgtgcagaggggacggccgcccctcctcggacagccagctgcacccgcccacccagcggcgacattgtacagactcctctcacctctagatagcaaatagctctcagatggtaaacgtagtcgtttgatcccaaaactaccttggcaggtagttttaactctgatcctaacttaactcaatagccatagattttgtatacgttgtgcacaaaatccaaccagagcgcaagggctctcttgaaagaaaagtagtttctgtaccaattaaaggattgacgtggtctcaga

SEQ ID NO: 388932 - DNA, 777 bp, Homo sapiens
caagtgccgtcgccgcgccccttccccctcccgcctccccggccccctccccggaaccggcggtcgagctacggtcgcggagcagtggaaccgagactgccccgcggagccgccggtatgagcgcccctcgccaccccgtgtcccaggcccggcctttctgacaagagctagacttcgggctccttgaggatattcagttttgtatgtttgaatatcctctcaccatgttcagcataaagtaccattcttaatgattatcctcaacaagacaggtgtgagagggttgctgttgtattgcaatcatggtgcagaaataccagtccccagtgagggtgtacaaatacccctttgaattaattatggctgcctatgaaaggaggttccctacatgtcctttgattccgatgttcgtgggcagtgacactgtgaatgaattcaagagcgaagatggggctattcatgtcattgaaaggcgctgcaagctggatgtagatgcacccagactgctgaagaagattgcaggagttgattatgtttattttgtccagaaaaactcactgaattctcgggaacgtactttgcacattgaggcttataatgaaacgttttccaatcgggtcatcattaatgagcattgctgctacaccgttcaccctgaaaatgaagattggacctgttttgaacagtctgcaagtttagatattaaatctttctttggttttgaaagtacagtggaaaaaattgcaatgaaacaatataccagcaacattaaaaaa

SEQ ID NO: 388933 - DNA, 1757 bp, Homo sapiens
caagtgccgtcgccgcgccccttccccctcccgcctccccggccccctccccggaaccggcggtcgagctacggtcgcggagcagtggaaccgagactgccccgcggagccgccggtatgagcgcccctcgccaccccgtgtcccaggcccggcctttctgacaagagctagacttcgggctccttgaggatattcagttttgtatgtttgaatatcctctcaccatgttcagcataaagtaccattcttaatgattatcctcaacaagacaggtgtgagagggttgctgttgtattgcaatcatggtgcagaaataccagtccccagtgagggtgtacaaatacccctttgaattaattatggctgcctatgaaaggaggttccctacatgtcctttgattccgatgttcgtgggcagtgacactgtgaatgaattcaagagcgaagatggggctattcatgtcattgaaaggcgctgcaagctggatgtagatgcacccagactgctgaagaagattgcaggagttgattatgtttattttgtccagaaaaactcactgaattctcgggaacgtactttgcacattgaggcttataatgaaacgttttccaatcgggtcatcattaatgagcattgctgctacaccgttcaccctgaaaatgaagattggacctgttttgaacagtctgcaagtttagatattaaatctttctttggttttgaaagtacagtggaaaaaattgcaatgaaacaatataccagcaacattaaaaaaggaaaggaaatcatcgaatactaccttcgccaattagaagaagaaggcataacctttgtgccccgttggagtccgccttccatcacgccctcttcagagacatcttcatcatcctccaagaaacaagcagcgtccatggccgtcgtcatcccagaagctgccctcaaggaggggctgagtggtgatgccctcagcagccccagtgcacctgagcccgtggtgggcacccctgacgacaaactagatgccgactacatcaagagatacctgggcgatttgactccgctgcaggagagctgcctcattagacttcgccagtggctccaggagacccacaagggcaaaattccaaaagatgagcatattcttcggttcctccgtgcacgggattttaatattgacaaagccagagagatcatgtgtcagtctttgacgtggagaaagcagcatcaggtagactacattcttgaaacctggacccctcctcaggtccttcaggattactacgcgggaggctggcatcatcacgacaaagatgggcggcccctctacgtgctcaggctggggcagatggacaccaaaggcttggtgagagcgctcggggaggaagccctgctgagatacgtaagtgcgcggctgcgagactccaggtgccactgtggcgtcactttttttctctgccagtaggattggggtgttaaccagcctgttagaacaaacatgaattgcttatgtagttaggactgaaaatatattaatatcgtcttaaaatttcaaaaggagacacagaagttataaaagtgtttctcacagtggaagcgtcagtgaggcagtcagggtctcccccgagatgcctgtgtagcagcagtttgagtcttttcattcactcccatgtggaattgccctctcttggggtatggacgccacatccagcaataccacatggaagattcagagatcaaaggtgaagtcctctatct

SEQ ID NO: 388934 - DNA, 578 bp, Homo sapiens
ggcacatgtggtatcagagtgttctcacactcacagacattcatctcctgttcccatgcacttgttctgaagacagagccccagagccaggcccctgctcatctggggatacctctgtgcttcactttggatagccgttacctttgccacacatgacagtgtttattctctttcaaaagtagaatttatttgttggtggtgatgtgtttagcgcatgtgaatgtgtaagaaaatctccataggtgacttttttgatttacatgcttatctgtaatacgctgttagtgtccctcttccatagctggacgcggtagttttagccttaaactaatcatggtaaattttcatgcccttttgtatgtaggttctctccataaatgaagaagggctaaggcgatgcgaagagaatacaaaagtctttggtcggcctatcaggtagatgtgggattttgtttttcctttcaacttactgagaaaacgaattaaatatttctagttgatttttggaattaaaatctacttattattttccaaggtgctctaaaaggtagacaagaagtgaacatgtaatatgccag

SEQ ID NO: 388935 - DNA, 409 bp, Homo sapiens
ttggtggtgatgtgtttagcgcatgtgaatgtgtaagaaaatctccataggtgacttttttgatttacatgcttatctgtaatacgctgttagtgtccctcttccatagctggacgcggtagttttagccttaaactaatcatggtaaattttcatgcccttttgtatgtaggttctctccataaatgaagaagggctaaggcgatgcgaagagaatacaaaagtctttggtcggcctatcaggtagatgtgggattttgtttttcctttcaacttactgagaaaacgaattaaatatttctagttgatttttggaattaaaatctacttattattttccaaggtgctctaaaaggtagacaagaagtgaacatgtaatatgccagtgacgagggacagacagttagtg

SEQ ID NO: 388936 - DNA, 373 bp, Homo sapiens
tgtggtatgatgtgtcagtgcagacttactaataatttgtttctgcattgtggttacttatcacatatatttatgttttgcaggtgtgagagggttgctgttgtattgcaatcatggtgcagaaataccagtccccagtgagggtgtacaaatacccctttgaattaattatggctgtaagtacttgacatttcaatttactctttggcttcttatttataaagtacagtgttagaatttgatgatctatagatttattgttcgtctccatggcatcacttgaacttactctgtttttatgcttatgaaccgtatctagagtgtgtaaaatgtttttaaaatacaagcctctgaaaataaaaatctgcttatt

SEQ ID NO: 388937 - DNA, 398 bp, Homo sapiens
gctgtctttatggtagtagcattgttagtaacgtaagtgtttttttctggttactggttaaactgaggagcaggcagatgatattctgttgtcaattcagtcagtgagagtgctttctctttatctgcaggttcaccctgaaaatgaagattggacctgttttgaacagtctgcaagtttagatattaaatctttctttggttttgaaagtacagtggaaaaaattgcaatgaaacaatataccagcaacattaaaaaagtgagtgtatcttgggattttgtggcagagggtgggcaggagtctctgagatgaccatctttttggaaggctggggatggcttagcaagggatttgcagcatttcttgggtggaagatgctatgatccctaccccctgc

SEQ ID NO: 388938 - DNA, 918 bp, Homo sapiens
cacagagcttggtgcatgacatgtagcaggatccagcggttgaatggatggtggtgtgtgactctggggaaagagatccgtccatacgcattcagcgtttccctccccagcttcagcacctgcaccctggatcccctggagagcacgatgcgctcgcagcatgccggcctggtgctcgtggatcgtggctgcctaacgctgcctctttttcagattctcattcagattgtggatgcctcgtcagtcatcacttgggatttcgacgtgtgcaaaggggacattgtgtttaacatctatcactccaagaggtcgccacaaccacccaaaaaggactccctgggagcccacagcatcacctctccgggtgggaacaatgtgcagctcatagacaaagtctggcagctgggccgcgactacagcatggtggagtcgcctctgatctgcaaagaaggagaaagcgtgcagggttcccatgtgaccaggtggccgggcttctacatcctgcagtggaaattccacagcatgcctgcgtgcgccgccagcagccttccccgggtggacgacgtgcttgcgtccctgcaggtctcttcgcacaagtgtaaagtgatgtactacaccgaggtgatcggctcggaggatttcaggtgcggccaccctcgccacagcaggtgctgcggacagctgggcatggttggagggagcctgcagtcccacgccgtgtgcaggatcagcagtggcggcgggtgtcaggaatgcttggagggccaggagggagtggctttggggtcatttgttggcacggtgactccctgcctgtctgcagagggagagtgtcggagacagagccgactgactgcctttgctttagctcacactgccgtctgcgtgcaggctgtgggaagccggtccccctggtgg

SEQ ID NO: 388939 - DNA, 601 bp, Homo sapiens
  misc_feature (510)..(510): n is a, c, g, or t
  misc_feature (536)..(536): n is a, c, g, or t
  misc_feature (557)..(557): n is a, c, g, or t
  misc_feature (590)..(590): n is a, c, g, or t
caagtgccgtcgccgcgccccttccccctcccgcctccccggccccctccccggaaccggcggtcgagctacggtcgcggagcagtggaaccgagactgccccgcggagccgccggtatgagcgcccctcgccaccccgtgtcccaggcccggcctttctgacaagagctagacttcgggctccttgaggatattcagttttgtatgtttgaatatcctctcaccatgttcagcataaagtaccattcttaatgattatcctcaacaagacaggtgtgagagggttgctgttgtattgcaatcatggtgcagaaataccagtccccagtgagggtgtacaaatacccctttgaattaattatggctcactcaaaccagtgaagcttgggaaagtcattgacctccagtcgttctgctgaggaaacatctgggctctattttccatgggaggaccaggggaattctggaaggatttgggaaaaggacccgggaggaaaattcaggcaagtngatccaatgggaacactggattaatngaaccagccaaggtggaaacnggagttaactccccggaaaaagagggagatttntcaaggttgac

SEQ ID NO: 388940 - DNA, 5522 bp, Homo sapiens
cctgcggaattgggctcgccccgggacgataacagagctctgccgggggctggaggcactgaccgggtgaccagagacccagagaccagaccccctccacggcgcccgggatttcggggacggcttctcccatcgcaagtttcaacagaaaatgagaaatatcccccgacgattggctgaaaacatgcagcaaccactattttcttcctgcccctcgttgatgagagcattcgaagtgacctcagcagggcatccagctagacttcgggctccttgaggatattcagttttgtatgtttgaatatcctctcaccatgttcagcataaagtaccattcttaatgattatcctcaacaagacaggtgtgagagggttgctgttgtattgcaatcatggtgcagaaataccagtccccagtgagggtgtacaaatacccctttgaattaattatggctgcctatgaaaggaggttccctacatgtcctttgattccgatgttcgtgggcagtgacactgtgaatgaattcaagagcgaagatggggctattcatgtcattgaaaggcgctgcaagctggatgtagatgcacccagactgctgaagaagattgcaggagttgattatgtttattttgtccagaaaaactcactgaattctcgggaacgtactttgcacattgaggcttataatgaaacgttttccaatcgggtcatcattaatgagcattgctgctacaccgttcaccctgaaaatgaagattggacctgttttgaacagtctgcaagtttagatattaaatctttctttggttttgaaagtacagtggaaaaaattgcaatgaaacaatataccagcaacattaaaaaaggaaaggaaatcatcgaatactaccttcgccaattagaagaagaaggcataacctttgtgccccgttggagtccgccttccatcacgccctcttcagagacatcttcatcatcctccaagaaacaagcagcgtccatggccgtcgtcatcccagaagctgccctcaaggaggggctgagtggtgatgccctcagcagccccagtgcacctgagcccgtggtgggcacccctgacgacaaactagatgccgactacatcaagagatacctgggcgatttgactccgctgcaggagagctgcctcattagacttcgccagtggctccaggagacccacaagggcaaaattccaaaagatgagcatattcttcggttcctccgtgcacgggattttaatattgacaaagccagagagatcatgtgtcagtctttgacgtggagaaagcagcatcaggtagactacattcttgaaacctggacccctcctcaggtccttcaggattactacgcgggaggctggcatcatcacgacaaagatgggcggcccctctacgtgctcaggctggggcagatggacaccaaaggcttggtgagagcgctcggggaggaagccctgctgagatacgttctctccataaatgaagaagggctaaggcgatgcgaagagaatacaaaagtctttggtcggcctatcagctcatggacctgcctggtggacttggaagggctgaacatgcgccacttgtggagacctggtgtgaaagcgctgctgcggatcatcgaggtggtggaggccaactaccctgagacactgggccgccttctcatcctgcgggcgcccagggtatttcctgtgctctggacgctggttagtccgttcattgatgacaacaccagaaggaagttcctcatttatgcaggaaatgactaccagggtcctggaggcctgctggattacatcgacaaagagattattccagatttcctgagtggggagtgcatgtgcgaagtgccagagggtggactggtccccaaatctctgtaccggactgcagaggagctggagaacgaagacctgaagctctggactgagaccatctaccagtctgcaagcgtcttcaaaggagccccacatgagattctcattcagattgtggatgcctcgtcagtcatcacttgggatttcgacgtgtgcaaaggggacattgtgtttaacatctatcactccaagaggtcgccacaaccacccaaaaaggactccctgggagcccacagcatcacctctccgggtgggaacaatgtgcagctcatagacaaagtctggcagctgggccgcgactacagcatggtggagtcgcctctgatctgcaaagaaggagaaagcgtgcagggttcccatgtgaccaggtggccgggcttctacatcctgcagtggaaattccacagcatgcctgcgtgcgccgccagcagccttccccgggtggacgacgtgcttgcgtccctgcaggtctcttcgcacaagtgtaaagtgatgtactacaccgaggtgatcggctcggaggatttcagaggttccatgacgagcctggagtccagccacagcggcttctcccagctgagtgccgccaccacctcctccagccagtcccactccagctccatgatctccaggtagtgccgcgctgcctgcacctagtgtgcagaggggacggccgcccctcctcggacagccagctgcacccgcccacccagcggcgacattgtacagactcctctcacctctagatagcaaatagctctcagatggtaaacgtagtcgtttgatcccaaaactaccttggcaggtagttttaactctgatcctaacttaactcaatagccatagattttgtatacgttgtgcacaaaatccaaccagagcgcaagggctctcttgaaagaaaagtagtttctgtaccaattaaaggattgacgtggtctcagatattgatgcaaaaaatttttccaacgaactccgcattgtccattagtgaatgaattcctgtgacatcctccagagatggcccctcctcacctgggacggaagctgccagctcgcttcccccaagctgcctcatggcccgcacgccgcctcacggcccccatgcttcccgccagtcaagatggtctgtggacttagggccagcccttgaggtccttatcctctgaggattcagaggttgcctgcggagtaccttgtcccagggccagacacacccacaccacccactgtctgcagtggggccgggggctcaggaggggctctcagggactcctggtgactccaggaaaatgctgccatcgttaaacattactttctctttcctccttttcaaatctttttgatactttttagagcaggatttttctgtatgtgaacttgggtgggggggttcttcccgtttccttccgtgcgtcgcccctctcacctgcagtcagctcccagcccagtgtaggccatctcctctgtgccctctggtggctcattgtcctcagagcccagacagttccagccactaggaggccgtcttggaaccagcaagtcgcatttgccacttgacactgtccatggggttttattagtagctaagcagcagctctcgcatccacttcagggtggcgtgtggcatgtaggagtcctgcttctttgtacatgggaattgtggactcatgcgtgtgtgtgtgtgcatgtgctgtgtgtgtgcatgtgtgcatgacggtgggggtgctggggggacggggtgagtggaaacttagtttgagtaatgaaggaatcttcacagaagcaaatcagaatatgggatttgtttgccttttacattttgtttaattcctgattttaaagcctgctctatctggtacaggcccttattttttcagctttttatgggaaaagcaggttatttgagaatctgtccagaagttgcataggggatggcctccacgataaggacatgcaacacgtgtttctgtgtgcagcagaggccgtgtttttcatgccaaaccccacgcggctgtcaactgtgtgcgtggtaggcatggagatcctggttgtgccgtctcagctccgctctgaaggcactgtgtgggtgctgcgtgactggagagctgtgtggaggccatgtgtgccccgtgcaaggatcaggagggcgggggagggaccgagcagccctcttgcccggtcgggtcagccctagtggctgcctgcacactgtagacgtcccagggcctgtgctgtgatcacctgcctttggaccacatttgtgtttgctcttagagatcgagctcctcagtggtacctgaagcctttgcttccggaaagcgcggtagggttcgtaggtagggctagtaggtagggttagtaggtagggctagtaggtagggctagtaggtagggttagtaggtagggttcgtaggtagggctggtaggtagggttagtaggtagggctagtaggtagggttcgtaggtagggctagtaggtagggttagtaggtagggctagtaggtagggctagtaggtagggttagtaggtagggttcgtaggtagggctggtaggtagggttagtaggtagggctagtaggtagggttcgtaggtagggctagtaggtagggctagtaggtagggttcgtaggtagggttagtaggtagggttagtaggtagggttcgtaggtagggttggtaggtagggttagtaggtagggctagtaggtagggctagtaggtagggctagtaggtagggttagtaggtagggctagtaggtagggttagtaggtagggttcgtaggtagggttagtaggtagggttcgtaggtagggttagtaggtagggctagtaggtagggctagtaggtagggttagtaggtagggctagtaggtagggctagtaggtagggctagtaggtagggctagtaggtagggttcgtaggtagggttcgtaggtagggttcgtaggtagggttagtagcgcgtctgtgctgcttccacctggtgcttcctgttcccaaatcacaagggcctgaaggtggtccctgctttctctttctctttctctgtgtctcagatggcgattttgctgacagctgccaagaaaatgcttcactcaacagtcctcatgtgcccagagatgtttatagaactgtttgaattgcagccatcccctgccccctcccaggctgaagatctgttctttttaagttgattcgggagtggcattcttttatacccaaagactgtagtgcatcttgaagagctcaaagcacatgaccgcacaaatgcttacagggtttcctcccgagtaatccaatctcactccccttgtaagggaattctggggcagctatggtttgagtatgcagtttgcatcgtgtttctacctttagtaccttgccactcttttaaaacgctgctgtcatttcccatttcttagtactaatgattctttgattctccctctattatgtcttaattcactttccttcctaaatttgttatttgcatatcaaattctgtaaatgttttgtaaacatattacctcacttggtaatacaatactgatagtctttaaaagatttttttattgttatcaataataaatgtgaactattta

SEQ ID NO: 388941 - DNA, 4313 bp, Homo sapiens
acagctttttggggtaaatattggacacacaccccctatcacacaaatcagttgccacttctaagaatcagaaagacttttaagcgcccctagaacacaggcgaacacatattcctgttaagggtcttagagttgtatcctcagtttcaactgggatggtgctgacaactcattccttcccctcctctgcagatgggcggcccctctacgtgctcaggctggggcagatggacaccaaaggcttggtgagagcgctcggggaggaagccctgctgagatacgttctctccataaatgaagaagggctaaggcgatgcgaagagaatacaaaagtctttggtcggcctatcagctcatggacctgcctggtggacttggaagggctgaacatgcgccacttgtggagacctggtgtgaaagcgctgctgcggatcatcgaggtggtggaggccaactaccctgagacactgggccgccttctcatcctgcgggcgcccagggtatttcctgtgctctggacgctggttagtccgttcattgatgacaacaccagaaggaagttcctcatttatgcaggaaatgactaccagggtcctggaggcctgctggattacatcgacaaagagattattccagatttcctgagtggggagtgcatgtgcgaagtgccagagggtggactggtccccaaatctctgtaccggactgcagaggagctggagaacgaagacctgaagctctggactgagaccatctaccagtctgcaagcgtcttcaaaggagccccacatgagattctcattcagattgtggatgcctcgtcagtcatcacttgggatttcgacgtgtgcaaaggggacattgtgtttaacatctatcactccaagaggtcgccacaaccacccaaaaaggactccctgggagcccacagcatcacctctccgggtgggaacaatgtgcagctcatagacaaagtctggcagctgggccgcgactacagcatggtggagtcgcctctgatctgcaaagaaggagaaagcgtgcagggttcccatgtgaccaggtggccgggcttctacatcctgcagtggaaattccacagcatgcctgcgtgcgccgccagcagccttccccgggtggacgacgtgcttgcgtccctgcaggtctcttcgcacaagtgtaaagtgatgtactacaccgaggtgatcggctcggaggatttcagaggttccatgacgagcctggagtccagccacagcggcttctcccagctgagtgccgccaccacctcctccagccagtcccactccagctccatgatctccaggtagtgccgcgctgcctgcacctagtgtgcagaggggacggccgcccctcctcggacagccagctgcacccgcccacccagcggcgacattgtacagactcctctcacctctagatagcaaatagctctcagatggtaaacgtagtcgtttgatcccaaaactaccttggcaggtagttttaactctgatcctaacttaactcaatagccatagattttgtatacgttgtgcacaaaatccaaccagagcgcaagggctctcttgaaagaaaagtagtttctgtaccaattaaaggattgacgtggtctcagatattgatgcaaaaaatttttccaacgaactccgcattgtccattagtgaatgaattcctgtgacatcctccagagatggcccctcctcacctgggacggaagctgccagctcgcttcccccaagctgcctcatggcccgcacgccgcctcacggcccccatgcttcccgccagtcaagatggtctgtggacttagggccagcccttgaggtccttatcctctgaggattcagaggttgcctgcggagtaccttgtcccagggccagacacacccacaccacccactgtctgcagtggggccgggggctcaggaggggctctcagggactcctggtgactccaggaaaatgctgccatcgttaaacattactttctctttcctccttttcaaatctttttgatactttttagagcaggatttttctgtatgtgaacttgggtgggggggttcttcccgtttccttccgtgcgtcgcccctctcacctgcagtcagctcccagcccagtgtaggccatctcctctgtgccctctggtggctcattgtcctcagagcccagacagttccagccactaggaggccgtcttggaaccagcaagtcgcatttgccacttgacactgtccatggggttttattagtagctaagcagcagctctcgcatccacttcagggtggcgtgtggcatgtaggagtcctgcttctttgtacatgggaattgtggactcatgcgtgtgtgtgtgtgcatgtgctgtgtgtgtgcatgtgtgcatgacggtgggggtgctggggggacggggtgagtggaaacttagtttgagtaatgaaggaatcttcacagaagcaaatcagaatatgggatttgtttgccttttacattttgtttaattcctgattttaaagcctgctctatctggtacaggcccttattttttcagctttttatgggaaaagcaggttatttgagaatctgtccagaagttgcataggggatggcctccacgataaggacatgcaacacgtgtttctgtgtgcagcagaggccgtgtttttcatgccaaaccccacgcggctgtcaactgtgtgcgtggtaggcatggagatcctggttgtgccgtctcagctccgctctgaaggcactgtgtgggtgctgcgtgactggagagctgtgtggaggccatgtgtgccccgtgcaaggatcaggagggcgggggagggaccgagcagccctcttgcccggtcgggtcagccctagtggctgcctgcacactgtagacgtcccagggcctgtgctgtgatcacctgcctttggaccacatttgtgtttgctcttagagatcgagctcctcagtggtacctgaagcctttgcttccggaaagcgcggtagggttcgtaggtagggctagtaggtagggttagtaggtagggctagtaggtagggctagtaggtagggttagtaggtagggttcgtaggtagggctggtaggtagggttagtaggtagggctagtaggtagggttcgtaggtagggctagtaggtagggttagtaggtagggctagtaggtagggctagtaggtagggttagtaggtagggttcgtaggtagggctggtaggtagggttagtaggtagggctagtaggtagggttcgtaggtagggctagtaggtagggctagtaggtagggttcgtaggtagggttagtaggtagggttagtaggtagggttcgtaggtagggttggtaggtagggttagtaggtagggctagtaggtagggctagtaggtagggctagtaggtagggttagtaggtagggctagtaggtagggttagtaggtagggttcgtaggtagggttagtaggtagggttcgtaggtagggttagtaggtagggctagtaggtagggctagtaggtagggttagtaggtagggctagtaggtagggctagtaggtagggctagtaggtagggctagtaggtagggttcgtaggtagggttcgtaggtagggttcgtaggtagggttagtagcgcgtctgtgctgcttccacctggtgcttcctgttcccaaatcacaagggcctgaaggtggtccctgctttctctttctctttctctgtgtctcagatggcgattttgctgacagctgccaagaaaatgcttcactcaacagtcctcatgtgcccagagatgtttatagaactgtttgaattgcagccatcccctgccccctcccaggctgaagatctgttctttttaagttgattcgggagtggcattcttttatacccaaagactgtagtgcatcttgaagagctcaaagcacatgaccgcacaaatgcttacagggtttcctcccgagtaatccaatctcactccccttgtaagggaattctggggcagctatggtttgagtatgcagtttgcatcgtgtttctacctttagtaccttgccactcttttaaaacgctgctgtcatttcccatttcttagtactaatgattctttgattctccctctattatgtcttaattcactttccttcctaaatttgttatttgcatatcaaattctgtaaatgttttgtaaacatattacctcacttggtaatacaatactgatagtctttaaaagatttttttattgttatcaataataaatgtgaactattta

SEQ ID NO: 388942 - DNA, 2993 bp, Homo sapiens
caagtgccgtcgccgcgccccttccccctcccgcctccccggccccctccccggaaccggcggtcgagctacggtcgcggagcagtggaaccgagactgccccgcggagccgccggtatgagcgcccctcgccaccccgtgtcccaggcccggcctttctgacaagagctagacttcgggctccttgaggatattcagttttgtatgtttgaatatcctctcaccatgttcagcataaagtaccattcttaatgattatcctcaacaagacaggtgtgagagggttgctgttgtattgcaatcatggtgcagaaataccagtccccagtgagggtgtacaaatacccctttgaattaattatggctgcctatgaaaggaggttccctacatgtcctttgattccgatgttcgtgggcagtgacactgtgaatgaattcaagagcgaagatggggctattcatgtcattgaaaggcgctgcaagctggatgtagatgcacccagactgctgaagaagattgcaggagttgattatgtttattttgtccagaaaaactcactgaattctcgggaacgtactttgcacattgaggcttataatgaaacgttttccaatcgggtcatcattaatgagcattgctgctacaccgttcaccctgaaaatgaagattggacctgttttgaacagtctgcaagtttagatattaaatctttctttggttttgaaagtacagtggaaaaaattgcaatgaaacaatataccagcaacattaaaaaaggaaaggaaatcatcgaatactaccttcgccaattagaagaagaaggcataacctttgtgccccgttggagtccgccttccatcacgccctcttcagagacatcttcatcatcctccaagaaacaagcagcgtccatggccgtcgtcatcccagaagctgccctcaaggaggggctgagtggtgatgccctcagcagccccagtgcacctgagcccgtggtgggcacccctgacgacaaactagatgccgactacatcaagagatacctgggcgatttgactccgctgcaggagagctgcctcattagacttcgccagtggctccaggagacccacaagggcaaaattccaaaagatgagcatattcttcggttcctccgtgcacgggattttaatattgacaaagccagagagatcatgtgtcagtctttgacgtggagaaagcagcatcaggtagactacattcttgaaacctggacccctcctcaggtccttcaggattactacgcgggaggctggcatcatcacgacaaagatgggcggcccctctacgtgctcaggctggggcagatggacaccaaaggcttggtgagagcgctcggggaggaagccctgctgagatacgttctctccataaatgaagaagggctaaggcgatgcgaagagaatacaaaagtctttggtcggcctatcagctcatggacctgcctggtggacttggaagggctgaacatgcgccacttgtggagacctggtgtgaaagcgctgctgcggatcatcgaggtggtggaggccaactaccctgagacactgggccgccttctcatcctgcgggcgcccagggtatttcctgtgctctggacgctggttagtccgttcattgatgacaacaccagaaggaagttcctcatttatgcaggaaatgactaccagggtcctggaggcctgctggattacatcgacaaagagattattccagatttcctgagtggggagtgcatgtgcgaagtgccagagggtggactggtccccaaatctctgtaccggactgcagaggagctggagaacgaagacctgaagctctggactgagaccatctaccagtctgcaagcgtcttcaaaggagccccacatgagattctcattcagattgtggatgcctcgtcagtcatcacttgggatttcgacgtgtgcaaaggggacattgtgtttaacatctatcactccaagaggtcgccacaaccacccaaaaaggactccctgggagcccacagcatcacctctccgggtgggaacaatgtgcagctcatagacaaagtctggcagctgggccgcgactacagcatggtggagtcgcctctgatctgcaaagaaggagaaagcgtgcagggttcccatgtgaccaggtggccgggcttctacatcctgcagtggaaattccacagcatgcctgcgtgcgccgccagcagccttccccgggtggacgacgtgcttgcgtccctgcaggtctcttcgcacaagtgtaaagtgatgtactacaccgaggtgatcggctcggaggatttcagaggttccatgacgagcctggagtccagccacagcggcttctcccagctgagtgccgccaccacctcctccagccagtcccactccagctccatgatctccagatggcgattttgctgacagctgccaagaaaatgcttcactcaacagtcctcatgtgcccagagatgtttatagaactgtttgaattgcagccatcccctgccccctcccaggctgaagatctgttctttttaagttgattcgggagtggcattcttttatacccaaagactgtagtgcatcttgaagagctcaaagcacatgaccgcacaaatgcttacagggtttcctcccgagtaatccaatctcactccccttgtaagggaattctggggcagctatggtttgagtatgcagtttgcatcgtgtttctacctttagtaccttgccactcttttaaaacgctgctgtcatttcccatttcttagtactaatgattctttgattctccctctattatgtcttaattcactttccttcctaaatttgttatttgcatatcaaattctgtaaatgttttgtaaacatattacctcacttggtaatacaatactgatagtctttaaaagatttttttattgttatcaataataaatgtgaactattta

SEQ ID NO: 388943 - DNA, 5455 bp, Homo sapiens
caagtgccgtcgccgcgccccttccccctcccgcctccccggccccctccccggaaccggcggtcgagctacggtcgcggagcagtggaaccgagactgccccgcggagccgccggtatgagcgcccctcgccaccccgtgtcccaggcccggcctttctgacaagagctagacttcgggctccttgaggatattcagttttgtatgtttgaatatcctctcaccatgttcagcataaagtaccattcttaatgattatcctcaacaagacaggtgtgagagggttgctgttgtattgcaatcatggtgcagaaataccagtccccagtgagggtgtacaaatacccctttgaattaattatggctgcctatgaaaggaggttccctacatgtcctttgattccgatgttcgtgggcagtgacactgtgaatgaattcaagagcgaagatggggctattcatgtcattgaaaggcgctgcaagctggatgtagatgcacccagactgctgaagaagattgcaggagttgattatgtttattttgtccagaaaaactcactgaattctcgggaacgtactttgcacattgaggcttataatgaaacgttttccaatcgggtcatcattaatgagcattgctgctacaccgttcaccctgaaaatgaagattggacctgttttgaacagtctgcaagtttagatattaaatctttctttggttttgaaagtacagtggaaaaaattgcaatgaaacaatataccagcaacattaaaaaaggaaaggaaatcatcgaatactaccttcgccaattagaagaagaaggcataacctttgtgccccgttggagtccgccttccatcacgccctcttcagagacatcttcatcatcctccaagaaacaagcagcgtccatggccgtcgtcatcccagaagctgccctcaaggaggggctgagtggtgatgccctcagcagccccagtgcacctgagcccgtggtgggcacccctgacgacaaactagatgccgactacatcaagagatacctgggcgatttgactccgctgcaggagagctgcctcattagacttcgccagtggctccaggagacccacaagggcaaaattccaaaagatgagcatattcttcggttcctccgtgcacgggattttaatattgacaaagccagagagatcatgtgtcagtctttgacgtggagaaagcagcatcaggtagactacattcttgaaacctggacccctcctcaggtccttcaggattactacgcgggaggctggcatcatcacgacaaagatgggcggcccctctacgtgctcaggctggggcagatggacaccaaaggcttggtgagagcgctcggggaggaagccctgctgagatacgttctctccataaatgaagaagggctaaggcgatgcgaagagaatacaaaagtctttggtcggcctatcagctcatggacctgcctggtggacttggaagggctgaacatgcgccacttgtggagacctggtgtgaaagcgctgctgcggatcatcgaggtggtggaggccaactaccctgagacactgggccgccttctcatcctgcgggcgcccagggtatttcctgtgctctggacgctggttagtccgttcattgatgacaacaccagaaggaagttcctcatttatgcaggaaatgactaccagggtcctggaggcctgctggattacatcgacaaagagattattccagatttcctgagtggggagtgcatgtgcgaagtgccagagggtggactggtccccaaatctctgtaccggactgcagaggagctggagaacgaagacctgaagctctggactgagaccatctaccagtctgcaagcgtcttcaaaggagccccacatgagattctcattcagattgtggatgcctcgtcagtcatcacttgggatttcgacgtgtgcaaaggggacattgtgtttaacatctatcactccaagaggtcgccacaaccacccaaaaaggactccctgggagcccacagcatcacctctccgggtgggaacaatgtgcagctcatagacaaagtctggcagctgggccgcgactacagcatggtggagtcgcctctgatctgcaaagaaggagaaagcgtgcagggttcccatgtgaccaggtggccgggcttctacatcctgcagtggaaattccacagcatgcctgcgtgcgccgccagcagccttccccgggtggacgacgtgcttgcgtccctgcaggtctcttcgcacaagtgtaaagtgatgtactacaccgaggtgatcggctcggaggatttcagaggttccatgacgagcctggagtccagccacagcggcttctcccagctgagtgccgccaccacctcctccagccagtcccactccagctccatgatctccaggtagtgccgcgctgcctgcacctagtgtgcagaggggacggccgcccctcctcggacagccagctgcacccgcccacccagcggcgacattgtacagactcctctcacctctagatagcaaatagctctcagatggtaaacgtagtcgtttgatcccaaaactaccttggcaggtagttttaactctgatcctaacttaactcaatagccatagattttgtatacgttgtgcacaaaatccaaccagagcgcaagggctctcttgaaagaaaagtagtttctgtaccaattaaaggattgacgtggtctcagatattgatgcaaaaaatttttccaacgaactccgcattgtccattagtgaatgaattcctgtgacatcctccagagatggcccctcctcacctgggacggaagctgccagctcgcttcccccaagctgcctcatggcccgcacgccgcctcacggcccccatgcttcccgccagtcaagatggtctgtggacttagggccagcccttgaggtccttatcctctgaggattcagaggttgcctgcggagtaccttgtcccagggccagacacacccacaccacccactgtctgcagtggggccgggggctcaggaggggctctcagggactcctggtgactccaggaaaatgctgccatcgttaaacattactttctctttcctccttttcaaatctttttgatactttttagagcaggatttttctgtatgtgaacttgggtgggggggttcttcccgtttccttccgtgcgtcgcccctctcacctgcagtcagctcccagcccagtgtaggccatctcctctgtgccctctggtggctcattgtcctcagagcccagacagttccagccactaggaggccgtcttggaaccagcaagtcgcatttgccacttgacactgtccatggggttttattagtagctaagcagcagctctcgcatccacttcagggtggcgtgtggcatgtaggagtcctgcttctttgtacatgggaattgtggactcatgcgtgtgtgtgtgtgcatgtgctgtgtgtgtgcatgtgtgcatgacggtgggggtgctggggggacggggtgagtggaaacttagtttgagtaatgaaggaatcttcacagaagcaaatcagaatatgggatttgtttgccttttacattttgtttaattcctgattttaaagcctgctctatctggtacaggcccttattttttcagctttttatgggaaaagcaggttatttgagaatctgtccagaagttgcataggggatggcctccacgataaggacatgcaacacgtgtttctgtgtgcagcagaggccgtgtttttcatgccaaaccccacgcggctgtcaactgtgtgcgtggtaggcatggagatcctggttgtgccgtctcagctccgctctgaaggcactgtgtgggtgctgcgtgactggagagctgtgtggaggccatgtgtgccccgtgcaaggatcaggagggcgggggagggaccgagcagccctcttgcccggtcgggtcagccctagtggctgcctgcacactgtagacgtcccagggcctgtgctgtgatcacctgcctttggaccacatttgtgtttgctcttagagatcgagctcctcagtggtacctgaagcctttgcttccggaaagcgcggtagggttcgtaggtagggctagtaggtagggttagtaggtagggctagtaggtagggctagtaggtagggttagtaggtagggttcgtaggtagggctggtaggtagggttagtaggtagggctagtaggtagggttcgtaggtagggctagtaggtagggttagtaggtagggctagtaggtagggctagtaggtagggttagtaggtagggttcgtaggtagggctggtaggtagggttagtaggtagggctagtaggtagggttcgtaggtagggctagtaggtagggctagtaggtagggttcgtaggtagggttagtaggtagggttagtaggtagggttcgtaggtagggttggtaggtagggttagtaggtagggctagtaggtagggctagtaggtagggctagtaggtagggttagtaggtagggctagtaggtagggttagtaggtagggttcgtaggtagggttagtaggtagggttcgtaggtagggttagtaggtagggctagtaggtagggctagtaggtagggttagtaggtagggctagtaggtagggctagtaggtagggctagtaggtagggctagtaggtagggttcgtaggtagggttcgtaggtagggttcgtaggtagggttagtagcgcgtctgtgctgcttccacctggtgcttcctgttcccaaatcacaagggcctgaaggtggtccctgctttctctttctctttctctgtgtctcagatggcgattttgctgacagctgccaagaaaatgcttcactcaacagtcctcatgtgcccagagatgtttatagaactgtttgaattgcagccatcccctgccccctcccaggctgaagatctgttctttttaagttgattcgggagtggcattcttttatacccaaagactgtagtgcatcttgaagagctcaaagcacatgaccgcacaaatgcttacagggtttcctcccgagtaatccaatctcactccccttgtaagggaattctggggcagctatggtttgagtatgcagtttgcatcgtgtttctacctttagtaccttgccactcttttaaaacgctgctgtcatttcccatttcttagtactaatgattctttgattctccctctattatgtcttaattcactttccttcctaaatttgttatttgcatatcaaattctgtaaatgttttgtaaacatattacctcacttggtaatacaatactgatagtctttaaaagatttttttattgttatcaataataaatgtgaactatttaaagaaaaaagaatgtctttttc

SEQ ID NO: 388944 - DNA, 5113 bp, Homo sapiens
caagtgccgtcgccgcgccccttccccctcccgcctccccggccccctccccggaaccggcggtcgagctacggtcgcggagcagtggaaccgagactgccccgcggagccgccggtatgagcgcccctcgccaccccgtgtcccaggcccggcctttctgacaagagctagacttcgggctccttgaggatattcagttttgtatgtttgaatatcctctcaccatgttcagcataaagtaccattcttaatgattatcctcaacaagacaggtgtgagagggttgctgttgtattgcaatcatggtgcagaaataccagtccccagtgagggtgtacaaatacccctttgaattaattatggctgcctatgaaaggaggttccctacatgtcctttgattccgatgttcgtgggcagtgacactgtgaatgaattcaagagcgaagatggggctattcatgtcattgaaaggcgctgcaagctggatgtagatgcacccagactgctgaagaagattgcaggagttgattatgtttattttgtccagaaaaactcactgaattctcgggaacgtactttgcacattgaggcttataatgaaacgttttccaatcgggtcatcattaatgagcattgctgctacaccgttcaccctgaaaatgaagattggacctgttttgaacagtctgcaagtttagatattaaatctttctttggttttgaaagtacagtggaaaaaattgcaatgaaacaatataccagcaacattaaaaaaggaaaggaaatcatcgaatactaccttcgccaattagaagaagaaggcataacctttgtgccccgttggagtccgccttccatcacgccctcttcagagacatcttcatcatcctccaagaaacaagcagcgtccatggccgtcgtcatcccagaagctgccctcaaggaggggctgagtggtgatgccctcagcagccccagtgcacctgagcccgtggtgggcacccctgacgacaaactagatgccgactacatcaagagatacctgggcgatttgactccgctgcaggagagctgcctcattagacttcgccagtggctccaggagacccacaagggcaaaattccaaaagatgagcatattcttcggttcctccgtgcacgggattttaatattgacaaagccagagagatcatgtgtcagtctttgacgtggagaaagcagcatcaggtagactacattcttgaaacctggacccctcctcaggtccttcaggattactacgcgggaggctggcatcatcacgacaaagatgggcggcccctctacgtgctcaggctggggcagatggacaccaaaggcttggtgagagcgctcggggaggaagccctgctgagatacgttctctccataaatgaagaagggctaaggcgatgcgaagagaatacaaaagtctttggtcggcctatcagctcatggacctgcctggtggacttggaagggctgaacatgcgccacttgtggagacctggtgtgaaagcgctgctgcggatcatcgaggtggtggaggccaactaccctgagacactgggccgccttctcatcctgcgggcgcccagggtatttcctgtgctctggacgctggttagtccgttcattgatgacaacaccagaaggaagttcctcatttatgcaggaaatgactaccagggtcctggaggcctgctggattacatcgacaaagagattattccagatttcctgagtggggagtgcatgtgcgaagtgccagagggtggactggtccccaaatctctgtaccggactgcagaggagctggagaacgaagacctgaagctctggactgagaccatctaccagtctgcaagcgtcttcaaaggagccccacatgagattctcattcagattgtggatgcctcgtcagtcatcacttgggatttcgacgtgtgcaaaggggacattgtgtttaacatctatcactccaagaggtcgccacaaccacccaaaaaggactccctgggagcccacagcatcacctctccgggtgggaacaatgtgcagctcatagacaaagtctggcagctgggccgcgactacagcatggtggagtcgcctctgatctgcaaagaaggagaaagcgtgcagggttcccatgtgaccaggtggccgggcttctacatcctgcagtggaaattccacagcatgcctgcgtgcgccgccagcagccttccccgggtggacgacgtgcttgcgtccctgcaggtctcttcgcacaagtgtaaagtgatgtactacaccgaggtgatcggctcggaggatttcagaggttccatgacgagcctggagtccagccacagcggcttctcccagctgagtgccgccaccacctcctccagccagtcccactccagctccatgatctccaggtagtgccgcgctgcctgcacctagtgtgcagaggggacggccgcccctcctcggacagccagctgcacccgcccacccagcggcgacattgtacagactcctctcacctctagatagcaaatagctctcagatggtaaacgtagtcgtttgatcccaaaactaccttggcaggtagttttaactctgatcctaacttaactcaatagccatagattttgtatacgttgtgcacaaaatccaaccagagcgcaagggctctcttgaaagaaaagtagtttctgtaccaattaaaggattgacgtggtctcagatattgatgcaaaaaatttttccaacgaactccgcattgtccattagtgaatgaattcctgtgacatcctccagagatggcccctcctcacctgggacggaagctgccagctcgcttcccccaagctgcctcatggcccgcacgccgcctcacggcccccatgcttcccgccagtcaagatggtctgtggacttagggccagcccttgaggtccttatcctctgaggattcagaggttgcctgcggagtaccttgtcccagggccagacacacccacaccacccactgtctgcagtggggccgggggctcaggaggggctctcagggactcctggtgactccaggaaaatgctgccatcgttaaacattactttctctttcctccttttcaaatctttttgatactttttagagcaggatttttctgtatgtgaacttgggtgggggggttcttcccgtttccttccgtgcgtcgcccctctcacctgcagtcagctcccagcccagtgtaggccatctcctctgtgccctctggtggctcattgtcctcagagcccagacagttccagccactaggaggccgtcttggaaccagcaagtcgcatttgccacttgacactgtccatggggttttattagtagctaagcagcagctctcgcatccacttcagggtggcgtgtggcatgtaggagtcctgcttctttgtacatgggaattgtggactcatgcgtgtgtgtgtgtgcatgtgctgtgtgtgtgcatgtgtgcatgacggtgggggtgctggggggacggggtgagtggaaacttagtttgagtaatgaaggaatcttcacagaagcaaatcagaatatgggatttgtttgccttttacattttgtttaattcctgattttaaagcctgctctatctggtacaggcccttattttttcagctttttatgggaaaagcaggttatttgagaatctgtccagaagttgcataggggatggcctccacgataaggacatgcaacacgtgtttctgtgtgcagcagaggccgtgtttttcatgccaaaccccacgcggctgtcaactgtgtgcgtggtaggcatggagatcctggttgtgccgtctcagctccgctctgaaggcactgtgtgggtgctgcgtgactggagagctgtgtggaggccatgtgtgccccgtgcaaggatcaggagggcgggggagggaccgagcagccctcttgcccggtcgggtcagccctagtggctgcctgcacactgtagacgtcccagggcctgtgctgtgatcacctgcctttggaccacatttgtgtttgctcttagagatcgagctcctcagtggtacctgaagcctttgcttccggaaagcgcggtagggttcgtaggtagggctagtaggtagggttagtaggtagggctagtaggtagggctagtaggtagggttagtaggtagggttcgtaggtagggctggtaggtagggttagtaggtagggctagtaggtagggttcgtaggtagggctagtaggtagggttagtaggtagggctagtaggtagggctagtaggtagggttagtaggtagggttcgtaggtagggctggtaggtagggttagtaggtagggctagtaggtagggttcgtaggtagggctagtaggtagggctagtaggtagggttcgtaggtagggttagtaggtagggttagtaggtagggttcgtaggtagggttggtaggtagggttagtaggtagggctagtaggtagggctagtaggtagggctagtaggtagggttagtaggtagggctagtaggtagggttagtaggtagggttcgtaggtagggttagtaggtagggttcgtaggtagggttagtaggtagggctagtaggtagggctagtaggtagggttagtaggtagggctagtaggtagggctagtaggtagggctagtaggtagggctagtaggtagggttcgtaggtagggttcgtaggtagggttcgtaggtagggttagtagcgcgtctgtgctgcttccacctggtgcttcctgttcccaaatcacaagggcctgaaggtggtccctgctttctctttctctttctctgtgtctcagatggcgattttgctgacagctgccaagaaaatgcttcactcaacagtcctcatgtgcccagagatgtttatagaactgtttgaattgcagccatcccctgccccctcccaggctgaagatctgttctttttaagttgattcgggagtggcattcttttatacccaaagactgtagtgcatcttgaagagctcaaacaacgcgactgaggggtcctctagagtcaat

SEQ ID NO: 388945 - DNA, 2034 bp, Homo sapiens
caagtgccgtcgccgcgccccttccccctcccgcctccccggccccctccccggaaccggcggtcgagctacggtcgcggagcagtggaaccgagactgccccgcggagccgccggtatgagcgcccctcgccaccccgtgtcccaggcccggcctttctgacaagagctagacttcgggctccttgaggatattcagttttgtatgtttgaatatcctctcaccatgttcagcataaagtaccattcttaatgattatcctcaacaagacaggtgtgagagggttgctgttgtattgcaatcatggtgcagaaataccagtccccagtgagggtgtacaaatacccctttgaattaattatggctgcctatgaaaggaggttccctacatgtcctttgattccgatgttcgtgggcagtgacactgtgaatgaattcaagagcgaagatggggctattcatgtcattgaaaggcgctgcaagctggatgtagatgcacccagactgctgaagaagattgcaggagttgattatgtttattttgtccagaaaaactcactgaattctcgggaacgtactttgcacattgaggcttataatgaaacgttttccaatcgggtcatcattaatgagcattgctgctacaccgttcaccctgaaaatgaagattggacctgttttgaacagtctgcaagtttagatattaaatctttctttggttttgaaagtacagtggaaaaaattgcaatgaaacaatataccagcaacattaaaaaaggaaaggaaatcatcgaatactaccttcgccaattagaagaagaaggcataacctttgtgccccgttggagtccgccttccatcacgccctcttcagagacatcttcatcatcctccaagaaacaagcagcgtccatggccgtcgtcatcccagaagctgccctcaaggaggggctgagtggtgatgccctcagcagccccagtgcacctgagcccgtggtgggcacccctgacgacaaactagatgccgactacatcaagagatacctgggcgatttgactccgctgcaggagagctgcctcattagacttcgccagtggctccaggagacccacaagggcaaaattccaaaagatgagcatattcttcggttcctccgtgcacgggattttaatattgacaaagccagagagatcatgtgtcagtctttgacgtggagaaagcagcatcaggtagactacattcttgaaacctggacccctcctcaggtccttcaggattactacgcgggaggctggcatcatcacgacaaagatgggcggcccctctacgtgctcaggctggggcagatggacaccaaaggcttggtgagagcgctcggggaggaagccctgctgagatacgttctctccataaatgaagaagggctaaggcgatgcgaagagaatacaaaagtctttggtcggcctatcagctcatggacctgcctggtggacttggaagggctgaacatgcgccacttgtggagacctggtgtgaaagcgctgctgcggatcatcgaggtggtggaggccaactaccctgagacactgggccgccttctcatcctgcgggcgcccagggtatttcctgtgctctggacgctggttagtccgttcattgatgacaacaccagaaggaagttcctcatttatgcaggaaatgactaccagggtcctggaggcctgctggattacatcgacaaagagattattccagatttcctgagtggggagtgcatgtgcgaagtgccagagggtggactggtccccaaatctctgtaccggactgcagaggagctggagaacgaagacctgaagctctggactgagaccatctaccagtctgcaagcgtcttcaaaggagccccacatgagattctcattcagattgtggatgcctcgtcagtcatcacttgggatttcgacgtgtgcaaaggggacattgtgtttaacatctatcactccctctccctaagaccctagggatcctctaga

SEQ ID NO: 388946 - DNA, 685 bp, Homo sapiens
gtatgaggctgatagcccctttgttttggctaatttctcctatttggaccgggtatttttacccaatgcctgtacctccattgtatctaggaagtaactaaattgcttttgattttacaggcaggagggtcttgccttgtctcagatgagactttggacttggacttttgagttaatgctagaatgagttaagaccgtgggggactgttggaaggacatgattgtgttttgaattatgaggacatgagatttggaaagggccggggcagaatgatatggtctgattgtttcctcatccacatctcatcttgaattgtagttcccataatccccacatgttggtggagataatttaatcacggaggtgttttgccccatcctgttctcgtgatagtaaaaacactatttcacgagatctgttgggttttttgttggtttttttttttgagacagagtctcgctcttttgccaggctggagtgccatggtgtgatctcagctcactgcaacctctgactccctggttcaagttattcctgcctcagcctcccgagtagctgggattacaggcacgtgccaccacgtccagctaatttttatatttttagtagagacagggtttcaccatgttagccaggatggtctcaatctgctgaccttgtgatccgcccacctcgacttcccaa

SEQ ID NO: 388947 - DNA, 865 bp, Homo sapiens
aaccactgtgcccagccggcaccaaaacttgcacctatcctaaatatggagcttcagtgtgcggccgggaacttcctgtgccccgctggcgccttgtccttcaacgccttcaagaccgtgatggacatcgataccagcggcaccttcaatgtgtctcgtgtgctctatgagaagttcttccgggtgggtgcctcgtgcgctctgtgagaagttcttccgggaccacggaggggtgatcgtgaacatcactgccaccctggggaaccgggggcaggcgctccaggtgcatgcaggctccgccaaggccgctgtggacgcgatgacgcggcacttggctgtggagtggggtccccaaaacatccgcgtcaacagcctcgcccctggccccatcagtggcacagaggggctccggcgactgggaatcttccggccgctgcttcctgccgcctcactcagccaggtggagagcaccaatctgaaccagcaatgcctgcagcccagcccctcctctgaacactcagctattactgcgctttccctccccacgcccatggtcaagggtgtcctgcctgcctgggtccagggcctgagggagccacatggatcccgagacttgtgttctcttggctgaaaacactgaggtgctcccatctgtgcgtggcccatgagctgggatggtcctccagctgcccacaaggtccgcccctctgtctctgcaccacctgtttgcataaacacactttgctacaatcttgctagtgcgttttcttaaaagataatctatttactgtaaaaataaattggactttgcaaaagcttttagaaggaaaagaaagaggattaaagagaattgctggtgatccta

SEQ ID NO: 388948 - DNA, 1524 bp, Homo sapiens
cggggctcccggttccaggcgagttcgcagctgcgcgccgggtcctggaggccgaggccgctcccgcccgttgtccccgcagtccccgacgggagcgccatggcccagccgccgcccgacgtggagggggacgactgtctccccgcgtaccgccacctcttctgcccggacctgctgcgggacaaagtggccttcatcacaggaggcggctctgggattgggttccggattgctgagattttcatgcggccgccaggaagctggctggggccaccggccggcgctgcctccctctctctatggacgtccgagcgcccccagctgtcatggccgccgtggaccaggctctgaaggagtttggcagaatcgacattctcattaactgtgcggccgggaacttcctgtgccccgctggcgccttgtccttcaacgccttcaagaccgtgatggacatcgataccagcggcaccttcaatgtgtctcgtgtgctctatgagaagttcttccgggaccacggaggggtgatcgtgaacatcactgccaccctggggaaccgggggcaggcgctccaggtgcatgcaggctccgccaaggccgctgtggacgcgatgacgcggcacttggctgtggagtggggtccccaaaacatccgcgtcaacagcctcgcccctggccccatcagtggcacagaggggctccggcgactgggtggccctcaggccagcctgagcaccaaggtcactgccagcccgctgcagaggctggggaacaagaccgagatcgcccacagcgtgctctacctggccagccctctggcttcctacgtgacgggggccgtgctggtggccgatggcggggcatggttgacgttcccaaacggtgtcaaagggctgccggatttcgcatccttctctgctaagctctaggaatcttccggccgctgcttcctgccgcctcactcagccaggtggagagcaccaatctgaaccagcaatgcctgcagcccagcccctcctctgaacactcagctattactgcgctttccctccccacggccccaactccagggcaggagcaactggacagtgggcctggcccgtggagctgccacgcaggtgcctgagggccaggtgccacgcaggtgtctgaggaccaggtgccacgcaggtggtgggggtacagacaagatgctgggatgtcccctgccccatggtcaagggtgtcctgcctgcctgggtccagggcctgagggagccacatggatcccgagacttgtgttctcttggctgaaaacactgaggtgctcccatctgtgcgtggcccatgagctgggatggtcctccagctgcccacaaggtccgcccctctgtctctgcaccacctgtttgcataaacacactttgctacaatcttgctagtgcgttttcttaaaagataatctatttactgtaaaaataaattggactttgcaaaagcttttagaaggaaaagaaagaggattaaagagaattgctggtgatccta

SEQ ID NO: 388949 - DNA, 956 bp, Homo sapiens
agcggccctttcatatccaactttcttctgtgcagacgcgatgacgcggcacttggctgtggagtggggtccccaaaacatccgcgtcaacagcctcgcccctggccccatcagtggcacagaggggctccggcgactgggtggccctcaggccagcctgagcaccaaggtcactgccagcccgctgcagaggctggggaacaagaccgagatcgcccacagcgtgctctacctggccagccctctggcttcctacgtgacgggggccgtgctggtggccgatggcggggcatggttgacgttcccaaacggtgtcaaagggctgccggatttcgcatccttctctgctaagctctaggaatcttccggccgctgcttcctgccgcctcactcagccaggtggagagcaccaatctgaaccagcaatgcctgcagcccagcccctcctctgaacactcagctattactgcgctttccctccccacggccccaactccagggcaggagcaactggacagtgggcctggcccgtggagctgccacgcaggtgcctgagggccaggtgccacgcaggtgtctgaggaccaggtgccacgcaggtggtgggggtacagacaagatgctgggatgtcccctgccccatggtcaagggtgtcctgcctgcctgggtccagggcctgagggagccacatggatcccgagacttgtgttctcttggctgaaaacactgaggtgctcccatctgtgcgtggcccatgagctgggatggtcctccagctgcccacaaggtccgcccctctgtctctgcaccacctgtttgcataaacacactttgctacaatcttgctagtgcgttttcttaaaagataatctatttactgtaaaaataaattggactttgcaaaagcttttagaaggaaaagaaagaggattaaagagaattgctggtgatccta

SEQ ID NO: 388950 - DNA, 1496 bp, Homo sapiens
cggggctcccggttccaggcgagttcgcagctgcgcgccgggtcctggaggccgaggccgctcccgcccgttgtccccgcagtccccgacgggagcgccatggcccagccgccgcccgacgtggagggggacgactgtctccccgcgtaccgccacctcttctgcccggacctgctgcgggacaaagtggccttcatcacaggaggcggctctgggattgggttccggattgctgagattttcatgcggcacggctgccatacggtgattgccagtaggagcctgccgcgagtgctgacggctgtgcttccccagagtggggtccagcagcaaacccagggtccccgaggaacccggaagcatcgtcctctgcagattccaaaggccttttctccaggccgaggctgcagggctgctgtctgcctctttacctggcttgccgccaggaagctggctggggccaccggccggcgctgcctccctctctctatggacgtccgagcgcccccagctgtcatggccgccgtggaccaggctctgaaggagtttggcagaatcgacattctcattaactgtgcggccgggaacttcctgtgccccgctggcgccttgtccttcaacgccttcaagaccgtgatggacatcgataccagcggcaccttcaatgtgtctcgtgtgctctatgagaagttcttccgggaccacggaggggtgatcgtgaacatcactgccaccctggggaaccgggggcaggcgctccaggtgcatgcaggctccgccaaggccgctgtggacgcgatgacgcggcacttggctgtggagtggggtccccaaaacatccgcgtcaacagcctcgcccctggccccatcagtggcacagaggggctccggcgactgggaatcttccggccgctgcttcctgccgcctcactcagccaggtggagagcaccaatctgaaccagcaatgcctgcagcccagcccctcctctgaacactcagctattactgcgctttccctccccacggccccaactccagggcaggagcaactggacagtgggcctggcccgtggagctgccacgcaggtgcctgagggccaggtgccacgcaggtgtctgaggaccaggtgccacgcaggtggtgggggtacagacaagatgctgggatgtcccctgccccatggtcaagggtgtcctgcctgcctgggtccagggcctgagggagccacatggatcccgagacttgtgttctcttggctgaaaacactgaggtgctcccatctgtgcgtggcccatgagctgggatggtcctccagctgcccacaaggtccgcccctctgtctctgcaccacctgtttgcataaacacactttgctacaatcttgctagtgcgttttcttaaaagataatctatttactgtaaaaataaattggactttgcaaaagcttttagaaggaaaagaaagaggattaaagagaattgctggtgatccta

SEQ ID NO: 388951 - DNA, 727 bp, Homo sapiens
cacggaggggtgatcgtgaacatcactgccaccctggggaaccgggggcaggcgctccaggtgcatgcaggctccgccaaggccgctgtgggtatgaccacccccccccgcccaggtttgcccacgtgggtccccaatgggccgtctgcttccatcccaggaggccagcagtctccacttgaagctgagcccagctgcaggcagcgagacctggccttggccctgcgccctcgcagagggcagagcggccctttcatatccaactttcttctgtgcagacgcgatgacgcggcacttggctgtggagtggggtccccaaaacatccgcgtcaacagcctcgcccctggccccatcagtggcacagaggggctccggcgactgggtaaggctctcagggagcccaggcctcccacagatcctctcctggggcacagggtgcccatgaagcttccagaaccttggcagggtgtatgttgaaaagccctgtgctggttccatggtggcaactatgttctgtgcctggcctgatcctgctccatgctaggccttggtgacactgactgtgtccttgctgttcccagatgcctctcagggaatgagctgggggagaggggagggtgctgggtcttggggctcacggggcctgagccttctgctgccctccaggtggccctcaggccagcctgagcaccaaggtcactgccagcccgctgcagaggctgggga

SEQ ID NO: 388952 - DNA, 1576 bp, Homo sapiens
cggggctcccggttccaggcgagttcgcagctgcgcgccgggtcctggaggccgaggccgctcccgcccgttgtccccgcagtccccgacgggagcgccatggcccagccgccgcccgacgtggagggggacgactgtctccccgcgtaccgccacctcttctgcccggacctgctgcgggacaaagtggccttcatcacaggaggcggctctgggattgggttccggattgctgagattttcatgcggcacggctgccatacggtgattgccagtaggagcctgccgcgagtgctgacggccgccaggaagctggctggggccaccggccggcgctgcctccctctctctatggacgtccgagcgcccccagctgtcatggccgccgtggaccaggctctgaaggagtttggcagaatcgacattctcattaactgtgcggccgggaacttcctgtgccccgctggcgccttgtccttcaacgccttcaagaccgtgatggacatcgataccagcggcaccttcaatgtgtctcgtgtgctctatgagaagttcttccgggaccacggaggggtgatcgtgaacatcactgccaccctggggaaccgggggcaggcgctccaggtgcatgcaggctccgccaaggccgctgtggacgcgatgacgcggcacttggctgtggagtggggtccccaaaacatccgcgtcaacagcctcgcccctggccccatcagtggcacagaggggctccggcgactgggtggccctcaggccagcctgagcaccaaggtcactgccagcccgctgcagaggctggggaacaagaccgagatcgcccacagcgtgctctacctggccagccctctggcttcctacgtgacgggggccgtgctggtggccgatggcggggcatggttgacgttcccaaacggtgtcaaagggctgccggatttcgcatccttctctgctaagctctaggaatcttccggccgctgcttcctgccgcctcactcagccaggtggagagcaccaatctgaaccagcaatgcctgcagcccagcccctcctctgaacactcagctattactgcgctttccctccccacggccccaactccagggcaggagcaactggacagtgggcctggcccgtggagctgccacgcaggtgcctgagggccaggtgccacgcaggtgtctgaggaccaggtgccacgcaggtggtgggggtacagacaagatgctgggatgtcccctgccccatggtcaagggtgtcctgcctgcctgggtccagggcctgagggagccacatggatcccgagacttgtgttctcttggctgaaaacactgaggtgctcccatctgtgcgtggcccatgagctgggatggtcctccagctgcccacaaggtccgcccctctgtctctgcaccacctgtttgcataaacacactttgctacaatcttgctagtgcgttttcttaaaagataatctatttactgtaaaaataaattggactttgcaaaagcttttagaaggaaaagaaagaggattaaagagaattgctggtgatccta

SEQ ID NO: 388953 - DNA, 1488 bp, Homo sapiens
ggccaagttaggccagaatctgactgggacgtcaggccccaagtccccggccccgccgctgcccggcccccccagctgccacctcacaggacgatccatgtcccagggctccctccatcggctctgggattgggttccggattgctgagattttcatgcggcacggctgccatacggtgattgccagtaggagcctgccgcgagtgctgacggccgccaggaagctggctggggccaccggccggcgctgcctccctctctctatggacgtccgagcgcccccagctgtcatggccgccgtggaccaggctctgaaggagtttggcagaatcgacattctcattaactgtgcggccgggaacttcctgtgccccgctggcgccttgtccttcaacgccttcaagaccgtgatggacatcgataccagcggcaccttcaatgtgtctcgtgtgctctatgagaagttcttccgggaccacggaggggtgatcgtgaacatcactgccaccctggggaaccgggggcaggcgctccaggtgcatgcaggctccgccaaggccgctgtggacgcgatgacgcggcacttggctgtggagtggggtccccaaaacatccgcgtcaacagcctcgcccctggccccatcagtggcacagaggggctccggcgactgggtggccctcaggccagcctgagcaccaaggtcactgccagcccgctgcagaggctggggaacaagaccgagatcgcccacagcgtgctctacctggccagccctctggcttcctacgtgacgggggccgtgctggtggccgatggcggggcatggttgacgttcccaaacggtgtcaaagggctgccggatttcgcatccttctctgctaagctctaggaatcttccggccgctgcttcctgccgcctcactcagccaggtggagagcaccaatctgaaccagcaatgcctgcagcccagcccctcctctgaacactcagctattactgcgctttccctccccacggccccaactccagggcaggagcaactggacagtgggcctggcccgtggagctgccacgcaggtgcctgagggccaggtgccacgcaggtgtctgaggaccaggtgccacgcaggtggtgggggtacagacaagatgctgggatgtcccctgccccatggtcaagggtgtcctgcctgcctgggtccagggcctgagggagccacatggatcccgagacttgtgttctcttggctgaaaacactgaggtgctcccatctgtgcgtggcccatgagctgggatggtcctccagctgcccacaaggtccgcccctctgtctctgcaccacctgtttgcataaacacactttgctacaatcttgctagtgcgttttcttaaaagataatctatttactgtaaaaataaattggactttgcaaaagcttttagaaggaaaagaaagaggattaaagagaattgctggtgatccta

SEQ ID NO: 388954 - DNA, 1522 bp, Homo sapiens
ggccaagttaggccagaatctgactgggacgtcaggccccaagtccccggccccgccgctgcccggcccccccagctgccacctcacaggacgatccatgtcccagggctccctccatcggctctgggattgggttccggattgctgagattttcatgcggcacggctgccatacggtgattgccagtaggagcctgccgcgagtgctgacggccgccaggaagctggctggggccaccggccggcgctgcctccctctctctatggacgtccgagcgcccccagctgtcatggccgccgtggaccaggctctgaaggagtttggcagaatcgacattctcattaactgctccagcagctcctgcggtctcccattctgcaggtgcggccgggaacttcctgtgccccgctggcgccttgtccttcaacgccttcaagaccgtgatggacatcgataccagcggcaccttcaatgtgtctcgtgtgctctatgagaagttcttccgggaccacggaggggtgatcgtgaacatcactgccaccctggggaaccgggggcaggcgctccaggtgcatgcaggctccgccaaggccgctgtggacgcgatgacgcggcacttggctgtggagtggggtccccaaaacatccgcgtcaacagcctcgcccctggccccatcagtggcacagaggggctccggcgactgggtggccctcaggccagcctgagcaccaaggtcactgccagcccgctgcagaggctggggaacaagaccgagatcgcccacagcgtgctctacctggccagccctctggcttcctacgtgacgggggccgtgctggtggccgatggcggggcatggttgacgttcccaaacggtgtcaaagggctgccggatttcgcatccttctctgctaagctctaggaatcttccggccgctgcttcctgccgcctcactcagccaggtggagagcaccaatctgaaccagcaatgcctgcagcccagcccctcctctgaacactcagctattactgcgctttccctccccacggccccaactccagggcaggagcaactggacagtgggcctggcccgtggagctgccacgcaggtgcctgagggccaggtgccacgcaggtgtctgaggaccaggtgccacgcaggtggtgggggtacagacaagatgctgggatgtcccctgccccatggtcaagggtgtcctgcctgcctgggtccagggcctgagggagccacatggatcccgagacttgtgttctcttggctgaaaacactgaggtgctcccatctgtgcgtggcccatgagctgggatggtcctccagctgcccacaaggtccgcccctctgtctctgcaccacctgtttgcataaacacactttgctacaatcttgctagtgcgttttcttaaaagataatctatttactgtaaaaataaattggactttgcaaaagcttttagaaggaaaagaaagaggattaaagagaattgctggtgatccta

SEQ ID NO: 388955 - DNA, 1358 bp, Homo sapiens
cggggctcccggttccaggcgagttcgcagctgcgcgccgggtcctggaggccgaggccgctcccgcccgttgtccccgcagtccccgacgggagcgccatggcccagccgccgcccgacgtggagggggacgactgtctccccgcgtaccgccacctcttctgcccggacctgctgcgggacaaagtggccttcatcacaggaggcggctctgggattgggttccggattgctgagattttcatgcggcacggctgccatacggtgattgccagtaggagcctgccgcgagtgctgacggccgccaggaagctggctggggccaccggccggcgctgcctccctctctctatggacgtccgagcgcccccagctgtcatggccgccgtggaccaggctctgaaggagtttggcagaatcgacattctcattaactgtgcggccgggaacttcctgtgccccgctggcgccttgtccttcaacgccttcaagaccgtgatggacatcgataccagcggcaccttcaatgtgtctcgtgtgctctatgagaagttcttccgggaccacggaggggtgatcgtgaacatcactgccaccctggggaaccgggggcaggcgctccaggtgcatgcaggctccgccaaggccgctgtggacgcgatgacgcggcacttggctgtggagtggggtccccaaaacatccgcgtcaacagcctcgcccctggccccatcagtggcacagaggggctccggcgactgggaatcttccggccgctgcttcctgccgcctcactcagccaggtggagagcaccaatctgaaccagcaatgcctgcagcccagcccctcctctgaacactcagctattactgcgctttccctccccacggccccaactccagggcaggagcaactggacagtgggcctggcccgtggagctgccacgcaggtgcctgagggccaggtgccacgcaggtgtctgaggaccaggtgccacgcaggtggtgggggtacagacaagatgctgggatgtcccctgccccatggtcaagggtgtcctgcctgcctgggtccagggcctgagggagccacatggatcccgagacttgtgttctcttggctgaaaacactgaggtgctcccatctgtgcgtggcccatgagctgggatggtcctccagctgcccacaaggtccgcccctctgtctctgcaccacctgtttgcataaacacactttgctacaatcttgctagtgcgttttcttaaaagataatctatttactgtaaaaataaattggactttgcaaaagcttttagaaggaaaagaaagaggattaaagagaattgctggtgatccta

SEQ ID NO: 388956 - DNA, 1490 bp, Homo sapiens
cggggctcccggttccaggcgagttcgcagctgcgcgccgggtcctggaggccgaggccgctcccgcccgttgtccccgcagtccccgacgggagcgccatggcccagccgccgcccgacgtggagggggacgactgtctccccgcgtaccgccacctcttctgcccggacctgctgcgggacaaagtggccttcatcacaggaggcggctctgggattgggttccggattgctgagattttcatgcggcacggctgccatacggtgattgccagtaggagcctgccgcgagtgctgacggccgccaggaagctggctggggccaccggccggcgctgcctccctctctctatggacgtccgagcgcccccagctgtcatggccgccgtggaccaggctctgaaggagtttggcagaatcgacattctcattaactgtgcggccgggaacttcctgtgccccgctggcgccttgtccttcaacgccttcaagaccgtgatggacatcgataccagcggcaccttcaatgtgtctcgtgtgctctatgagaagttcttccgggaccacggaggggtgatcgtgaacatcactgccaccctggggaaccgggggcaggcgctccaggtgcatgcaggctccgccaaggccgctgtggacgcgatgacgcggcacttggctgtggagtggggtccccaaaacatccgcgtcaacagcctcgcccctggccccatcagtggcacagaggggctccggcgactgggtggccctcaggccagcctgagcaccaaggtcactgccagcccgctgcagaggctggggaacaagaccgagatcgcccacagcgtgctctacctggccagccctctggcttcctacgtgacgggggccgtgctggtggccgatggcggggcatggttgacgttcccaaacggtgtcaaagggctgccggatttcgcatccttctctgctaagctctaggaatcttccggccgctgcttcctgccgcctcactcagccaggtggagagcaccaatctgaaccagcaatgcctgcagcccagcccctcctctgaacactcagctattactgcgctttccctccccacggccccaactccagggcaggagcaactggacagtgggcctggcccgtggagctgccacgcaggtgcctgagggccaggtgccacgcaggtgtctgaggaccagggcctgagggagccacatggatcccgagacttgtgttctcttggctgaaaacactgaggtgctcccatctgtgcgtggcccatgagctgggatggtcctccagctgcccacaaggtccgcccctctgtctctgcaccacctgtttgcataaacacactttgctacaatcttgctagtgcgttttcttaaaagataatctatttactgtaaaaataaattggactttgcaaaagcttttagaaggaaaagaaagaggattaaagagaattgctggtgatccta

SEQ ID NO: 388957 - DNA, 570 bp, Homo sapiens
cgatttcaagccctctatctactcttcgactatcccaactccaacaactcctcgatcctattccttgaatccactgaccccatgacctcttactgaccctcagctccttcatgcctcctggctccttgcctggcttagaccacatggtctatcctcaatcctcacatcgattcttctgcgcaatgctcaactcccttatgcctcctccctccactgtactcacctggcaaaatcctaatcccaggttaaatccaactccctgccctctcctgccctctcctgccctacacttaggctgccgaaagcagaattccttcagagcaccagctcagctccctatccagtcgtttttgcttgaaccacctggaactgggcttttattctcaccatttcactcatacagctcttatcaaagtcaccaacgatcgccccgctaccaagcccacagtgaaacccgtctgtttcttgctccagctttagcagcatctgacatagatatcactctgctttgaaacatgagcttccttgtccgggcgcggtggctcacacctgtaatcccagcattttggg

SEQ ID NO: 388958 - DNA, 4204 bp, Homo sapiens
ggaacgtcgggtcggcgggtggatgaacgcggccctctgtaatggcggagcgtggcggggacgggggcgagagtgaacgattcaacccgggggagctcaggatggcccaacagcaggccttgaggttccgaggtccggctcccccaccaaatgcagtgatgcgaggcccaccacctctgatgcgacctcctccaccttttggtatgatgcgaggccctcctccaccaccacggccgccctttggacgtcctccttttgatcctaatatgccgccaatgcctcctccaggagggatacctccacctatgggccctccacacctccagagaccacctttcatgcctcctcccatgagttccatgcctcctcctccgggtatgatgtttccaccaggaatgcctcctgtgactgctcctggtactccagcactacctcctacggaggagatatgggttgaaaataaaactccagatgggaaggtttattattataatgctcggacacgtgaatctgcatggaccaagccagatggagttaaggttattcagcaatcagaactgacacctatgcttgcagcccaggcacaggttcaggctcaggcccaggcgcaggctcaggcccaggcgcaggctcaggcccaggcacaagctcaggcccaggctcaggctcaggcccaggcccaggcccaggcccaggcccaggcccaagcccaagcccaggcccaggctcaggctcaggcacaagctcaggcccaggcccaggctcaggtccaggcccaggtccaggcacaagtgcaagcacaagcagttggagcttccacccctacgaccagtagcccagcacctgcagtatccacttcaacatcatcatccaccccttcctctaccacttctaccacaacaactgctacttcagttgcgcagacagtatcaacacccacaacacaagatcagaccccaagttctgctgtttcagttgccacgcctacagttagtgtttcaactcctgctcctacagccacacctgtgcaaaccgttccccagccgcaccctcagacgttacctcctgctgttcctcattcagtacctcagccaacaacagcaatacctgcttttccaccagtaatggtacctccgtttcgtgttccccttcctggcatgccaattccacttccaggtgtagcaatgatgcaaatagtcagctgcccgtatgtaaagacagtcgctaccaccaagaccggtgtattgccaggaatggcccctcctatcgtacccatgatacatccccaggttgctattgcagcttcacctgctaccttagctggagcaacagcagtttctgaatggactgaatataaaacagcagatgggaagacatattattataataatagaacattagaatcaacctgggaaaaaccccaagaactaaaggaaaaagaaaagttagaagagaagattaaagagccaattaaagaaccctctgaagagcctctgccaatggagacggaggaggaggatcctaaagaagagcctataaaggagataaaggaggagcccaaagaagaggagatgactgaagaagaaaaggctgcccagaaggcaaagccagttgctactgctcctattcctggtactccatggtgtgtcgtttggactggtgatgagcgggtcttcttttataatcccaccactcgtctttctatgtgggaccgacctgatgatctgattggcagggcagatgttgacaaaattattcaggagccccctcataaaaaaggaatggaggaattgaagaaactaaggcacccaactccgacaatgctgtcgatccaaaagtggcaattctctatgagtgcaattaaagaggaacaagaattaatggaagaaattaatgaagatgagcctgttaaagcaaaaaaacggaagagagacgataataaagacattgactcagagaaagaagctgccatggaagctgaaattaaagctgcccgagaaagggccattgtccctctggaggctcgaatgaagcagttcaaggacatgctgctagagagaggggtgtctgctttttcaacgtgggagaaggagttgcacaagatagtttttgatccccggtacttacttctcaatcctaaagagagaaaacaggtgtttgatcagtatgtaaagaccagggcagaggaagaacgcagggaaaagaaaaataaaataatgcaagccaaggaagatttcaaaaaaatgatggaagaagcaaaatttaatccaagagcaacttttagtgaatttgcagccaagcatgctaaagattcaagattcaaagcaattgaaaagatgaaagaccgagaagccttgtttaatgagtttgtggccgctgctaggaagaaagagaaagaagattcgaagaccagaggtgagaagattaaatcggatttctttgaactattatctaatcatcacttggacagtcagtctcgatggagcaaagtaaaagacaaagtagaaagtgatccacgttacaaagcagtagatagttcatcaatgagagaagaccttttcaaacagtacattgaaaaaatagccaagaatttagactcagaaaaagaaaaggagcttgaaaggcaagcccgcattgaggcaagccttcgagaacgagaaagggaggttcaaaaggcccgttcagaacaaacaaaagaaatagatcgagagagagagcagcacaaacgagaagaagctatccagaatttcaaagctcttctgtctgacatggtacgttcttcagatgtgtcatggtctgatactcgtaggaccctccgaaaagatcaccgctgggaatctggatccttattggaaagagaggagaaagagaagctttttaatgaacacattgaagcacttaccaaaaaaaagagagagcactttaggcaacttctggatgaaacttctgcaattaccttaacatccacgtggaaagaagtaaaaaaaatcattaaggaagatcctcgatgtattaagttctcctccagtgacaggaaaaaacaaagagaatttgaagaatatatcagagacaaatatatcacagccaaagctgacttcaggacgcttttgaaagagaccaaatttataacatatagatccaaaaaattaatccaagaatcggatcagcacctgaaagatgtagaaaaaattttacagaatgacaaacggtatctagtactggactgtgtgccagaggagaggcgtaaactgattgtggcatatgttgatgacctggatcgccggggtccacccccacctcccacagcatcggagcccacgagacgatcaacaaaataattctaaatactcttccataggggcatctattcaaaatgcttgcatgagccaattttcaggtttttacatatatgtgcattagtcaacctattgcgaaaccatctgacaaacagaaggagaagcatttgtgaacagtttctgaacagaacactttggaaatatttatgcttttctttgtgtggcatgactgacatacatactcaaatataggctgtctctagtaaatcttaaaatcttgaagctaaaattcatccttttatgaggtgtggaagtcagtgacttggtgacgttcttcctagcagtgttaatacatgcaagaagtaagagcatttgtggcttgaacttgccagatgcaaataccacagactccaagaaaacccgagttggggtttgttttgttttgattttttttttttaaagcgggtaaaagagaaaacactgaaaattgaattcttatcttccagaggctacaattattataatggacaatacttttacctttgtctctaaagatcagattagttttatttgttcacttacgtgctttgattatcccctctgaattatagaccgagtcttgttgtttagcctaagagaagatttatgtagtaatttcttctcaggtatggaaccacggtcataactaacatgttggccagaatagaaccactggttaaacatattttattcaccattaagtgatctttatcaatattctggattagacaacaaattacctttctgggtgtttcttgtaaactatactcctgtttgaatgttaaactttgttgctaaagtttaattttaagatgtttgaatgttcagtttatgtatttgaactacaataaaccaaccctttttatata

SEQ ID NO: 388959 - DNA, 1130 bp, Homo sapiens
taaaagatagcattttagtgactttctattctttcagtaaacatatcttacatataaattattgcttatcagaattaaaggtcagctattaaagattaatgaattccaaatgtcatttgatagcagtgtcaggagtggagaggagcttaccactggggaggaaaactagtagggagatgaccccagtggtgtgtgaaccatcaaaacatgcagccactctccttagtgtcctggtatgctttgtgaatgtagaaaaataacctctggagcctaatcattcttgacatttaaaattgcctcttattccagaaagttataatattacaagttctattaagaaatgttgtttgaaagtaatgctactcctgggaagaagtctctttcattcaaaatagtaacagtattagctaaaacagcttttatcagaaatacctgaaacctcctaattatccgatttattgggcttccaagtgagttttccagaattgtttcactgtttacttaaaaaatgattatgcttctcagaggaaatgtgtaaaatcaaattctactacataattttatatgttgaattagaatcatgttaatgaattatttgctacttttgattttagaataacctatttaagaaaaccaagtaaataagtgattgtttgattttgtatgattgcttttatagaaattaaatgtatttatatttgcatttgtaactgattttctttttctaaacactttttttataactattttatgtattctgttttataacaagtggatagactttacagttttgtgctgtgcggcctgtcaatcagttcagtgacagctgtcaatcactgacacgcaaagtgttatgggattccctagtgaggaaagaattggtatctctgtgtggtgactttagcctcccgagttccggtactttacatttttttagtctttttccttatgaagtgatgagaattgtgcccagaatgtgttaattttaaaaaagaaattaaatagatatgacatctaaattaaataaatctaatatttaatatattcagctttattttattttggctataaaaatcttaattctttaaattacagggttggctttataccattactagattaaaaaaaaa

SEQ ID NO: 388960 - DNA, 609 bp, Homo sapiens
catttaaataaaaattgtaaattatgaaatcagagcctttaaacaagatttctctgtagcaaacccaacagttcttcacccctaacaatttatcatcaggaaaacaatttcgcattgcttaccagtcagtatgcaggaaaccatttttgtttcatgctccagcttttcttctttaagagagaaatttgaaacatcttaataaagggtatgtgcacgggaggctagatagtgctgagggtgtggtttttagatattttgtcatttggattttttggtcaggatccttaatgttttgcatcagcttgggcttttaaattagatgtgaagtaagacttctttctacatttttatagttaatttagtgaaagatgtgaaagtgaaagcttgtgaaagatgctgggattggcagccccgcagactgaagtcctctgttcatccacagaacaggtacagcacgggcaagatttacccacccaccctcagccctgatctggagggaccaccactaggggtgggagggtaattcagcttctgaggccctttcactccttggagtctttgctgaggcgacttacaaaggtgaccactgccgtgaaatttttcttaaaa

SEQ ID NO: 388961 - DNA, 887 bp, Homo sapiens
ttatattccctatgaatacatggcagttctgagatctaaagttatcaacaatctgaaaaagcctttttctatattttaataatttctttataaaatattatttatcttgaatttggcaaattttagatgaaagcctatatgcttgtcgatgtttacatttctagtaaaagaacacttctgatcttttactgtaattctactctaaatgcctatattttaaaagttattattctcatatttaaggtaggtgaactttttttctagttgtaaatatttaagatatgatgaatttctcatggtacattattttccctcccatcccactacctgttttaaaatacagattaaatcggatttctttgaactattatctaatcatcacttggacagtcagtctcgatggagcaaagtaaaagacaaagtagaaagtgatccacgttacaaagcagtagatagttcatcaatgagagaagaccttttcaaacagtacattgaaaaaatagccaagaatttagactcagaaaaagaaaaggagcttgaaaggcaagcccgcattgaggcaagccttcgagaacgagaaagggaggttcaaaaggcccgttcagaacaaacaaaagaaatagatcgagagagagagcagcacaaacgagaagaagctatccagaatttcaaagctcttctgtctgacatggtatacgttaatcttttactttttttctctaaagtactggatattggaaatttattatgttactgttatgaatattttaatgttctttaattctgagggagataatttgctaaattagaaagcatttaaaaattgaatacttggtattagtactgttagtataggaaaaaacccaagttattcaacaaattcagaa

SEQ ID NO: 388962 - DNA, 4235 bp, Homo sapiens
ggaacgtcgggtcggcgggtggatgaacgcggccctctgtaatggcggagcgtggcggggacgggggcgagagtgaacgattcaacccgggggagctcaggatggcccaacagcaggccttgaggttccgaggtccggctcccccaccaaatgcagtgatgcgaggcccaccacctctgatgcgacctcctccaccttttggtatgatgcgaggccctcctccaccaccacggccgccctttggacgtcctccttttgatcctaatatgccgccaatgcctcctccaggagggatacctccacctatgggccctccacacctccagagaccacctttcatgcctcctcccatgagttccatgcctcctcctccgggtatgatgtttccaccaggaatgcctcctgtgactgctcctggtactccagcactacctcctacggaggagatatgggttgaaaataaaactccagatgggaaggtttattattataatgctcggacacgtgaatctgcatggaccaagccagatggagttaaggttattcagcaatcagaactgacacctatgcttgcagcccaggcacaggttcaggctcaggcccaggcgcaggctcaggcccaggcgcaggctcaggcccaggcacaagctcaggcccaggctcaggctcaggcccaggcccaggcccaggcccaggcccaggcccaagcccaagcccaggcccaggctcaggctcaggcacaagctcaggcccaggcccaggctcaggtccaggcccaggtccaggcacaagtgcaagcacaagcagttggagcttccacccctacgaccagtagcccagcacctgcagtatccacttcaacatcatcatccaccccttcctctaccacttctaccacaacaactgctacttcagttgcgcagacagtatcaacacccacaacacaagatcagaccccaagttctgctgtttcagttgccacgcctacagttagtgtttcaactcctgctcctacagccacacctgtgcaaaccgttccccagccgcaccctcagacgttacctcctgctgttcctcattcagtacctcagccaacaacagcaatacctgcttttccaccagtaatggtacctccgtttcgtgttccccttcctggcatgccaattccacttccaggtgtattgccaggaatggcccctcctatcgtacccatgatacatccccaggttgctattgcagcttcacctgctaccttagctggagcaacagcagtttctgaatggactgaatataaaacagcagatgggaagacatattattataataatagaacattagaatcaacctgggaaaaaccccaagaactaaaggaaaaagaaaagttagaagagaagattaaagagccaattaaagaaccctctgaagagcctctgccaatggagacggaggaggaggatcctaaagaagagcctataaaggagataaaggaggagcccaaagaagaggagatgactgaagaagaaaaggctgcccagaaggcaaagccagttgctactgctcctattcctggtactccatggtgtgtcgtttggactggtgatgagcgggtcttcttttataatcccaccactcgtctttctatgtgggaccgacctgatgatctgattggcagggcagatgttgacaaaattattcaggagccccctcataaaaaaggaatggaggaattgaagaaactaaggcacccaactccgacaatgctgtcgatccaaaagtggcaattctctatgagtgcaattaaagaggaacaagaattaatggaagaaattaatgaagatgagcctgttaaagcaaaaaaacggaagagagacgataataaagacattgactcagagaaagaagctgccatggaagctgaaattaaagctgcccgagaaagggccattgtccctctggaggctcgaatgaagcagttcaaggacatgctgctagagagaggggtgtctgctttttcaacgtgggagaaggagttgcacaagatagtttttgatccccggtacttacttctcaatcctaaagagagaaaacaggtgtttgatcagtatgtaaagaccagggcagaggaagaacgcagggaaaagaaaaataaaataatgcaagccaaggaagatttcaaaaaaatgatggaagaagcaaaatttaatccaagagcaacttttagtgaatttgcagccaagcatgctaaagattcaagattcaaagcaattgaaaagatgaaagaccgagaagccttgtttaatgagtttgtggccgctgctaggaagaaagagaaagaagattcgaagaccagaggtgagaagattaaatcggatttctttgaactattatctaatcatcacttggacagtcagtctcgatggagcaaagtaaaagacaaagtagaaagtgatccacgttacaaagcagtagatagttcatcaatgagagaagaccttttcaaacagtacattgaaaaaatagccaagaatttagactcagaaaaagaaaaggagcttgaaaggcaagcccgcattgaggcaagccttcgagaacgagaaagggaggttcaaaaggcccgttcagaacaaacaaaagaaatagatcgagagagagagcagcacaaacgagaagaagctatccagaatttcaaagctcttctgtctgacatggtacgttcttcagatgtgtcatggtctgatactcgtaggaccctccgaaaagatcaccgctgggaatctggatccttattggaaagagaggagaaagagaagctttttaatgaacacattgaagcacttaccaaaaaaaagagagagcactttaggcaacttctggatgaaacttctgcaattaccttaacatccacgtggaaagaagtaaaaaaaatcattaaggaagatcctcgatgtattaagttctcctccagtgacaggaaaaaacaaagagaatttgaagaatatatcagagacaaatatatcacagccaaagctgacttcaggacgcttttgaaagagaccaaatttataacatatagttaatttagtgaaagatgtgaaagtgaaagcttgtgaaagatgctgggattggcagccccgcagactgaagtcctctgttcatccacagaacagatccaaaaaattaatccaagaatcggatcagcacctgaaagatgtagaaaaaattttacagaatgacaaacggtatctagtactggactgtgtgccagaggagaggcgtaaactgattgtggcatatgttgatgacctggatcgccggggtccacccccacctcccacagcatcggagcccacgagacgatcaacaaaataattctaaatactcttccataggggcatctattcaaaatgcttgcatgagccaattttcaggtttttacatatatgtgcattagtcaacctattgcgaaaccatctgacaaacagaaggagaagcatttgtgaacagtttctgaacagaacactttggaaatatttatgcttttctttgtgtggcatgactgacatacatactcaaatataggctgtctctagtaaatcttaaaatcttgaagctaaaattcatccttttatgaggtgtggaagtcagtgacttggtgacgttcttcctagcagtgttaatacatgcaagaagtaagagcatttgtggcttgaacttgccagatgcaaataccacagactccaagaaaacccgagttggggtttgttttgttttgattttttttttttaaagcgggtaaaagagaaaacactgaaaattgaattcttatcttccagaggctacaattattataatggacaatacttttacctttgtctctaaagatcagattagttttatttgttcacttacgtgctttgattatcccctctgaattatagaccgagtcttgttgtttagcctaagagaagatttatgtagtaatttcttctcaggtatggaaccacggtcataactaacatgttggccagaatagaaccactggttaaacatattttattcaccattaagtgatctttatcaatattctggattagacaacaaattacctttctgggtgtttcttgtaaactatactcctgtttgaatgttaaactttgttgctaaagtttaattttaagatgtttgaatgttcagtttatgtatttgaactacaataaaccaaccctttttatata

SEQ ID NO: 388963 - DNA, 4306 bp, Homo sapiens
ggaacgtcgggtcggcgggtggatgaacgcggccctctgtaatggcggagcgtggcggggacgggggcgagagtgaacgattcaacccgggggagctcaggatggcccaacagcaggccttgaggttccgaggtccggctcccccaccaaatgcagtgatgcgaggcccaccacctctgatgcgacctcctccaccttttggtatgatgcgaggccctcctccaccaccacggccgccctttggacgtcctccttttgatcctaatatgccgccaatgcctcctccaggagggatacctccacctatgggccctccacacctccagagaccacctttcatgcctcctcccatgagttccatgcctcctcctccgggtatgatgtttccaccaggaatgcctcctgtgactgctcctggtactccagcactacctcctacggaggagatatgggttgaaaataaaactccagatgggaaggtttattattataatgctcggacacgtgaatctgcatggaccaagccagatggagttaaggttattcagcaatcagaactgacacctatgcttgcagcccaggcacaggttcaggctcaggcccaggcgcaggctcaggcccaggcgcaggctcaggcccaggcacaagctcaggcccaggctcaggctcaggcccaggcccaggcccaggcccaggcccaggcccaagcccaagcccaggcccaggctcaggctcaggcacaagctcaggcccaggcccaggctcaggtccaggcccaggtccaggcacaagtgcaagcacaagcagttggagcttccacccctacgaccagtagcccagcacctgcagtatccacttcaacatcatcatccaccccttcctctaccacttctaccacaacaactgctacttcagttgcgcagacagtatcaacacccacaacacaagatcagaccccaagttctgctgtttcagttgccacgcctacagttagtgtttcaactcctgctcctacagccacacctgtgcaaaccgttccccagccgcaccctcagacgttacctcctgctgttcctcattcagtacctcagccaacaacagcaatacctgcttttccaccagtaatggtacctccgtttcgtgttccccttcctggcatgccaattccacttccaggtgtattgccaggaatggcccctcctatcgtacccatgatacatccccaggttgctattgcagcttcacctgctaccttagctggagcaacagcagtttctgaatggactgaatataaaacagcagatgggaagacatattattataataatagaacattagaatcaacctgggaaaaaccccaagaactaaaggaaaaagaaaagttagaagagaagattaaagagccaattaaagaaccctctgaagagcctctgccaatggagacggaggaggaggatcctaaagaagagcctataaaggagataaaggaggagcccaaagaagaggagatgactgaagaagaaaaggctgcccagaaggcaaagccagttgctactgctcctattcctggtactccatggtgtgtcgtttggactggtgatgagcgggtcttcttttataatcccaccactcgtctttctatgtgggaccgacctgatgatctgattggcagggcagatgttgacaaaattattcaggagccccctcataaaaaaggaatggaggaattgaagaaactaaggcacccaactccgacaatgctgtcgatccaaaagtggcaattctctatgagtgcaattaaagaggaacaagaattaatggaagaaattaatgaagatgagcctgttaaagcaaaaaaacggaagagagacgataataaagacattgactcagagaaagaagctgccatggaagctgaaattaaagctgcccgagaaagggccattgtccctctggaggctcgaatgaagcagttcaaggacatgctgctagagagaggggtgtctgctttttcaacgtgggagaaggagttgcacaagatagtttttgatccccggtacttacttctcaatcctaaagagagaaaacaggtgtttgatcagtatgtaaagaccagggcagaggaagaacgcagggaaaagaaaaataaaataatgcaagccaaggaagatttcaaaaaaatgatggaagaagcaaaatttaatccaagagcaacttttagtgaatttgcagccaagcatgctaaagattcaagattcaaagcaattgaaaagatgaaagaccgagaagccttgtttaatgagtttgtggccgctgctaggaagaaagagaaagaagattcgaagaccagaggtgagaagattaaatcggatttctttgaactattatctaatcatcacttggacagtcagtctcgatggagcaaagtaaaagacaaagtagaaagtgatccacgttacaaagcagtagatagttcatcaatgagagaagaccttttcaaacagtacattgaaaaaatagccaagaatttagactcagaaaaagaaaaggagcttgaaaggcaagcccgcattgaggcaagccttcgagaacgagaaagggaggttcaaaaggcccgttcagaacaaacaaaagaaatagatcgagagagagagcagcacaaacgagaagaagctatccagaatttcaaagctcttctgtctgacatggtacgttcttcagatgtgtcatggtctgatactcgtaggaccctccgaaaagatcaccgctgggaatctggatccttattggaaagagaggagaaagagaagctttttaatgaacacattgaagcacttaccaaaaaaaagagagagcactttaggcaacttctggatgaaacttctgcaattaccttaacatccacgtggaaagaagtaaaaaaaatcattaaggaagatcctcgatgtattaagttctcctccagtgacaggaaaaaacaaagagaatttgaagaatatatcagagacaaatatatcacagccaaagctgacttcaggacgcttttgaaagagaccaaatttataacatatagatccaaaaaattaatccaagaatcggatcagcacctgaaagatgtagaaaaaattttacagaatgacaaacggtatctagtactggactgtgtgccagaggagaggcgtaaactgattgtggcatatgttgatgacctggatcgccggggtccacccccacctcccacagcatcggagcccacgagacgatcaacaaaataattctaaatactcttccataggggcatctattcaaaatgcttgcatgagccaattttcaggtttttacatatatgtgcattagtcaacctattgcgaaaccatctgacaaacagaaggagaagcatttgtgaacagtttctgaacagaacactttggaaatatttatgcttttctttgtgtggcatgactgacatacatactcaaatataggctgtctctagtaaatcttaaaatcttgaagctaaaattcatccttttatgaggtgtggaagtcagtgacttggtgacgttcttcctagcagtgttaatacatgcaagaagtaagagcatttgtggcttgaacttgccagatgcaaataccacagactccaagaaaacccgagttggggtttgttttgttttgattttttttttttaaagcgggtaaaagagaaaacactgaaaattgaattcttatcttccagaggctacaattattataatggacaatacttttacctttgtctctaaagatcagattagttttatttgttcacttacgtgctttgattatcccctctgaattatagaccgagtcttgttgtttagcctaagagaagatttatgtagtaatttcttctcaggtatggaaccacggtcataactaacatgttggccagaatagaaccactggttaaacatattttattcaccattaagtgatctttatcaatattctggattagacaacaaattacctttctgggtgtttcttgtaaactatactcctgtttgaatgttaaactttgttgctaaagtttaattttaagatgtttgaatgttcagtttatgtatttgaactacaataaaccaaccctttttatataaaaaaaaaaaaaaaaattgtggcgctcggctctaaaagttttaacatcttgtgggcgcgcccatagtatgacatgtgcaagcgttccagagacctggcagaactggggtggctcccaaataacgggggcgcgggttgcacacacaaggttggctcatgctcaaga

SEQ ID NO: 388964 - DNA, 5582 bp, Homo sapiens
ggaacgtcgggtcggcgggtggatgaacgcggccctctgtaatggcggagcgtggcggggacgggggcgagagtgaacgattcaacccgggggagctcaggatggcccaacagcaggccttgaggttccgaggtccggctcccccaccaaatgcagtgatgcgaggcccaccacctctgatgcgacctcctccaccttttggtatgatgcgaggccctcctccaccaccacggccgccctttggacgtcctccttttgatcctaatatgccgccaatgcctcctccaggagggatacctccacctatgggccctccacacctccagagaccacctttcatgcctcctcccatgagttccatgcctcctcctccgggtatgatgtttccaccaggaatgcctcctgtgactgctcctggtactccagcactacctcctacggaggagatatgggttgaaaataaaactccagatgggaaggtttattattataatgctcggacacgtgaatctgcatggaccaagccagatggagttaaggttattcagcaatcagaactgacacctatgcttgcagcccaggcacaggttcaggctcaggcccaggcgcaggctcaggcccaggcgcaggctcaggcccaggcacaagctcaggcccaggctcaggctcaggcccaggcccaggcccaggcccaggcccaggcccaagcccaagcccaggcccaggctcaggctcaggcacaagctcaggcccaggcccaggctcaggtccaggcccaggtccaggcacaagtgcaagcacaagcagttggagcttccacccctacgaccagtagcccagcacctgcagtatccacttcaacatcatcatccaccccttcctctaccacttctaccacaacaactgctacttcagttgcgcagacagtatcaacacccacaacacaagatcagaccccaagttctgctgtttcagttgccacgcctacagttagtgtttcaactcctgctcctacagccacacctgtgcaaaccgttccccagccgcaccctcagacgttacctcctgctgttcctcattcagtacctcagccaacaacagcaatacctgcttttccaccagtaatggtacctccgtttcgtgttccccttcctggcatgccaattccacttccaggtgtattgccaggaatggcccctcctatcgtacccatgatacatccccaggttgctattgcagcttcacctgctaccttagctggagcaacagcagtttctgaatggactgaatataaaacagcagatgggaagacatattattataataatagaacattagaatcaacctgggaaaaaccccaagaactaaaggaaaaagaaaagttagaagagaagattaaagagccaattaaagaaccctctgaagagcctctgccaatggagacggaggaggaggatcctaaagaagagcctataaaggagataaaggaggagcccaaagaagaggagatgactgaagaagaaaaggctgcccagaaggcaaagccagttgctactgctcctattcctggtactccatggtgtgtcgtttggactggtgatgagcgggtcttcttttataatcccaccactcgtctttctatgtgggaccgacctgatgatctgattggcagggcagatgttgacaaaattattcaggagccccctcataaaaaaggaatggaggaattgaagaaactaaggcacccaactccgacaatgctgtcgatccaaaagtggcaattctctatgagtgcaattaaagaggaacaagaattaatggaagaaattaatgaagatgagcctgttaaagcaaaaaaacggaagagaatgtcaaagaagtcctttatgtggattgcccgagcttctctatttaggtacaaagctaaaagcctgtttttcctggcttagtttttcttttatttcctttattgagatagatagtgatagtttgtattgtgacattttcatttagtatagttctataaaggttatttgtttttattagttacttcttggatgtcttttaactctaactatttaaatagttttaaaattattattataagagggtatattgtttggcaaattgcttttacctgtttgttttgtgcatatcttaggtcacagactatctcgctaagttcctgcaggtcacggactatgtcttctatttcttttgattcattgcctaagttgctaagtacctctcacttgcatttgtgggttagccttagttccatttaaatctctggggctacctacagtttcctgtatagcatgcttttgaatttccacatgttctgttttcctaattcccttaagtttgtatagggaataagagccaatttttaaaatatacttagcagatcatatttaagaaggaagatctgctaaaatacacccagatattattgaattacatactttttggattatttacgtgaatgggcctttttcatagtgcatatatttgagaggtgccgtgattccatgtttacaatttcacttgagtaccacacagaaacagggttgcccttacacctgaggtgcatttttggaggaacaagaagtagtttagtcattgatgaacagttctaattccacctaactactcctgggcccatgttgctctctgggacctgtccttcaacttaaatctcaacttatcacccagaaagtgagtaataaaaagtcaggtaggtaaggtatatatcttacatattcacttggccaagattgcagatattttagttttatttttaaaatgaatgtttgagattactaaaacattataccacttaataccaatttttattagattttacaaaatattttatgtgtttataatgtaaaacattttggaaaatactgttttttctatatttcaagaactaaaaaaattatattttgtgctgtttgattctgacacatagaggtttactgcagtgttaaacttttttttttttaagtaaggttgctccctttttatgttattaaccagtgtcagggagagacagcccattaaaggtgtatttttttcctaataatgtagccattgtaaatcattagaagcccattttaattttgttattatgaaagttatttatcccttagagttcatttgaaaccctcaatataatttgtttttgccaaaaatatgctgctcagtagtgagtcttgaaaattcctttgattttaagatttctaataagatctgagaattaatattttgtcagttgatgtcttatattttattttttataggagagacgataataaagacattgactcagagaaagaagctgccatggaagctgaaattaaagctgcccgagaaagggccattgtccctctggaggctcgaatgaagcagttcaaggacatgctgctagagagaggggtgtctgctttttcaacgtgggagaaggagttgcacaagatagtttttgatccccggtacttacttctcaatcctaaagagagaaaacaggtgtttgatcagtatgtaaagaccagggcagaggaagaacgcagggaaaagaaaaataaaataatgcaagccaaggaagatttcaaaaaaatgatggaagaagcaaaatttaatccaagagcaacttttagtgaatttgcagccaagcatgctaaagattcaagattcaaagcaattgaaaagatgaaagaccgagaagccttgtttaatgagtttgtggccgctgctaggaagaaagagaaagaagattcgaagaccagaggtgagaagattaaatcggatttctttgaactattatctaatcatcacttggacagtcagtctcgatggagcaaagtaaaagacaaagtagaaagtgatccacgttacaaagcagtagatagttcatcaatgagagaagaccttttcaaacagtacattgaaaaaatagccaagaatttagactcagaaaaagaaaaggagcttgaaaggcaagcccgcattgaggcaagccttcgagaacgagaaagggaggttcaaaaggcccgttcagaacaaacaaaagaaatagatcgagagagagagcagcacaaacgagaagaagctatccagaatttcaaagctcttctgtctgacatggtacgttcttcagatgtgtcatggtctgatactcgtaggaccctccgaaaagatcaccgctgggaatctggatccttattggaaagagaggagaaagagaagctttttaatgaacacattgaagcacttaccaaaaaaaagagagagcactttaggcaacttctggatgaaacttctgcaattaccttaacatccacgtggaaagaagtaaaaaaaatcattaaggaagatcctcgatgtattaagttctcctccagtgacaggaaaaaacaaagagaatttgaagaatatatcagagacaaatatatcacagccaaagctgacttcaggacgcttttgaaagagaccaaatttataacatatagatccaaaaaattaatccaagaatcggatcagcacctgaaagatgtagaaaaaattttacagaatgacaaacggtatctagtactggactgtgtgccagaggagaggcgtaaactgattgtggcatatgttgatgacctggatcgccggggtccacccccacctcccacagcatcggagcccacgagacgatcaacaaaataattctaaatactcttccataggggcatctattcaaaatgcttgcatgagccaattttcaggtttttacatatatgtgcattagtcaacctattgcgaaaccatctgacaaacagaaggagaagcatttgtgaacagtttctgaacagaacactttggaaatatttatgcttttctttgtgtggcatgactgacatacatactcaaatataggctgtctctagtaaatcttaaaatcttgaagctaaaattcatccttttatgaggtgtggaagtcagtgacttggtgacgttcttcctagcagtgttaatacatgcaagaagtaagagcatttgtggcttgaacttgccagatgcaaataccacagactccaagaaaacccgagttggggtttgttttgttttgattttttttttttaaagcgggtaaaagagaaaacactgaaaattgaattcttatcttccagaggctacaattattataatggacaatacttttacctttgtctctaaagatcagattagttttatttgttcacttacgtgctttgattatcccctctgaattatagaccgagtcttgttgtttagcctaagagaagatttatgtagtaatttcttctcaggtatggaaccacggtcataactaacatgttggccagaatagaaccactggttaaacatattttattcaccattaagtgatctttatcaatattctggattagacaacaaattacctttctgggtgtttcttgtaaactatactcctgtttgaatgttaaactttgttgctaaagtttaattttaagatgtttgaatgttcagtttatgtatttgaactacaataaaccaaccctttttatata

SEQ ID NO: 388965 - DNA, 4530 bp, Homo sapiens
attctttttggaaatttattaggtctcaattttatgaaaagttagtttcctccctcatttagaccccaatggataccattccagagatctcataaaaacagacacagacttctccctctttatatggttatcttacgacttacctagtccttgagtctggtcattaactccttggtgaggagagaacccataagcttaggaagtgctctgcgagaaagagactgctaagaagtagaggcattagcttggccagtgctctagagttgggtaaaatgtaaatgttatggcggggggaaggatggggtagagggtatgcatgtatggggaatgggaccattatttagcagcaaaaaggaaagtttgaagacattaacaggaactggttaattgtagtccttatctgaaaaggacagattgaatgcagccaaattatggcaaagaaatcagtaggacaacccctataaagggtagttcttttaaaaaaaatttctttattggcaacaacataaaagatatgaaagaatcactcataatttatcagcgtaacatagctattctcatttttgcaattgactttttagttcttgaccaaatgtaatttttattagttgtgattaactgattttgtgcttttttttaaaaaaaaaaaaacctagaataagacatttgttttgttaattattataaatgactgtattcattctgtttatgtaccataattttggatgttcctacgatgttaaacttttaggttgtttttaattgtttgttcttatagacaactctgtaaggtttttaactgcttttatcaggagaatgtcaaagaagtcctttatgtggattgcccgagcttctctatttaggtacaaagctaaaagcctgtttttcctggcttagtttttcttttatttcctttattgagatagatagtgatagtttgtattgtgacattttcatttagtatagttctataaaggttatttgtttttattagttacttcttggatgtcttttaactctaactatttaaatagttttaaaattattattataagagggtatattgtttggcaaattgcttttacctgtttgttttgtgcatatcttaggtcacagactatctcgctaagttcctgcaggtcacggactatgtcttctatttcttttgattcattgcctaagttgctaagtacctctcacttgcatttgtgggttagccttagttccatttaaatctctggggctacctacagtttcctgtatagcatgcttttgaatttccacatgttctgttttcctaattcccttaagtttgtatagggaataagagccaatttttaaaatatacttagcagatcatatttaagaaggaagatctgctaaaatacacccagatattattgaattacatactttttggattatttacgtgaatgggcctttttcatagtgcatatatttgagaggtgccgtgattccatgtttacaatttcacttgagtaccacacagaaacagggttgcccttacacctgaggtgcatttttggaggaacaagaagtagtttagtcattgatgaacagttctaattccacctaactactcctgggcccatgttgctctctgggacctgtccttcaacttaaatctcaacttatcacccagaaagtgagtaataaaaagtcaggtaggtaaggtatatatcttacatattcacttggccaagattgcagatattttagttttatttttaaaatgaatgtttgagattactaaaacattataccacttaataccaatttttattagattttacaaaatattttatgtgtttataatgtaaaacattttggaaaatactgttttttctatatttcaagaactaaaaaaattatattttgtgctgtttgattctgacacatagaggtttactgcagtgttaaacttttttttttttaagtaaggttgctccctttttatgttattaaccagtgtcagggagagacagcccattaaaggtgtatttttttcctaataatgtagccattgtaaatcattagaagcccattttaattttgttattatgaaagttatttatcccttagagttcatttgaaaccctcaatataatttgtttttgccaaaaatatgctgctcagtagtgagtcttgaaaattcctttgattttaagatttctaataagatctgagaattaatattttgtcagttgatgtcttatattttattttttataggagagacgataataaagacattgactcagagaaagaagctgccatggaagctgaaattaaagctgcccgagaaagggccattgtccctctggaggctcgaatgaagcagttcaaggacatgctgctagagagaggggtgtctgctttttcaacgtgggagaaggagttgcacaagatagtttttgatccccggtacttacttctcaatcctaaagagagaaaacaggtgtttgatcagtatgtaaagaccagggcagaggaagaacgcagggaaaagaaaaataaaataatgcaagccaaggaagatttcaaaaaaatgatggaagaagcaaaatttaatccaagagcaacttttagtgaatttgcagccaagcatgctaaagattcaagattcaaagcaattgaaaagatgaaagaccgagaagccttgtttaatgagtttgtggccgctgctaggaagaaagagaaagaagattcgaagaccagaggtgagaagattaaatcggatttctttgaactattatctaatcatcacttggacagtcagtctcgatggagcaaagtaaaagacaaagtagaaagtgatccacgttacaaagcagtagatagttcatcaatgagagaagaccttttcaaacagtacattgaaaaaatagccaagaatttagactcagaaaaagaaaaggagcttgaaaggcaagcccgcattgaggcaagccttcgagaacgagaaagggaggttcaaaaggcccgttcagaacaaacaaaagaaatagatcgagagagagagcagcacaaacgagaagaagctatccagaatttcaaagctcttctgtctgacatggtacgttcttcagatgtgtcatggtctgatactcgtaggaccctccgaaaagatcaccgctgggaatctggatccttattggaaagagaggagaaagagaagctttttaatgaacacattgaagcacttaccaaaaaaaagagagagcactttaggcaacttctggatgaaacttctgcaattaccttaacatccacgtggaaagaagtaaaaaaaatcattaaggaagatcctcgatgtattaagttctcctccagtgacaggaaaaaacaaagagaatttgaagaatatatcagagacaaatatatcacagccaaagctgacttcaggacgcttttgaaagagaccaaatttataacatatagatccaaaaaattaatccaagaatcggatcagcacctgaaagatgtagaaaaaattttacagaatgacaaacggtatctagtactggactgtgtgccagaggagaggcgtaaactgattgtggcatatgttgatgacctggatcgccggggtccacccccacctcccacagcatcggagcccacgagacgatcaacaaaataattctaaatactcttccataggggcatctattcaaaatgcttgcatgagccaattttcaggtttttacatatatgtgcattagtcaacctattgcgaaaccatctgacaaacagaaggagaagcatttgtgaacagtttctgaacagaacactttggaaatatttatgcttttctttgtgtggcatgactgacatacatactcaaatataggctgtctctagtaaatcttaaaatcttgaagctaaaattcatccttttatgaggtgtggaagtcagtgacttggtgacgttcttcctagcagtgttaatacatgcaagaagtaagagcatttgtggcttgaacttgccagatgcaaataccacagactccaagaaaacccgagttggggtttgttttgttttgattttttttttttaaagcgggtaaaagagaaaacactgaaaattgaattcttatcttccagaggctacaattattataatggacaatacttttacctttgtctctaaagatcagattagttttatttgttcacttacgtgctttgattatcccctctgaattatagaccgagtcttgttgtttagcctaagagaagatttatgtagtaatttcttctcaggtatggaaccacggtcataactaacatgttggccagaatagaaccactggttaaacatattttattcaccattaagtgatctttatcaatattctggattagacaacaaattacctttctgggtgtttcttgtaaactatactcctgtttgaatgttaaactttgttgctaaagtttaattttaagatgtttgaatgttcagtttatgtatttgaactacaataaaccaaccctttttatata

SEQ ID NO: 388966 - DNA, 4192 bp, Homo sapiens
ggaacgtcgggtcggcgggtggatgaacgcggccctctgtaatggcggagcgtggcggggacgggggcgagagtgaacgattcaacccgggggagctcaggatggcccaacagcaggccttgaggttccgaggtccggctcccccaccaaatgcagtgatgcgaggcccaccacctctgatgcgacctcctccaccttttggtatgatgcgaggccctcctccaccaccacggccgccctttggacgtcctccttttgatcctaatatgccgccaatgcctcctccaggagggatacctccacctatgggccctccacacctccagagaccacctttcatgcctcctcccatgagttccatgcctcctcctccgggtatgatgtttccaccaggaatgcctcctgtgactgctcctggtactccagcactacctcctacggaggagatatgggttgaaaataaaactccagatgggaaggtttattattataatgctcggacacgtgaatctgcatggaccaagccagatggagttaaggttattcagcaatcagaactgacacctatgcttgcagcccaggcacaggttcaggctcaggcccaggcgcaggctcaggcccaggcgcaggctcaggcccaggcacaagctcaggcccaggctcaggctcaggcccaggcccaggcccaggcccaggcccaggcccaagcccaagcccaggcccaggctcaggctcaggcacaagctcaggcccaggcccaggctcaggtccaggcccaggtccaggcacaagtgcaagcacaagcagttggagcttccacccctacgaccagtagcccagcacctgcagtatccacttcaacatcatcatccaccccttcctctaccacttctaccacaacaactgctacttcagttgcgcagacagtatcaacacccacaacacaagatcagaccccaagttctgctgtttcagttgccacgcctacagttagtgtttcaactcctgctcctacagccacacctgtgcaaaccgttccccagccgcaccctcagacgttacctcctgctgttcctcattcagtacctcagccaacaacagcaatacctgcttttccaccagtaatggtacctccgtttcgtgttccccttcctggcatgccaattccacttccaggtgtattgccaggaatggcccctcctatcgtacccatgatacatccccaggttgctattgcagcttcacctgctaccttagctggagcaacagcagtttctgaatggactgaatataaaacagcagatgggaagacatattattataataatagaacattagaatcaacctgggaaaaaccccaagaactaaaggaaaaagaaaagttagaagagaagattaaagagccaattaaagaaccctctgaagagcctctgccaatggagacggaggaggaggatcctaaagaagagcctataaaggagataaaggaggagcccaaagaagaggagatgactgaagaagaaaaggctgcccagaaggcaaagccagttgctactgctcctattcctggtactccatggtgtgtcgtttggactggtgatgagcgggtcttcttttataatcccaccactcgtctttctatgtgggaccgacctgatgatctgattggcagggcagatgttgacaaaattattcaggagccccctcataaaaaaggaatggaggaattgaagaaactaaggcacccaactccgacaatgctgtcgatccaaaagtggcaattctctatgagtgcaattaaagaggaacaagaattaatggaagaaattaatgaagatgagcctgttaaagcaaaaaaacggaagagaatgtcaaagaagtcctttatgtggattgcccgagcttctctatttaggagagacgataataaagacattgactcagagaaagaagctgccatggaagctgaaattaaagctgcccgagaaagggccattgtccctctggaggctcgaatgaagcagttcaaggacatgctgctagagagaggggtgtctgctttttcaacgtgggagaaggagttgcacaagatagtttttgatccccggtacttacttctcaatcctaaagagagaaaacaggtgtttgatcagtatgtaaagaccagggcagaggaagaacgcagggaaaagaaaaataaaataatgcaagccaaggaagatttcaaaaaaatgatggaagaagcaaaatttaatccaagagcaacttttagtgaatttgcagccaagcatgctaaagattcaagattcaaagcaattgaaaagatgaaagaccgagaagccttgtttaatgagtttgtggccgctgctaggaagaaagagaaagaagattcgaagaccagaggtgagaagattaaatcggatttctttgaactattatctaatcatcacttggacagtcagtctcgatggagcaaagtaaaagacaaagtagaaagtgatccacgttacaaagcagtagatagttcatcaatgagagaagaccttttcaaacagtacattgaaaaaatagccaagaatttagactcagaaaaagaaaaggagcttgaaaggcaagcccgcattgaggcaagccttcgagaacgagaaagggaggttcaaaaggcccgttcagaacaaacaaaagaaatagatcgagagagagagcagcacaaacgagaagaagctatccagaatttcaaagctcttctgtctgacatggtacgttcttcagatgtgtcatggtctgatactcgtaggaccctccgaaaagatcaccgctgggaatctggatccttattggaaagagaggagaaagagaagctttttaatgaacacattgaagcacttaccaaaaaaaagagagagcactttaggcaacttctggatgaaacttctgcaattaccttaacatccacgtggaaagaagtaaaaaaaatcattaaggaagatcctcgatgtattaagttctcctccagtgacaggaaaaaacaaagagaatttgaagaatatatcagagacaaatatatcacagccaaagctgacttcaggacgcttttgaaagagaccaaatttataacatatagatccaaaaaattaatccaagaatcggatcagcacctgaaagatgtagaaaaaattttacagaatgacaaacggtatctagtactggactgtgtgccagaggagaggcgtaaactgattgtggcatatgttgatgacctggatcgccggggtccacccccacctcccacagcatcggagcccacgagacgatcaacaaaataattctaaatactcttccataggggcatctattcaaaatgcttgcatgagccaattttcaggtttttacatatatgtgcattagtcaacctattgcgaaaccatctgacaaacagaaggagaagcatttgtgaacagtttctgaacagaacactttggaaatatttatgcttttctttgtgtggcatgactgacatacatactcaaatataggctgtctctagtaaatcttaaaatcttgaagctaaaattcatccttttatgaggtgtggaagtcagtgacttggtgacgttcttcctagcagtgttaatacatgcaagaagtaagagcatttgtggcttgaacttgccagatgcaaataccacagactccaagaaaacccgagttggggtttgttttgttttgattttttttttttaaagcgggtaaaagagaaaacactgaaaattgaattcttatcttccagaggctacaattattataatggacaatacttttacctttgtctctaaagatcagattagttttatttgttcacttacgtgctttgattatcccctctgaattatagaccgagtcttgttgtttagcctaagagaagatttatgtagtaatttcttctcaggtatggaaccacggtcataactaacatgttggccagaatagaaccactggttaaacatattttattcaccattaagtgatctttatcaatattctggattagacaacaaattacctttctgggtgtttcttgtaaactatactcctgtttgaatgttaaactttgttgctaaagtttaattttaagatgtttgaatgttcagtttatgtatttgaactacaataaaccaaccctttttatata

SEQ ID NO: 388967 - DNA, 2105 bp, Homo sapiens
ctgcctctagaggatccaccgccatttacaactatctctaaagagagaaaacaggtgtttgatcagtatgtaaagaccagggcagaggaagaacgcagggaaaagaaaaataaaataatgcaagccaaggaagatttcaaaaaaatgatggaagaagcaaaatttaatccaagagcaacttttagtgaatttgcagccaagcatgctaaagattcaagattcaaagcaattgaaaagatgaaagaccgagaagccttgtttaatgagtttgtggccgctgctaggaagaaagagaaagaagattcgaagaccagaggtgagaagattaaatcggatttctttgaactattatctaatcatcacttggacagtcagtctcgatggagcaaagtaaaagacaaagtagaaagtgatccacgttacaaagcagtagatagttcatcaatgagagaagaccttttcaaacagtacattgaaaaaatagccaagaatttagactcagaaaaagaaaaggagcttgaaaggcaagcccgcattgaggcaagccttcgagaacgagaaagggaggttcaaaaggcccgttcagaacaaacaaaagaaatagatcgagagagagagcagcacaaacgagaagaagctatccagaatttcaaagctcttctgtctgacatggtacgttcttcagatgtgtcatggtctgatactcgtaggaccctccgaaaagatcaccgctgggaatctggatccttattggaaagagaggagaaagagaagctttttaatgaacacattgaagcacttaccaaaaaaaagagagagcactttaggcaacttctggatgaaacttctgcaattaccttaacatccacgtggaaagaagtaaaaaaaatcattaaggaagatcctcgatgtattaagttctcctccagtgacaggaaaaaacaaagagaatttgaagaatatatcagagacaaatatatcacagccaaagctgacttcaggacgcttttgaaagagaccaaatttataacatatagatccaaaaaattaatccaagaatcggatcagcacctgaaagatgtagaaaaaattttacagaatgacaaacggtatctagtactggactgtgtgccagaggagaggcgtaaactgattgtggcatatgttgatgacctggatcgccggggtccacccccacctcccacagcatcggagcccacgagacgatcaacaaaataattctaaatactcttccataggggcatctattcaaaatgcttgcatgagccaattttcaggtttttacatatatgtgcattagtcaacctattgcgaaaccatctgacaaacagaaggagaagcatttgtgaacagtttctgaacagaacactttggaaatatttatgcttttctttgtgtggcatgactgacatacatactcaaatataggctgtctctagtaaatcttaaaatcttgaagctaaaattcatccttttatgaggtgtggaagtcagtgacttggtgacgttcttcctagcagtgttaatacatgcaagaagtaagagcatttgtggcttgaacttgccagatgcaaataccacagactccaagaaaacccgagttggggtttgttttgttttgattttttttttttaaagcgggtaaaagagaaaacactgaaaattgaattcttatcttccagaggctacaattattataatggacaatacttttacctttgtctctaaagatcagattagttttatttgttcacttacgtgctttgattatcccctctgaattatagaccgagtcttgttgtttagcctaagagaagatttatgtagtaatttcttctcaggtatggaaccacggtcataactaacatgttggccagaatagaaccactggttaaacatattttattcaccattaagtgatctttatcaatattctggattagacaacaaattacctttctgggtgtttcttgtaaactatactcctgtttgaatgttaaactttgttgctaaagtttaattttaagatgtttgaatgttcagtttatgtatttgaactacaataaaccaaccctttttatata

SEQ ID NO: 388968 - DNA, 2699 bp, Homo sapiens
taaaagatagcattttagtgactttctattctttcagtaaacatatcttacatataaattattgcttatcagaattaaaggtcagctattaaagattaatgaattccaaatgtcatttgatagcagtgtcaggagtggagaggagcttaccactggggaggaaaactagtagggagatgaccccagtggtgtgtgaaccatcaaaacatgcagccactctccttagtgtcctggtatgctttgtgaatgtagaaaaataacctctggagcctaatcattcttgacatttaaaattgcctcttattccagaaagttataatattacaagttctattaagaaatgttgtttgaaagtaatgctactcctgggaagaagtctctttcattcaaaatagtaacagtattagctaaaacagcttttatcagaaatacctgaaacctcctaattatccgatttattgggcttccaagtgagttttccagaattgtttcactgtttacttaaaaaatgattatgcttctcagaggaaatgtgtaaaatcaaattctactacataattttatatgttgaattagaatcatgttaatgaattatttgctacttttgattttagaataacctatttaagaaaaccaagtaaataagtgattgtttgattttgtatgattgcttttatagaaattaaatgtatttatatttgcatttgtaactgattttctttttctaaacactttttttataactattttatgtattctgttttataacaagtggatagactttacagttttgtgctgtgcggcctgtcaatcagttcagtgacagctgtcaatcactgacacgcaaagtgttatgggattccctagtgaggaaagaattggtatctctgtgtggtgactttagcctcccgagttccgattaaatcggatttctttgaactattatctaatcatcacttggacagtcagtctcgatggagcaaagtaaaagacaaagtagaaagtgatccacgttacaaagcagtagatagttcatcaatgagagaagaccttttcaaacagtacattgaaaaaatagccaagaatttagactcagaaaaagaaaaggagcttgaaaggcaagcccgcattgaggcaagccttcgagaacgagaaagggaggttcaaaaggcccgttcagaacaaacaaaagaaatagatcgagagagagagcagcacaaacgagaagaagctatccagaatttcaaagctcttctgtctgacatggtacgttcttcagatgtgtcatggtctgatactcgtaggaccctccgaaaagatcaccgctgggaatctggatccttattggaaagagaggagaaagagaagctttttaatgaacacattgaagcacttaccaaaaaaaagagagagcactttaggcaacttctggatgaaacttctgcaattaccttaacatccacgtggaaagaagtaaaaaaaatcattaaggaagatcctcgatgtattaagttctcctccagtgacaggaaaaaacaaagagaatttgaagaatatatcagagacaaatatatcacagccaaagctgacttcaggacgcttttgaaagagaccaaatttataacatatagatccaaaaaattaatccaagaatcggatcagcacctgaaagatgtagaaaaaattttacagaatgacaaacggtatctagtactggactgtgtgccagaggagaggcgtaaactgattgtggcatatgttgatgacctggatcgccggggtccacccccacctcccacagcatcggagcccacgagacgatcaacaaaataattctaaatactcttccataggggcatctattcaaaatgcttgcatgagccaattttcaggtttttacatatatgtgcattagtcaacctattgcgaaaccatctgacaaacagaaggagaagcatttgtgaacagtttctgaacagaacactttggaaatatttatgcttttctttgtgtggcatgactgacatacatactcaaatataggctgtctctagtaaatcttaaaatcttgaagctaaaattcatccttttatgaggtgtggaagtcagtgacttggtgacgttcttcctagcagtgttaatacatgcaagaagtaagagcatttgtggcttgaacttgccagatgcaaataccacagactccaagaaaacccgagttggggtttgttttgttttgattttttttttttaaagcgggtaaaagagaaaacactgaaaattgaattcttatcttccagaggctacaattattataatggacaatacttttacctttgtctctaaagatcagattagttttatttgttcacttacgtgctttgattatcccctctgaattatagaccgagtcttgttgtttagcctaagagaagatttatgtagtaatttcttctcaggtatggaaccacggtcataactaacatgttggccagaatagaaccactggttaaacatattttattcaccattaagtgatctttatcaatattctggattagacaacaaattacctttctgggtgtttcttgtaaactatactcctgtttgaatgttaaactttgttgctaaagtttaattttaagatgtttgaatgttcagtttatgtatttgaactacaataaaccaaccctttttatata

SEQ ID NO: 388969 - DNA, 2124 bp, Homo sapiens
ttatattccctatgaatacatggcagttctgagatctaaagttatcaacaatctgaaaaagcctttttctatattttaataatttctttataaaatattatttatcttgaatttggcaaattttagatgaaagcctatatgcttgtcgatgtttacatttctagtaaaagaacacttctgatcttttactgtaattctactctaaatgcctatattttaaaagttattattctcatatttaaggtaggtgaactttttttctagttgtaaatatttaagatatgatgaatttctcatggtacattattttccctcccatcccactacctgttttaaaatacagattaaatcggatttctttgaactattatctaatcatcacttggacagtcagtctcgatggagcaaagtaaaagacaaagtagaaagtgatccacgttacaaagcagtagatagttcatcaatgagagaagaccttttcaaacagtacattgaaaaaatagccaagaatttagactcagaaaaagaaaaggagcttgaaaggcaagcccgcattgaggcaagccttcgagaacgagaaagggaggttcaaaaggcccgttcagaacaaacaaaagaaatagatcgagagagagagcagcacaaacgagaagaagctatccagaatttcaaagctcttctgtctgacatggtacgttcttcagatgtgtcatggtctgatactcgtaggaccctccgaaaagatcaccgctgggaatctggatccttattggaaagagaggagaaagagaagctttttaatgaacacattgaagcacttaccaaaaaaaagagagagcactttaggcaacttctggatgaaacttctgcaattaccttaacatccacgtggaaagaagtaaaaaaaatcattaaggaagatcctcgatgtattaagttctcctccagtgacaggaaaaaacaaagagaatttgaagaatatatcagagacaaatatatcacagccaaagctgacttcaggacgcttttgaaagagaccaaatttataacatatagatccaaaaaattaatccaagaatcggatcagcacctgaaagatgtagaaaaaattttacagaatgacaaacggtatctagtactggactgtgtgccagaggagaggcgtaaactgattgtggcatatgttgatgacctggatcgccggggtccacccccacctcccacagcatcggagcccacgagacgatcaacaaaataattctaaatactcttccataggggcatctattcaaaatgcttgcatgagccaattttcaggtttttacatatatgtgcattagtcaacctattgcgaaaccatctgacaaacagaaggagaagcatttgtgaacagtttctgaacagaacactttggaaatatttatgcttttctttgtgtggcatgactgacatacatactcaaatataggctgtctctagtaaatcttaaaatcttgaagctaaaattcatccttttatgaggtgtggaagtcagtgacttggtgacgttcttcctagcagtgttaatacatgcaagaagtaagagcatttgtggcttgaacttgccagatgcaaataccacagactccaagaaaacccgagttggggtttgttttgttttgattttttttttttaaagcgggtaaaagagaaaacactgaaaattgaattcttatcttccagaggctacaattattataatggacaatacttttacctttgtctctaaagatcagattagttttatttgttcacttacgtgctttgattatcccctctgaattatagaccgagtcttgttgtttagcctaagagaagatttatgtagtaatttcttctcaggtatggaaccacggtcataactaacatgttggccagaatagaaccactggttaaacatattttattcaccattaagtgatctttatcaatattctggattagacaacaaattacctttctgggtgtttcttgtaaactatactcctgtttgaatgttaaactttgttgctaaagtttaattttaagatgtttgaatgttcagtttatgtatttgaactacaataaaccaaccctttttatata

SEQ ID NO: 388970 - DNA, 3500 bp, Homo sapiens
ggaacgtcgggtcggcgggtggatgaacgcggccctctgtaatggcggagcgtggcggggacgggggcgagagtgaacgattcaacccgggggagctcaggatggcccaacagcaggccttgaggttccgaggtccggctcccccaccaaatgcagtgatgcgaggcccaccacctctgatgcgacctcctccaccttttggtatgatgcgaggccctcctccaccaccacggccgccctttggacgtcctccttttgatcctaatatgccgccaatgcctcctccaggagggatacctccacctatgggccctccacacctccagagaccacctttcatgcctcctcccatgagttccatgcctcctcctccgggtatgatgtttccaccaggaatgcctcctgtgactgctcctggtactccagcactacctcctacggaggagatatgggttgaaaataaaactccagatgggaaggtttattattataatgctcggacacgtgaatctgcatggaccaagccagatggagttaaggttattcagcaatcagaactgacacctatgcttgcagcccaggcacaggttcaggctcaggcccaggcgcaggctcaggcccaggcgcaggctcaggcccaggcacaagctcaggcccaggctcaggctcaggcccaggcccaggcccaggcccaggcccaggcccaagcccaagcccaggcccaggctcaggctcaggcacaagctcaggcccaggcccaggctcaggtccaggcccaggtccaggcacaagtgcaagcacaagcagttggagcttccacccctacgaccagtagcccagcacctgcagtatccacttcaacatcatcatccaccccttcctctaccacttctaccacaacaactgctacttcagttgcgcagacagtatcaacacccacaacacaagatcagaccccaagttctgctgtttcagttgccacgcctacagttagtgtttcaactcctgctcctacagccacacctgtgcaaaccgttccccagccgcaccctcagacgttacctcctgctgttcctcattcagtacctcagccaacaacagcaatacctgcttttccaccagtaatggtacctccgtttcgtgttccccttcctggcatgccaattccacttccaggtgtattgccaggaatggcccctcctatcgtacccatgatacatccccaggttgctattgcagcttcacctgctaccttagctggagcaacagcagtttctgaatggactgaatataaaacagcagatgggaagacatattattataataatagaacattagaatcaacctgggaaaaaccccaagaactaaaggaaaaagaaaagttagaagagaagattaaagagccaattaaagaaccctctgaagagcctctgccaatggagacggaggaggaggatcctaaagaagagcctataaaggagataaaggaggagcccaaagaagaggagatgactgaagaagaaaaggctgcccagaaggcaaagccagttgctactgctcctattcctggtactccatggtgtgtcgtttggactggtgatgagcgggtcttcttttataatcccaccactcgtctttctatgtgggaccgacctgatgatctgattggcagggcagatgttgacaaaattattcaggagccccctcataaaaaaggaatggaggaattgaagaaactaaggcacccaactccgacaatgctgtcgatccaaaagtggcaattctctatgagtgcaattaaagaggaacaagaattaatggaagaaattaatgaagatgagcctgttaaagcaaaaaaacggaagagagacgataataaagacattgactcagagaaagaagctgccatggaagctgaaattaaagctgcccgagaaagggccattgtccctctggaggctcgaatgaagcagttcaaggacatgctgctagagagaggggtgtctgctttttcaacgtgggagaaggagttgcacaagatagtttttgatccccggtacttacttctcaatcctaaagagagaaaacaggtgtttgatcagtatgtaaagaccagggcagaggaagaacgcagggaaaagaaaaataaaataatgcaagccaaggaagatttcaaaaaaatgatggaagaagcaaaatttaatccaagagcaacttttagtgaatttgcagccaagcatgctaaagattcaagattcaaagcaattgaaaagatgaaagaccgagaagccttgtttaatgagtttgtggccgctgctaggaagaaagagaaagaagattcgaagaccagaggtgagaagattaaatcggatttctttgaactattatctaatcatcacttggacagtcagtctcgatggagcaaagtaaaagacaaagtagaaagtgatccacgttacaaagcagtagatagttcatcaatgagagaagaccttttcaaacagtacattgaaaaaatagccaagaatttagactcagaaaaagaaaaggagcttgaaaggcaagcccgcattgaggcaagccttcgagaacgagaaagggaggttcaaaaggcccgttcagaacaaacaaaagaaatagatcgagagagagagcagcacaaacgagaagaagctatccagaatttcaaagctcttctgtctgacatggtacgttcttcagatgtgtcatggtctgatactcgtaggaccctccgaaaagatcaccgctgggaatctggatccttattggaaagagaggagaaagagaagctttttaatgaacacattgaagcacttaccaaaaaaaagagagagcactttaggcaacttctggatgaaacttctgcagtaagaatctcttatttttctcattttaatctggatgaatcttgttagtaatttcttaaagcaaaacattgatatgatttttagtgtcatggtctttagattcattactggaatgcatcttatgacaattctctgattttaaaaaaattatggtattcttatttatttagaaatgcctattctttgcagttttcacattcataactgctcccatagtaattcaaaatgtccttagccatgtggtcagtgatccctcctaataatagatttagcaaatttcttcttttgatccattttcaatttggtactatggcctcttgttcggcagtttgtacgctttgttatccaggttttgttcctttttatttgctctctttttggtgatggtttcttcagaagttatgatgtttgcccatgtaaatacagggtttgcaggtgattgtcttaggccaccttgaaagtatggccatgaaaataactcttgtggcaagccaacaaaaagaaattgcattaacgctgcttccctgtccctaactagtccagttacgcttgggcattacaagagatcgcaggtcagtgtgtaatattatgtacctatgtgctgcagtttga

SEQ ID NO: 388971 - DNA, 678 bp, Homo sapiens
atccagctaatttttttaattaatattttttgtagagatggcctttcaccatgttgcccaggctggtctcaaactcctgagctcaagtgatcctcctgctttggcctcccaaagtgttagaattacaggcctgagccaccgtgctgggccttccctttactttttattttagatataattagatcttaaagtcttcatagaaggttgcatttcagtatgtagttttggtttgttaagaaatattaagaactatagtagctaggatgctatgtctgttctttagctttagaactgcttaatagcattattgttgccattaaactcattctttctgatagtttaaaatttagtactctcaaattgagtgtgccaaaccaaattcctaagcattttaatctctgatcacaaattgctttgcatttcttggttttctcagttaatatgttgatctgttatttttgcttgagtcattcagttatcttgtaaaaaccatgtttggttctctgtaaataactattggtaataagaacatgtcgttcttcagtaccctcatctccctacttgtaacaggctgaaagaagtcctagctgtaaaatatgttctgtaacataagagaatgatattttgcatcaattcttaggtgtgtcgtttggactggtgatgagcgggtcttctttt

SEQ ID NO: 388972 - DNA, 625 bp, Homo sapiens
tttgtagggtgtgaagtaggtggtaaatagatgatcagttcattatcttgactgtattattaagtgggggaaatatagaatagatgtaaagcatgattacattttagtgaaaatacttatgtcttaagagaagcacggaaataaaatatactacagattccataccattgatatttctttctaaaagggatttgggaagactgtgatttctcttccgcatttctaaatttcttgacatgtttataataatcatgtatttataatcgggaaaaaaattaaagaggctttttgctgttttcttttgttcttgaagcctaagtagagagctgtgtgcttgtgtaatatctcagtgaagctttaaagtgaaacttggtatagattatctgtgtataattatctacagttaatatatttttcctggtatagtttggacaaagacattgtccaataatttggtagttaaattacctatatgaaagattgacttgtcaaatttgttgatttttataataggtgtttgatcagtatgtaaagaccagggcagaggaagaacgcagggaaaagaaaaataaaataatgcaagccaaggaagatttcaaaaaaatgatggaagaagcaaaattta

SEQ ID NO: 388973 - DNA, 4141 bp, Homo sapiens
ggaacgtcgggtcggcgggtggatgaacgcggccctctgtaatggcggagcgtggcggggacgggggcgagagtgaacgattcaacccgggggagctcaggatggcccaacagcaggccttgaggttccgaggtccggctcccccaccaaatgcagtgatgcgaggcccaccacctctgatgcgacctcctccaccttttggtatgatgcgaggccctcctccaccaccacggccgccctttggacgtcctccttttgatcctaatatgccgccaatgcctcctccaggagggatacctccacctatgggccctccacacctccagagaccacctttcatgcctcctcccatgagttccatgcctcctcctccgggtatgatgtttccaccaggaatgcctcctgtgactgctcctggtactccagcactacctcctacggaggagatatgggttgaaaataaaactccagatgggaaggtttattattataatgctcggacacgtgaatctgcatggaccaagccagatggagttaaggttattcagcaatcagaactgacacctatgcttgcagcccaggcacaggttcaggctcaggcccaggcgcaggctcaggcccaggcgcaggctcaggcccaggcacaagctcaggcccaggctcaggctcaggcccaggcccaggcccaggcccaggcccaggcccaagcccaagcccaggcccaggctcaggctcaggcacaagctcaggcccaggcccaggctcaggtccaggcccaggtccaggcacaagtgcaagcacaagcagttggagcttccacccctacgaccagtagcccagcacctgcagtatccacttcaacatcatcatccaccccttcctctaccacttctaccacaacaactgctacttcagttgcgcagacagtatcaacacccacaacacaagatcagaccccaagttctgctgtttcagttgccacgcctacagttagtgtttcaactcctgctcctacagccacacctgtgcaaaccgttccccagccgcaccctcagacgttacctcctgctgttcctcattcagtacctcagccaacaacagcaatacctgcttttccaccagtaatggtacctccgtttcgtgttccccttcctggcatgccaattccacttccaggtgtattgccaggaatggcccctcctatcgtacccatgatacatccccaggttgctattgcagcttcacctgctaccttagctggagcaacagcagtttctgaatggactgaatataaaacagcagatgggaagacatattattataataatagaacattagaatcaacctgggaaaaaccccaagaactaaaggaaaaagaaaagttagaagagaagattaaagagccaattaaagaaccctctgaagagcctctgccaatggagacggaggaggaggatcctaaagaagagcctataaaggagataaaggaggagcccaaagaagaggagatgactgaagaagaaaaggctgcccagaaggcaaagccagttgctactgctcctattcctggtactccatggtgtgtcgtttggactggtgatgagcgggtcttcttttataatcccaccactcgtctttctatgtgggaccgacctgatgatctgattggcagggcagatgttgacaaaattattcaggagccccctcataaaaaaggaatggaggaattgaagaaactaaggcacccaactccgacaatgctgtcgatccaaaagtggcaattctctatgagtgcaattaaagaggaacaagaattaatggaagaaattaatgaagatgagcctgttaaagcaaaaaaacggaagagagacgataataaagacattgactcagagaaagaagctgccatggaagctgaaattaaagctgcccgagaaagggccattgtccctctggaggctcgaatgaagcagttcaaggacatgctgctagagagaggggtgtctgctttttcaacgtgggagaaggagttgcacaagatagtttttgatccccggtacttacttctcaatcctaaagagagaaaacaggtgtttgatcagtatgtaaagaccagggcagaggaagaacgcagggaaaagaaaaataaaataatgcaagccaaggaagatttcaaaaaaatgatggaagaagcaaaatttaatccaagagcaacttttagtgaatttgcagccaagcatgctaaagattcaagattcaaagcaattgaaaagatgaaagaccgagaagccttgtttaatgagtttgtggccgctgctaggaagaaagagaaagaagattcgaagaccagaggtgagaagattaaatcggatttctttgaactattatctaatcatcacttggacagtcagtctcgatggagcaaagtaaaagacaaagtagaaagtgatccacgttacaaagcagtagatagttcatcaatgagagaagaccttttcaaacagtacattgaaaaaatagccaagaatttagactcagaaaaagaaaaggagcttgaaaggcaagcccgcattgaggcaagccttcgagaacgagaaagggaggttcaaaaggcccgttcagaacaaacaaaagaaatagatcgagagagagagcagcacaaacgagaagaagctatccagaatttcaaagctcttctgtctgacatggtacgttcttcagatgtgtcatggtctgatactcgtaggaccctccgaaaagatcaccgctgggaatctggatccttattggaaagagaggagaaagagaagctttttaatgaacacattgaagcacttaccaaaaaaaagagagagcactttaggcaacttctggatgaaacttctgcaattaccttaacatccacgtggaaagaagtaaaaaaaatcattaaggaagatcctcgatgtattaagttctcctccagtgacaggaaaaaacaaagagaatttgaagaatatatcagagacaaatatatcacagccaaagctgacttcaggacgcttttgaaagagaccaaatttataacatatagatccaaaaaattaatccaagaatcggatcagcacctgaaagatgtagaaaaaattttacagaatgacaaacggtatctagtactggactgtgtgccagaggagaggcgtaaactgattgtggcatatgttgatgacctggatcgccggggtccacccccacctcccacagcatcggagcccacgagacgatcaacaaaataattctaaatactcttccataggggcatctattcaaaatgcttgcatgagccaattttcaggtttttacatatatgtgcattagtcaacctattgcgaaaccatctgacaaacagaaggagaagcatttgtgaacagtttctgaacagaacactttggaaatatttatgcttttctttgtgtggcatgactgacatacatactcaaatataggctgtctctagtaaatcttaaaatcttgaagctaaaattcatccttttatgaggtgtggaagtcagtgacttggtgacgttcttcctagcagtgttaatacatgcaagaagtaagagcatttgtggcttgaacttgccagatgcaaataccacagactccaagaaaacccgagttggggtttgttttgttttgattttttttttttaaagcgggtaaaagagaaaacactgaaaattgaattcttatcttccagaggctacaattattataatggacaatacttttacctttgtctctaaagatcagattagttttatttgttcacttacgtgctttgattatcccctctgaattatagaccgagtcttgttgtttagcctaagagaagatttatgtagtaatttcttctcaggtatggaaccacggtcataactaacatgttggccagaatagaaccactggttaaacatattttattcaccattaagtgatctttatcaatattctggattagacaacaaattacctttctgggtgtttcttgtaaactatactcctgtttgaatgttaaactttgttgctaaagtttaattttaagatgtttgaatgttcagtttatgtatttgaactacaataaaccaaccctttttatata

SEQ ID NO: 388974 - DNA, 4090 bp, Homo sapiens
ggaacgtcgggtcggcgggtggatgaacgcggccctctgtaatggcggagcgtggcggggacgggggcgagagtgaacgattcaacccgggggagctcaggatggcccaacagcaggccttgaggttccgaggtccggctcccccaccaaatgcagtgatgcgaggcccaccacctctgatgcgacctcctccaccttttggtatgatgcgaggccctcctccaccaccacggccgccctttggacgtcctccttttgatcctaatatgccgccaatgcctcctccaggagggatacctccacctatgggccctccacacctccagagaccacctttcatgcctcctcccatgagttccatgcctcctcctccgggtatgatgtttccaccaggaatgcctcctgtgactgctcctggtactccagcactacctcctacggaggagatatgggttgaaaataaaactccagatgggaaggtttattattataatgctcggacacgtgaatctgcatggaccaagccagatggagttaaggttattcagcaatcagaactgacacctatgcttgcagcccaggcacaggttcaggctcaggcccaggcgcaggctcaggcccaggcgcaggctcaggcccaggcacaagctcaggcccaggctcaggctcaggcccaggcccaggcccaggcccaggcccaggcccaagcccaagcccaggcccaggctcaggctcaggcacaagctcaggcccaggcccaggctcaggtccaggcccaggtccaggcacaagtgcaagcacaagcagttggagcttccacccctacgaccagtagcccagcacctgcagtatccacttcaacatcatcatccaccccttcctctaccacttctaccacaacaactgctacttcagttgcgcagacagtatcaacacccacaacacaagatcagaccccaagttctgctgtttcagttgccacgcctacagttagtgtttcaactcctgctcctacagccacacctgtgcaaaccgttccccagccgcaccctcagacgttacctcctgctgttcctcattcagtacctcagccaacaacagcaatacctgcttttccaccagtaatggtacctccgtttcgtgttccccttcctggcatgccaattccacttccaggtgtattgccaggaatggcccctcctatcgtacccatgatacatccccaggttgctattgcagcttcacctgctaccttagctggagcaacagcagtttctgaatggactgaatataaaacagcagatgggaagacatattattataataatagaacattagaatcaacctgggaaaaaccccaagaactaaaggaaaaagaaaagttagaagagaagattaaagagccaattaaagaaccctctgaagagcctctgccaatggagacggaggaggaggatcctaaagaagagcctataaaggagataaaggaggagcccaaagaagaggagatgactgaagaagaaaaggctgcccagaaggcaaagccagttgctactgctcctattcctggtactccatggtgtgtcgtttggactggtgatgagcgggtcttcttttataatcccaccactcgtctttctatgtgggaccgacctgatgatctgattggcagggcagatgttgacaaaattattcaggagccccctcataaaaaaggaatggaggaattgaagaaactaaggcacccaactccgacaatgctgtcgatccaaaagtggcaattctctatgagtgcaattaaagaggaacaagaattaatggaagaaattaatgaagatgagcctgttaaagcaaaaaaacggaagagagacgataataaagacattgactcagagaaagaagctgccatggaagctgaaattaaagctgcccgagaaagggccattgtccctctggaggctcgaatgaagcagttcaaggacatgctgctagagagaggggtgtctgctttttcaacgtgggagaaggagttgcacaagatagtttttgatccccggtacttacttctcaatcctaaagagagaaaacaggtgtttgatcagtatgtaaagaccagggcagaggaagaacgcagggaaaagaaaaataaaataatgcaagccaaggaagatttcaaaaaaatgatggaagaagcaaaatttaatccaagagcaacttttagtgaatttgcagccaagcatgctaaagattcaagattcaaagcaattgaaaagatgaaagaccgagaagccttgtttaatgagtttgtggccgctgctaggaagaaagagaaagaagattcgaagaccagaggtgagaagattaaatcggatttctttgaactattatctaatcatcacttggacagtcagtctcgatggagcaaagtaaaagacaaagtagaaagtgatccacgttacaaagcagtagatagttcatcaatgagagaagaccttttcaaacagtacattgaaaaaatagccaagaatttagactcagaaaaagaaaaggagcttgaaaggcaagcccgcattgaggcaagccttcgagaacgagaaagggaggttcaaaaggcccgttcagaacaaacaaaagaaatagatcgagagagagagcagcacaaacgagaagaagctatccagaatttcaaagctcttctgtctgacatggtacgttcttcagatgtgtcatggtctgatactcgtaggaccctccgaaaagatcaccgctgggaatctggatccttattggaaagagaggagaaagagaagctttttaatgaacacattgaagcacttaccaaaaaaaagagagagcactttaggcaacttctggatgaaacttctgcaattaccttaacatccacgtggaaagaagtaaaaaaaaaacaaagagaatttgaagaatatatcagagacaaatatatcacagccaaagctgacttcaggacgcttttgaaagagaccaaatttataacatatagatccaaaaaattaatccaagaatcggatcagcacctgaaagatgtagaaaaaattttacagaatgacaaacggtatctagtactggactgtgtgccagaggagaggcgtaaactgattgtggcatatgttgatgacctggatcgccggggtccacccccacctcccacagcatcggagcccacgagacgatcaacaaaataattctaaatactcttccataggggcatctattcaaaatgcttgcatgagccaattttcaggtttttacatatatgtgcattagtcaacctattgcgaaaccatctgacaaacagaaggagaagcatttgtgaacagtttctgaacagaacactttggaaatatttatgcttttctttgtgtggcatgactgacatacatactcaaatataggctgtctctagtaaatcttaaaatcttgaagctaaaattcatccttttatgaggtgtggaagtcagtgacttggtgacgttcttcctagcagtgttaatacatgcaagaagtaagagcatttgtggcttgaacttgccagatgcaaataccacagactccaagaaaacccgagttggggtttgttttgttttgattttttttttttaaagcgggtaaaagagaaaacactgaaaattgaattcttatcttccagaggctacaattattataatggacaatacttttacctttgtctctaaagatcagattagttttatttgttcacttacgtgctttgattatcccctctgaattatagaccgagtcttgttgtttagcctaagagaagatttatgtagtaatttcttctcaggtatggaaccacggtcataactaacatgttggccagaatagaaccactggttaaacatattttattcaccattaagtgatctttatcaatattctggattagacaacaaattacctttctgggtgtttcttgtaaactatactcctgtttgaatgttaaactttgttgctaaagtttaattttaagatgtttgaatgttcagtttatgtatttgaactacaataaaccaaccctttttatata

SEQ ID NO: 388975 - DNA, 4596 bp, Homo sapiens
ggaacgtcgggtcggcgggtggatgaacgcggccctctgtaatggcggagcgtggcggggacgggggcgagagtgaacgattcaacccgggggagctcaggatggcccaacagcaggccttgaggttccgaggtccggctcccccaccaaatgcagtgatgcgaggcccaccacctctgatgcgacctcctccaccttttggtatgatgcgaggccctcctccaccaccacggccgccctttggacgtcctccttttgatcctaatatgccgccaatgcctcctccaggagggatacctccacctatgggccctccacacctccagagaccacctttcatgcctcctcccatgagttccatgcctcctcctccgggtatgatgtttccaccaggaatgcctcctgtgactgctcctggtactccagcactacctcctacggaggagatatgggttgaaaataaaactccagatgggaaggtttattattataatgctcggacacgtgaatctgcatggaccaagccagatggagttaaggttattcagcaatcagaactgacacctatgcttgcagcccaggcacaggttcaggctcaggcccaggcgcaggctcaggcccaggcgcaggctcaggcccaggcacaagctcaggcccaggctcaggctcaggcccaggcccaggcccaggcccaggcccaggcccaagcccaagcccaggcccaggctcaggctcaggcacaagctcaggcccaggcccaggctcaggtccaggcccaggtccaggcacaagtgcaagcacaagcagttggagcttccacccctacgaccagtagcccagcacctgcagtatccacttcaacatcatcatccaccccttcctctaccacttctaccacaacaactgctacttcagttgcgcagacagtatcaacacccacaacacaagatcagaccccaagttctgctgtttcagttgccacgcctacagttagtgtttcaactcctgctcctacagccacacctgtgcaaaccgttccccagccgcaccctcagacgttacctcctgctgttcctcattcagtacctcagccaacaacagcaatacctgcttttccaccagtaatggtacctccgtttcgtgttccccttcctggcatgccaattccacttccaggtgtattgccaggaatggcccctcctatcgtacccatgatacatccccaggttgctattgcagcttcacctgctaccttagctggagcaacagcagtttctgaatggactgaatataaaacagcagatgggaagacatattattataataatagaacattagaatcaacctgggaaaaaccccaagaactaaaggaaaaagaaaagttagaagagaagattaaagagccaattaaagaaccctctgaagagcctctgccaatggagacggaggaggaggatcctaaagaagagcctataaaggagataaaggaggagcccaaagaagaggagatgactgaagaagaaaaggctgcccagaaggcaaagccagttgctactgctcctattcctggtactccatggtgtgtcgtttggactggtgatgagcgggtcttcttttataatcccaccactcgtctttctatgtgggaccgacctgatgatctgattggcagggcagatgttgacaaaattattcaggagccccctcataaaaaaggaatggaggaattgaagaaactaaggcacccaactccgacaatgctgtcgatccaaaagtggcaattctctatgagtgcaattaaagaggaacaagaattaatggaagaaattaatgaagatgagcctgttaaagcaaaaaaacggaagagagacgataataaagacattgactcagagaaagaagctgccatggaagctgaaattaaagctgcccgagaaagggccattgtccctctggaggctcgaatgaagcagttcaaggacatgctgctagagagaggggtgtctgctttttcaacgtgggagaaggagttgcacaagatagtttttgatccccggtacttacttctcaatcctaaagagagaaaacaggtgtttgatcagtatgtaaagaccagggcagaggaagaacgcagggaaaagaaaaataaaataatgcaagccaaggaagatttcaaaaaaatgatggaagaagcaaaatttaatccaagagcaacttttagtgaatttgcagccaagcatgctaaagattcaagattcaaagcaattgaaaagatgaaagaccgagaagccttgtttaatgagtttgtggccgctgctaggaagaaagagaaagaagattcgaagaccagaggtgagaagattaaatcggatttctttgaactattatctaatcatcacttggacagtcagtctcgatggagcaaagtaaaagacaaagtagaaagtgatccacgttacaaagcagtagatagttcatcaatgagagaagaccttttcaaacagtacattgaaaaaatagccaagaatttagactcagaaaaagaaaaggagcttgaaaggcaagcccgcattgaggcaagccttcgagaacgagaaagggaggttcaaaaggcccgttcagaacaaacaaaagaaatagatcgagagagagagcagcacaaacgagaagaagctatccagaatttcaaagctcttctgtctgacatggtacgttcttcagatgtgtcatggtctgatactcgtaggaccctccgaaaagatcaccgctgggaatctggatccttattggaaagagaggagaaagagaagctttttaatgaacacattgaagcacttaccaaaaaaaagagagagcactttaggcaacttctggatgaaacttctgcaattaccttaacatccacgtggaaagaagtaaaaaaaatcattaaggaagatcctcgatgtattaagttctcctccagtgacaggaaaaaacaaagagaatttgaagaatatatcagagacaaatatatcacagccaaagctgacttcaggacgcttttgaaagagaccaaatttataacatatagatccaaaaaattaatccaagaatcggatcagcacctgaaagatgtagaaaaaattttacagaatgacaaacggtatctagtactggactgtgtgccagaggagaggcgtaaactgattgtggcatatgttgatgacctggatcgccggggtccacccccacctcccacagcatcggagcccacgagacgatcaacaaaataattctaaatactcttccataggggcatctattcaaaatgcttgcatgagccaattttcaggtttttacatatatgtgcattagtcaacctattgcgaaaccatctgacaaacagaaggagaagcatttgtgaacagtttctgaacagaacactttggaaatatttatgcttttctttgtgtggcatgactgacatacatactcaaatataggctgtctctagtaaatcttaaaatcttgaagctaaaattcatccttttatgaggtgtggaagtcagtgacttggtgacgttcttcctagcagtgttaatacatgcaagaagtaagagcatttgtggcttgaacttgccagatgcaaataccacagactccaagaaaacccgagttggggtttgttttgttttgattttttttttttaaagcgggtaaaagagaaaacactgaaaattgaattcttatcttccagaggctacaattattataatggacaatacttttacctttgtctctaaagatcagattagttttatttgttcacttacgtgctttgattatcccctctgaattatagaccgagtcttgttgtttagcctaagagaagatttatgtagtaatttcttctcaggtatggaaccacggtcataactaacatgttggccagaatagaaccactggttaaacatattttattcaccattaagtgatctttatcaatattctggattagacaacaaattacctttctgggtgtttcttgtaaactatactcctgtttgaatgttaaactttgttgctaaagtttaattttaagatgtttgaatgttcagtttatgtatttgaactacaataaaccaaccctttttatatatctgtattgtatatgattattgttacttaatttttaagagcttattttaatctgtttttaaaagaagcagcaaatagaatttcccacaaagtaagttgactctaaatcttaagtattacctagtttttaaaggtttgaatataataatgcagtatttgcagtataaaaaggaaggaatttgtagagaatcattttggtgctcaagtctcttagcagtgccttattgcctcatagcaagaagatgctggggttttttttgtttttgtcctttgtattaatgtatgatggtttgcgcctttttggcattctttcaacatgtcgtgtacatcacaccatgaatcagttcctaattgatatatctagctttacctcccgagttaaaaaaaaaatctttttattttatgccttcataggttgctcgtttcagagtgccacataaataaaatgtttaacaa

SEQ ID NO: 388976 - DNA, 2813 bp, Homo sapiens
gcaacagcctttttcttggctaatcttatcatatttaactaaatgccattttactgtccttttaagtacaaataacacttaacatttattgggtcattaaattgtggtgagtaatataagacgagtattaacattacagaatggcggactgcttgggataggtaaggtatatatgattattcttcctttaatatcttgagaatggcttttgttaaaggagaactgatactttgtgatattattatttgcaatttaattgagaagggatttcaactatttggttatattcacagattcatttgaataagtaaaattgttcaattttaaatcacaacattgttcacaagattggagcaagcatgagaaatcaaaatataaatcttcaaggctttttctgatgtactgatttttaaaatgtcacacagtagtagttattttaatgagtaattaagtgtctgttatttctatataatataggaatgttcagagccaattagtgtggaaatttgctattgctagcctcccactgcttgtcatttattagtgatggaaacttcagtatggttttatgtctcctttataaacagatatcctgtagatttcaagcaaaattatgacctttatatttttagaggagacttaattatgaggcaatacgtttttattttaaaggtgtctgctttttcaacgtgggagaaggagttgcacaagatagtttttgatccccggtacttacttctcaatcctaaagagagaaaacaggtgtttgatcagtatgtaaagaccagggcagaggaagaacgcagggaaaagaaaaataaaataatgcaagccaaggaagatttcaaaaaaatgatggaagaagcaaaatttaatccaagagcaacttttagtgaatttgcagccaagcatgctaaagattcaagattcaaagcaattgaaaagatgaaagaccgagaagccttgtttaatgagtttgtggccgctgctaggaagaaagagaaagaagattcgaagaccagaggtgagaagattaaatcggatttctttgaactattatctaatcatcacttggacagtcagtctcgatggagcaaagtaaaagacaaagtagaaagtgatccacgttacaaagcagtagatagttcatcaatgagagaagaccttttcaaacagtacattgaaaaaatagccaagaatttagactcagaaaaagaaaaggagcttgaaaggcaagcccgcattgaggcaagccttcgagaacgagaaagggaggttcaaaaggcccgttcagaacaaacaaaagaaatagatcgagagagagagcagcacaaacgagaagaagctatccagaatttcaaagctcttctgtctgacatggtacgttcttcagatgtgtcatggtctgatactcgtaggaccctccgaaaagatcaccgctgggaatctggatccttattggaaagagaggagaaagagaagctttttaatgaacacattgaagcacttaccaaaaaaaagagagagcactttaggcaacttctggatgaaacttctgcaattaccttaacatccacgtggaaagaagtaaaaaaaatcattaaggaagatcctcgatgtattaagttctcctccagtgacaggaaaaaacaaagagaatttgaagaatatatcagagacaaatatatcacagccaaagctgacttcaggacgcttttgaaagagaccaaatttataacatatagatccaaaaaattaatccaagaatcggatcagcacctgaaagatgtagaaaaaattttacagaatgacaaacggtatctagtactggactgtgtgccagaggagaggcgtaaactgattgtggcatatgttgatgacctggatcgccggggtccacccccacctcccacagcatcggagcccacgagacgatcaacaaaataattctaaatactcttccataggggcatctattcaaaatgcttgcatgagccaattttcaggtttttacatatatgtgcattagtcaacctattgcgaaaccatctgacaaacagaaggagaagcatttgtgaacagtttctgaacagaacactttggaaatatttatgcttttctttgtgtggcatgactgacatacatactcaaatataggctgtctctagtaaatcttaaaatcttgaagctaaaattcatccttttatgaggtgtggaagtcagtgacttggtgacgttcttcctagcagtgttaatacatgcaagaagtaagagcatttgtggcttgaacttgccagatgcaaataccacagactccaagaaaacccgagttggggtttgttttgttttgattttttttttttaaagcgggtaaaagagaaaacactgaaaattgaattcttatcttccagaggctacaattattataatggacaatacttttacctttgtctctaaagatcagattagttttatttgttcacttacgtgctttgattatcccctctgaattatagaccgagtcttgttgtttagcctaagagaagatttatgtagtaatttcttctcaggtatggaaccacggtcataactaacatgttggccagaatagaaccactggttaaacatattttattcaccattaagtgatctttatcaatattctggattagacaacaaattacctttctgggtgtttcttgtaaactatactcctgtttgaatgttaaactttgttgctaaagtttaattttaagatgtttgaatgttcagtttatgtatttgaactacaataaaccaaccctttttatata

SEQ ID NO: 388977 - DNA, 1718 bp, Homo sapiens
tcttcatgatccatatcgggaacaagtagtactgtaatgggttaggccaaatatcatctttgatggacctctcctaactcatcagcacctgcatcagaatggtcagtaaaccaggtaaagaagctctctggttcctcatgctgcctcttcctgctggctttattctgcgtttgactcgaacgtttcgtcaagtacgttcttcagatgtgtcatggtctgatactcgtaggaccctccgaaaagatcaccgctgggaatctggatccttattggaaagagaggagaaagagaagctttttaatgaacacattgaagcacttaccaaaaaaaagagagagcactttaggcaacttctggatgaaacttctgcaattaccttaacatccacgtggaaagaagtaaaaaaaatcattaaggaagatcctcgatgtattaagttctcctccagtgacaggaaaaaacaaagagaatttgaagaatatatcagagacaaatatatcacagccaaagctgacttcaggacgcttttgaaagagaccaaatttataacatatagttaatttagtgaaagatgtgaaagtgaaagcttgtgaaagatgctgggattggcagccccgcagactgaagtcctctgttcatccacagaacagatccaaaaaattaatccaagaatcggatcagcacctgaaagatgtagaaaaaattttacagaatgacaaacggtatctagtactggactgtgtgccagaggagaggcgtaaactgattgtggcatatgttgatgacctggatcgccggggtccacccccacctcccacagcatcggagcccacgagacgatcaacaaaataattctaaatactcttccataggggcatctattcaaaatgcttgcatgagccaattttcaggtttttacatatatgtgcattagtcaacctattgcgaaaccatctgacaaacagaaggagaagcatttgtgaacagtttctgaacagaacactttggaaatatttatgcttttctttgtgtggcatgactgacatacatactcaaatataggctgtctctagtaaatcttaaaatcttgaagctaaaattcatccttttatgaggtgtggaagtcagtgacttggtgacgttcttcctagcagtgttaatacatgcaagaagtaagagcatttgtggcttgaacttgccagatgcaaataccacagactccaagaaaacccgagttggggtttgttttgttttgattttttttttttaaagcgggtaaaagagaaaacactgaaaattgaattcttatcttccagaggctacaattattataatggacaatacttttacctttgtctctaaagatcagattagttttatttgttcacttacgtgctttgattatcccctctgaattatagaccgagtcttgttgtttagcctaagagaagatttatgtagtaatttcttctcaggtatggaaccacggtcataactaacatgttggccagaatagaaccactggttaaacatattttattcaccattaagtgatctttatcaatattctggattagacaacaaattacctttctgggtgtttcttgtaaactatactcctgtttgaatgttaaactttgttgctaaagtttaattttaagatgtttgaatgttcagtttatgtatttgaactacaataaaccaaccctttttatata

SEQ ID NO: 388978 - DNA, 282 bp, Homo sapiens
aattccacttggtcatggtgtacaattctttttatatatcactaaatactatttgctaatatttttaaaaggatttttgcatctatatttatgaaagatattcttttgtagttttcctttcttttcagtactgtttgtgtctgattttggtatcagggtaatattagctttataaaatgaattgggtagtgtttccttatcttctgttttctggaagagattgcatcgaatttatgttagttatctttacatgtttggtagaatttgtattgaaactatctg

SEQ ID NO: 388979 - DNA, 375 bp, Homo sapiens
agcaagagaaagtactgaacagttttctcaggtattatgttctaacgggcttgtcctagaaggggttaatatgttagattgttccatgacaccctctttgtacactgtcactactctgcttccctgcccagggcaggaggaatggcctagttggacccagggccctgtcactgcccaatgcacaccaacagtgttggagcactctgttcctcatccaaaggacaaaaagataaccagtccaagcacaaaggacaaagacaacagtttctaggcagtaactgacattcttagtgctaccatattttccttcttctctgttaaagaattctgctcgtgatttttaaaaggaaaagcccaggactgacacagcctttc

SEQ ID NO: 388980 - DNA, 299 bp, Homo sapiens
aacggaagtgtggcctcatgttttagagaatgccatcaattgtaaaaagaaataggaaactcatttttaatatgcctatttaaaaaaaatagatgtcatgactgaaggctttactcatccaaagctgaactattccttggtatataggtgtatagatcactgattcaaaacattcaagagttagaaagggatcttagaggtctcctagttgaacctgctctttcctagttgagggaacagaagctccaggattttcaatgattatttctggtcacaccactaattagtggcagaattgg

SEQ ID NO: 388981 - DNA, 663 bp, Homo sapiens
gtcacagtgaccgccaccgttgccaagggatgggtccctgagacttggcgaagtgggagccctgtgtgatcgtgcgtcagagtcggggctgagaccagccccggccagggcagttaccgggacggtctccggaggccgggattcgcggagggtccaccagcaggaagaaaccccaggaggaagaaacctcagacagatcgccggggaggcagcgcgggatcccagcctcaggcgtgcgcggacggtgtgcggagtctagctttgtaccaggctgcagtgcagtagtgccatctcagctcactgcaacctctgcctcccgggttcaagagattgtcctgcctcagcctcccgagtagctgggattacaggcacatgccaccacacccagctaatgtttgtatttttagtagacacagggtttcatcatgttgcccaggatggtctcaatttcctgacctcgtgatccgcacatctcggcctcccaaaatgctgggattacaggcatgagccaccagaaccggacatgctttccttaaaagctaaatattttaggcttgtgtgccattaggctctgttacaactacttaattctgcttttgtaattctatagcacccattgataatacataaacaaatgagcatgaatgtatctcagtaaaaatt

SEQ ID NO: 388982 - DNA, 349 bp, Homo sapiens
acgcccagctaatttttgtattttttagtagagacagggtttcaccatgtgggccaggctggtctcgaactcccagcctcaggtgatccacccacctcggcctcctaaagtgctgggattacaggcgtgagccaccatgcctggccaagccagtggactttcttaacaggaggccccctctctcctacctctcactgccgcaccagcttcatttctgcccgactctgctgggggtggggctgggggtaacagctgctgtcttggggaactggcctggttagcaatggtgggacccaggaaaagggctcccctgggcaggggggcaggtggtggctgcaggggacacacg

SEQ ID NO: 388983 - DNA, 1020 bp, Homo sapiens
ttctggtcatacttaatacagagagtcctgtattcctttttaaaggagaataagttataaatcatacttgtgggccgggtgtggtggctcacacctgtaatcctagcactttgggaggccgaggcgggtggattacctgaggtcaggagtttgagactagcctggccaacatggagaaaccccgtctctactaaaaatacaaaattagccaggcgtggtggtgcatgcctgtaatcccagctactcaggaagctgaggcacaggagaatcgcttgaacccgggaggcagaggtttcggtgagctgaggtcacgccattgcattccagcctgggcaacaagagtgaaactctgtctcaaaaaaaaattatatatatatatagtaatactttcggaaatcataaagattaaaaggaaaggaaattaatcggaattttgactataagcataaagatcgtctaatgcattatcagatttattcattctgactttgctttacagtctagcacttatgtacatgaaagctatttcatatcttggactctttcttattctagataagatttaatattctgaaacacttcaactaatcttcaactggtaatcattggaagtttttctttagtttttggatctcgctacataagcagctgttaagagtctcaccttgcaaataaactctcccaaagttctgactgacgaaacaggcactaaaccacagttgtgtaatttaagcctgaagcactggacctgtagtgcttttctttttcatagaacttgtcatttgtgttgtatatgctctttcctgtgactctgcagaaaacaggcagacttgtttccaatctaagcctgggcagaaatgtagtggtggtaattctcataatttttcatttttcatttccaagagaaatgttctagtttatatttatcacacatgccaaggatatagtagtaataaggtgactgggcctttagactcagaaaaacaatttctgaactggtcagaataggtttaagtgctt

SEQ ID NO: 388984 - DNA, 348 bp, Homo sapiens
atgaaatcaccatatgatatggtcttattttctaattctcctctcactgttttcttctaatcggattgtattgttgacatggataattttcaaattctgttcatggaaacttggtcagcatcaaataaattcttgttgatacttatcatcatccatttagataagtgtttgactgcagttactgctagtattaatcatatttggtattttatggatgttagttcaaagttttcagagtgatgtaattctagaagttacatcatcgcattcccatgaaaaagaaaatggagggaatgaggggctagtaatttttccaaggtcatacaggtaaaatgttcttatgctaat

SEQ ID NO: 388985 - DNA, 451 bp, Homo sapiens
gcctgtgaaataatttacattaataaataatttattaccataactcctaaagtaattatgggtttccatccaattttttttagcatatgaattgttttgttctgtccattgacttgtatttacaagacttttcctagtagcctttttaaaataattggtattgccttcgctttcttacatatgatgtgatttccaggtctcctcctcgcctgagtgctgaggaaaatggaatgtgtggtgtccattgtccctgcaatacaaatgcactgaatggctgcaattagccaagggtggtgaatggagactgcgctcactccacttgccctgtttcaccaaaaaagatcaaactagtacacgtgtgaccctgggtcccccactgcaagtgggagaagatgtggagggagccttgactgagagtccacgcgtggccccgcttctccccacacaggat

SEQ ID NO: 388986 - DNA, 434 bp, Homo sapiens
gtcaagaaaatggtcacagggaccaaatgtctaataatgaaccaactagttaaaatagttgtttataagttcctgtcaacttgagctttatggatgcgtgccataatttcccattgcgtgtgttgttaggatatatatacgcttttccggcaagcacaatgttaggttattttgatgcatttgtgtgaatggcacagtgagagcagttgctattaaaattacgtattagaatcaaccccagatagttcagcacagaaaagcaatggcatgattagtagtatcgtctttgaagatgaaagtgaactatttggtgaacctcccaacttgatatagaggagtttgactactttagcagagtttttctgtagttcatgtcactaaaagtgaggtagccataacaggggtttggggttagagagggtgaaaggataaat

SEQ ID NO: 388987 - DNA, 760 bp, Homo sapiens
agagcactgtaatcatatatcaatcgtattttaaagtgactttattatttaatgtcaagatgtacccttgatatgaagtagttttatttaataaagcagcaacagatcaagagcacttggtctagaggagtatgctgacaagtggcggcgcctgccttcttctcggggccagtcttcatctcagagctgtctagctttcaggtttgtcttcattgcttccagtctcacctaagcctcatgaatcctcagagacctatttcttaaggtgagtagaggagtgtttgtaatcatcactgtgacttgtttttgtgctaaaataccctttttatttttgagatgggggggtctcactattttgccccagttggtctcgaaatcctgagctcgagcaattgtcctacctcggtctctttattagccaggattacagatgcgtgccactgcgcctggctattagaagatgcactttttaaagaggtgaaggggagcagagtggaatagtggtattgtgacagttacctggaaaacttctaactcctcttcctaaatttacctcttacagagtgtcctgtattaggtagcctcagtttccttcccatgtaatgcatacatagttatttgttattattgcccttagcaggtaaggctgtattaagcaatttatgtgagagaagaaagggagatgacatgattggtggggagccagtttagttaagtttctttggacaaataggacttttgagaaatctgaaaagaataa

SEQ ID NO: 388988 - DNA, 313 bp, Homo sapiens
aagccaccgcacctggcccattacatttataatgttataagggggttgagggggcgtccactggagcagtggttctcaaactcgtgtatgcataggaattacctgaagggcttgttaaaacacaaactgcagggcccacccccagagtttctggttggggaggtgtgggctgggcttgaggatgtgaatctctcacaagctcccaggtgaggctgctggtctgtggacccacttcaagaccaagtgaatcagaagagtcagtgagactggaacaaatgaacgcaagacagtcttcaaaggaagaaccaagagg

SEQ ID NO: 388989 - DNA, 545 bp, Homo sapiens
aggcatatatttgcttcttttatgttttgtttgctgacttgattcttttgcttttgaccctgatggatgacttattaatttatgtatttaatttttgggagagttgagatagtagagtttccgatgaaaactggaaaacctgctagacaaattctaaaagaactgtaatactggattatcatttaaattagtgttatttttactgttttcaccaatgaatttttttaaactataaattaattttttataatggattcagttaatttaacaattcccctgtataattgtgaaaattaaaaatactgattaatgggaccaggcgcagtggctcacacatgtaatcccagcactttgggaggccaaggcgggtggatcacgaggtcaggagttcgagaccagcctgaccaacatggtgaaaccctgtcttactaaaaatacaaaaattagcagggcgtggtggtgcacgcctgtaatcctagctactcaggaggctgaggcaggagaatcacttgaacctgggatggggaggttgcagtgagaggatc

SEQ ID NO: 388990 - DNA, 547 bp, Homo sapiens
atagatgtatgcatatacatatatagtattgttttaaaacataaaaggtatattgtaggcttctttttgctgttcctgaaatagctcatgaaaaataaaagaaaatataaaatatcgtagacttcttttggcaacttgcatttttttactcaatgcatttttgaaaatgaggcatgttgacggacatttatttttactttacctttgaataatattccattatatgtatacactgaattttatttaagtactctatgtatggacattgtttccattttatactattataaataatattcaattatccccatacatgtcccttggcatacatctctgaaaatccccctttagtttatgtaactaaagcatatgttcattttcaactttaatagatattgccaatagctctccaaagtggaaacaggagtggtggctcatgcctgtaatcccagcattttggaaggctgaggcaagaggatcacttgagtccaggagttcaagaccagcctgagcaatgtagtgacaccccatctctaaagaaaaaaga

SEQ ID NO: 388991 - DNA, 386 bp, Homo sapiens
ttctagtgtggcccaacagcaacgctttgctaaaagaactccaactgtaccccagccaaccctacgaactcatccactcactttctcagcttcctgtggagtgaggctcagcaaccaggcccagtcctggccaaagaaccaagcagagaaacgaggaagatgtcacgcaaaactactgaggggctcctggggaagattttccttcctaattaaaggaagaggggcaccgaggggagtctctttggtcccaaccctgattctttccaggattaatgtttactctaagagggtgaggtctttatttgctttactcagagatgtatcacaatggcataacagatgctcattgaaaaaaatggaatgacaatgttttgggcgtacgggga

SEQ ID NO: 388992 - DNA, 312 bp, Homo sapiens
tcttcccaggtgcagctgtgtgtgcacgcccctagaccgctcccccgggggcctgattcacagcaatgatcaccagcacgtgaggaaagactggcgtaggggagagtggccagggttcccgccagagaggtgttgcaggagtccaggcgagaagcgatgcggcccaacagggcattagggtcaccagaaccccctgtctgggcacccatgcttctacctgcagagctggagttttgtttgcagaccttagtgtgggacttcacatttatccttattaaatctaggcatggtcagattgcacccaacactgca

SEQ ID NO: 388993 - DNA, 435 bp, Homo sapiens
tacttggcaacacaaagaaacatggaaatctcaactcacataggagaagagaatcaacagatgccgaaaatgagatggcacagatgccagagacaatgtagatgggaagcctgaatagcaagcaagacagggtcgatcctccctccctggggagaaggatgttccctcggcagtttcctgctctagggcagttgggtttatttcatgactctccctgcacattatctgcctcacagaaaaagaggcctggaacatgcatgtgaatctcctgctgcttggaaagcctcttccttggtggatagaataatctagagccctggcttcattatctagtaacaagcatagacaggtcagatcttgggtgtggtgatatattcagggtgcgatcaccttgagaatccatctagactataagataaccccacctttttctgg

SEQ ID NO: 388994 - DNA, 338 bp, Homo sapiens
tcagggcaacagcgacagagaaggggaaatgggcaggtgggtgaaagtcaggagggaggctgactctgcaggccgcggaaacagctcgctgcaggagtcccgctgcacaggcccgctgcgaggaccctgtgcctgtggcataccgagaggtgcctggggaacagcaggtgctcagccatgcagagtcaggagggtcaggcctccgaggagaacaagacggtgcctgggtgaggtcaagggacttgtagatctcaggtggccgggatacccaacggggacaccaagggcccaagcaggcctctgcacatccaagccaccaaccacagccccagggcccc

SEQ ID NO: 388995 - DNA, 101 bp, Homo sapiens
gtgtatctgtgtgcagtggtgcatccgttagggtgtgtgggaacatgaggttgtctttgagagtgttttcatgagggttatttgtaagggtgtgactgttg

SEQ ID NO: 388996 - DNA, 799 bp, Homo sapiens
gttcctgttgatgaaccctatttcacaggacccctgctaaggtgatttgaggggaaatgagaggaggctcaaataatcacccagcccctgccacttactgaaagtgtaggtccttgtgccccacaccatcagagtttctgcgttagcagatttgtggtttgcccagcagcctgggcgtgtgcatttctaatgggtgcctcaagtgatctgtttctgatttgtatttctattgtgaagagtcagcccagtactgcaggcctcttacctaagcagaatcccagtctggcatcaaagctttagaggacaagttgattcaggcagagaagaacttgggctatacaagcgctgttcttcagcattgaagtattttggaggcattagatagtttaaccctttctcagtcaaggaatatttacagaacatgatctctgggcattgtaactcctggtcttagtggggaatatagggaccccatgtctccatggggtgcacagaatgtctgtgagactgatggagtggagaacgccatcccccagcctctccagctactcgaggcattctgtagaacataagcccatagattgtgtgtgtgtgtgtgtgtgtgtgtgtgcatgcgcgcgcgtgcgcactggaggaacctaagaaactatttggtgcacttcctcttattttagagctcccaaagtgtagctccagaatcgtaaagggatatgctcagtctcacagccagcctgtggatctcagtcccaacactcacccttgtgctactgagtcagctctaagaaaatctgccaaaagt

SEQ ID NO: 388997 - DNA, 398 bp, Homo sapiens
tggaatacagaaatgttggctccttctcctgggacccatcaaactaatgtgctcctcacaatctaataagctcctgtgtccgctttttcatatatttcttcctccaaaagagtaacttgcagagctaagactctaacccaagcctacaggattctaaagcttttaccaccattgcctcccgggcaggattagattcatgggccagcaacccgtgcagtcacatagggccctgcacttagaagggccccagatttagaagtggcctgctcttaagaatgatacaatggactttggggacttagggggaaggatgagagggggacgaaggataaaagactacaaatagggtgcagtgtatactactcgagtgatgagtgcaccaaaatctcacaaatcac

SEQ ID NO: 388998 - DNA, 644 bp, Homo sapiens
cagtcttgaaacataattcaggagctttataactgcagaggcttgcagcccccaaacacgatgccccttaagtttggccgtgggtagacattctctcttagaactgtctcacatggagaataaccccattctggtataatcaaaatgtaactgggttgtagatatgcaaatgctttatgtaatgtttatttggaggaaaattaggcacaaaaatatgggtgtcatctccctgacacctttgtaagttggtgagattaggggctgcaaagtgaaggtatgaaggtgaattggaggctttgagagaaagtgtggggtccaacagtaatgaccaaggaatcatgccatctggcttgaagttatgcaccagctcagtgtgagactaaactgtgctatggctgccactcaagccaatggggccttaggctgaattactagaagtatagagctcagaacgtaggaggggaagagctgggtcctaccatagctggagcctaactttcagtttgagacaggcctgttttacttgttcttagtgggcttcttgggcaaaactaggattgatgcatgttagccacagggaagtagattcttgcattaataagaaagaattcctggctgattagaggtatgcagaaaaaaaaaaa

SEQ ID NO: 388999 - DNA, 170 bp, Homo sapiens
gatgaagtctactttaaacttctaaaatgcagggttatttaaactggcatctaaatccaagctggttttggttggtaattcctctaggacattttactaaatcttgatcttatctaaatgatgctatgtcatagatggactgtttatttgttttgtttgtaatccaggga

SEQ ID NO: 389000 - DNA, 455 bp, Homo sapiens
  misc_feature (127)..(127): n is a, c, g, or t
  misc_feature (147)..(147): n is a, c, g, or t
gcataaagttagacaaatagattagtgaaatagaatacagagatcagaaatagactcacacattgttgaccacattattttcaactaatttttcagaaatgcacaaaggtatttcagtggaaaaaanattaataaatcatactggancaattagttatccataaagtaacctggatctatacaactacaaaaattaactcaaaatggatcgttgatgtatttgtctcttctcatactgctacgcagaaatacccaagactgggtaatttataaagaaaagaggtttaattgactcacagttccacattgccggagaggcctcaggaaacttacgatcatggtggaaggcacctcttcacagggtgacaggagagagaattagtgcaaggagaaaagatgccagatgcttagaaaaccatcagatttcatgagaacttactcactatcatgagaac

SEQ ID NO: 389001 - DNA, 267 bp, Homo sapiens
ctccagtgataaccctccatgcttcattttaagtgttctactaaatcttccctgaatgtcttagaaatgtgcattcttttggtttcgtcttgttgcttctctgtgcttagaaggccctctcctaaggctatctaaatgttaaccatgcttcaagatccagttcaaatccctttttctccattagtcattctcttactactacttttaggaagattctttcatggccattgcgaataaactgcttctgaggatatctacctaatatat

SEQ ID NO: 389002 - DNA, 726 bp, Homo sapiens
aggtcaaaagagtgttctttttgggtaatctctctcaattgctaatacttaaggacctggttttcagaaccattgattatttaaaatgtatgtctttaagattaggctccacccaagatgcctcctcagaggctaagtttgaggttgagaaactagcttaaggagaaagataaagtagcagaaatgtcatggcgggtgagctgatgactcactgccccttccttgaactgcaagaatgacaaaatggaaaaggggaaaaaaaaaggcaatgccctactgcagactagaggctccatgaaacccaagaaattccgagaacttgaagaactacatgggttcttagggtaaaggcagtaagtttaatttccatggtcaaattgttaagtgcatcaaagaaaggacattaggaaagctaaacttgattatactttaccatcagagccatcatcctcaatctgatcattttattctcctgcttaaaaacttcaataactccacattgctactggaccaagtctaaacttacaatcgtatagtagaatattcttcataacatataaccttccttgttaacttcaccttgtaattaattctttttttaaaaaaaatttatttattttttaacttttgagacagggtctcactctgtcacgcaggctggagcggagtggtccaatcatggctcactgcagcctcagcctcctaggctcaagtgatcctcccgcc

SEQ ID NO: 389003 - DNA, 237 bp, Homo sapiens
taataggtattaatttttcttatttcttgaacagaaaggcactatgtccccgttttgacacatattagctctagatccttgaacaaattatgaaacttctctgagtcttcaattcttcatctggaaaatggggataatgatagccctcagggttgatgtgtgtaataaacaatataatctatagaaaatctcctagcatctagagggatatagcaaatatgaactcacatgtgaggt

SEQ ID NO: 389004 - DNA, 442 bp, Homo sapiens
ttccgctgggtctgggggccctgcttcgttaaaaactctcatctcagtctctggcaggactgctgtgggacagggaaagcacccagccgtctgagaacaggtttcaggtgcggcgggggactcaggttagatagtgagatggacactctgcaatgtacctgctgccagaagccagagcaagcttaggagaaaataatcaaaactgccttttcataggaaaacacagagattcctcccagcctgctgagataggtacagctcagcctggaagcggatggctggagaagaccgccctgggtcactctgcttcctagagacgaactgcccagggccaccatcgccaaaacagagcataaataccctagatcactcaagattggccacaggccaggcacggtggctcacgcctgtaatcccagcactttgggaggccaaagtgggt

SEQ ID NO: 389005 - DNA, 354 bp, Homo sapiens
gcagccgccgcgcagccggctctctctgcgcctcgctccgactccggcgcgcaccaagcgggaacccgcgcccgagcccggcgggcgccgctgctgctcctctcggtccccggttcccggtccccgaacgcgccgcggcgaggctgcgcccggcagtggagccgctcggagctgctgggctttggcggccgctcgctgctccgtctggccggaggaccggcggggaaggaaggggaaagcggggacacacacactcgccgcggcgcgcgcgcactgcacactcgtagccgcgcgcccccgccaaggcgcgtccggagcgagtttggccccgcggctccagccccggcacctgcc

SEQ ID NO: 389006 - DNA, 760 bp, Homo sapiens
gccatgaaatgacaagcattggactgctacttggtgtttctgctgcaaaactaggcaccatggatatgtctattactcggcttcttagcattcgcattcctgctctcttacccccaacgtccacagagctggatgttcctcacaatgtccaagtggctgcagtggttggcattggccttgtatatcaagggacagctcacagacatactgcagaagtcctgttggctgagataggacggcctcctggtcctgaaatggaatactgcactgacagagagtcatactccttagctgctggcttggccctgggcatggtctgcttggggcatggcagcaatttgataggtatgtctgatctcaatgtgcctgagcggctctatcagtacatggttggaggacataggcgctttcaaacaggaatgcatagggagaaacataaatcaccaagttatcaaatcaaagaaggagataccataaatgtggatgtgacttggccaggtgctactctagctttggctatgatctacttaaaaaccaataacagtgcttctaggaagcccagacacatggagaagttctgagtgttttggccgatagtcacagatgagattccagcaacagctgggatcacccatgagatgtgcgtgaggaaggctttgagatggtttcagccctagccaccactgacctaagagaccacaagaaagagaatcacctggccaaacccagcagaccttcagaattcagaaataaaataatt

SEQ ID NO: 389007 - DNA, 612 bp, Homo sapiens
tggcagaatttaacgaaatgcttctcttctatagccaggggtcagagggcagaagacaaggtgcaggactccagagaaggccaaatttccagcccagggaagtcccttctccaaagtcagggccccaaagggaagggtggggtccctgatatctgagatggactatctgaggagacactcttgagacattgaacccccagattctcctgtacctcctggcctgcagaagtgacccattgcctctgttggaagacagaggtcctcttttgcttaaagaccatgcagaaactaagggaagggaccttacaagataaggagttcctctctccagcatctgtccccacctcccctcctgaccaccaggctcaaagctggatcatatctcagcatgacctgaccaaggatgtgctttgcatgccagggaccaagagggattaacaagcagaggagtggtgggagcaagccagcagggaccagccgggtctagagaatgttcctagatgtggactctgaaggttctagatcaagggaggctgcatagtagctggagactggagagttaattagtacagaaagactccctaacccctaaaaaggccctgggaagattct

SEQ ID NO: 389008 - DNA, 1514 bp, Homo sapiens
  misc_feature (1510)..(1510): n is a, c, g, or t
  misc_feature (1512)..(1512): n is a, c, g, or t
  misc_feature (1514)..(1514): n is a, c, g, or t
cacaacggccatcaccacctctccgcaccctctgtctccttccttctcgggcctcacccctggccctcgctttcagtgcccagcccggaccgcagcactccagttccgccccaacccgggaaccctggactgaggctcccgtttctgtcctttctattgggcgcacttccgatggcgtcaggaatttcagccaataggagccagccaggaagtacctctctgagcggttggtgccgggtataaaagaaggccagcacggctgctcacgacgccgcggatcccgaagcctgtgtagcagtgagacatcagtgaggctgcaggacgagcaggattggaagcgccccggccagaaagtgaccccccacccctttcaggaccctgtgaacgggaacagccatccagagggttcaggaaggcgtccgcgccctcacctcttctccccatgagctcccccagagctgtggtgcagctgggcaaagctcaacctgcaggcgaagagttggctacagcaaaccaaacagcccagcagcccagcagcccagccatgcggcgcctcacagtcgatgactttgaaatcgggcgtcccctgggcaaggggaaatttgggaatgtgtacctggctcggctcaaggaaagccatttcattgtggccctgaaggttctcttcaagtcgcagatagagaaggaaggactggagcaccagctgcgccgggaaattgagatccaggctcatctacaacaccccaatatcctgcgcctgtataactatttccatgatgcacgccgggtgtacctgattctggaatatgctccaaggggtgagctctacaaggagctgcagaaaagcgagaaattagatgaacagcgcacagccacgataatagaggagttggcagatgccctgacctactgccatgacaagaaagtgattcacagagatattaagccagagaacctgctgctggggttcaggggtgaggtgaagattgcagattttggctggtctgtgcacaccccctccctgaggaggaagacaatgtgtgggacactggactacttgccgccagaaatgattgaggggagaacatatgatgaaaaggtggatttgtggtgcattggagtgctctgctatgagctgctggtgggatatccaccctttgagagcgcctcccacagtgagacttacagacgcatcctcaaggtagatgtgaggtttccactatcaatgcctctgggggcccgggacttgatttccaggcttctcagataccagcccttggagagactgcccctggcccagatcctgaagcacccctgggttcaggcccactcccgaagggtgctgcctccctgtgctcagatggcttcctgagccctgtctgcctctgttccctttgtgtgtgttcagggagctctcctggctctgccacctcatttgtctttatttttttctcttttaagatgtaagatgctaattaataaaagctgaatcatttcataccaaaaaaananan

SEQ ID NO: 389009 - DNA, 1328 bp, Homo sapiens
  misc_feature (1324)..(1324): n is a, c, g, or t
  misc_feature (1326)..(1326): n is a, c, g, or t
  misc_feature (1328)..(1328): n is a, c, g, or t
cacaacggccatcaccacctctccgcaccctctgtctccttccttctcgggcctcacccctggccctcgctttcagtgcccagcccggaccgcagcactccagttccgccccaacccgggaaccctggactgaggctcccgtttctgtcctttctattgggcgcacttccgatggcgtcaggaatttcagccaataggagccagccaggaagtacctctctgagcggttggtgccgggtataaaagaaggccagcacggctgctcacgacgccgcggatcccgaagcctgtgtagcagtgagacatcagtgaggtggctacagcaaaccaaacagcccagcagcccagcagcccagccatgcggcgcctcacagtcgatgactttgaaatcgggcgtcccctgggcaaggggaaatttgggaatgtgtacctggctcggctcaaggaaagccatttcattgtggccctgaaggttctcttcaagtcgcagatagagaaggaaggactggagcaccagctgcgccgggaaattgagatccaggctcatctacaacaccccaatatcctgcgcctgtataactatttccatgatgcacgccgggtgtacctgattctggaatatgctccaaggggtgagctctacaaggagctgcagaaaagcgagaaattagatgaacagcgcacagccacgataatagaggagttggcagatgccctgacctactgccatgacaagaaagtgattcacagagatattaagccagagaacctgctgctggggttcaggggtgaggtgaagattgcagattttggctggtctgtgcacaccccctccctgaggaggaagacaatgtgtgggacactggactacttgccgccagaaatgattgaggggagaacatatgatgaaaaggtggatttgtggtgcattggagtgctctgctatgagctgctggtgggatatccaccctttgagagcgcctcccacagtgagacttacagacgcatcctcaaggtagatgtgaggtttccactatcaatgcctctgggggcccgggacttgatttccaggcttctcagataccagcccttggagagactgcccctggcccagatcctgaagcacccctgggttcaggcccactcccgaagggtgctgcctccctgtgctcagatggcttcctgagccctgtctgcctctgttccctttgtgtgtgttcagggagctctcctggctctgccacctcatttgtctttatttttttctcttttaagatgtaagatgctaattaataaaagctgaatcatttcataccaaaaaaananan

SEQ ID NO: 389010 - DNA, 393 bp, Homo sapiens
gggaaccctcagcaaaatataatggtaccgctattatcagccttgttcgaggcccagggattttgggggaggtcacagtgttctggaggatattccctccttccgtgggggaatttgctgaaacatcaggaaaactgacaatgcgagacgaacagtctgcagtcattgtagtaatacaggctttgaacgatgacattcccgaggaaaaaagcttctatgagtttcagctcactgcagtcagtgagggaggagttctgagtgaatccagcagcactgccaacatcacggtggtggccagcgactctccctatggccgatttgccttttcacatgagcaacttcgagtgtcagaagcacagagggttaacatcacaatcatccgttccagtggag

SEQ ID NO: 389011 - DNA, 635 bp, Homo sapiens
aggtggagccagaatgcagacattagccaacgggatgtggatacaaggtggaatgtggcgtccaaacctctgggtaaggattgtgaagatgccagacccataaaagaggatgatgatgcagacatgggagccaaatgtgttgagagctttgtggcaagcatctggagaaggcatgtggaagacagcatggagaatcagcatataggaaataaaaattagtacaacatctaagaccaccgtcgacattagaatggaaaacccataccaaatgtttattcgaatgtcattacatgcatatttggctaggccaatgtgttcacaaaaggtgtgtggaataatattattctggcagaaagtcaatctttttaaaagaaatatgatagggaaaattgtaccataacttctcagagagacagtcacacaaattttcttgatcagagcatttgtaagaatggtggtgtacctcagtgggtagcatatggcaatatagtggtcaaaggccatcaccagcaagatccctgactcagagatgaaggtggaatggatgaagaagagctgagtgatgcaacgatccagggagatgtccccagcacggaaccagaagatagctaaggcctgaggaatggtgcacgtgg

SEQ ID NO: 389012 - DNA, 269 bp, Homo sapiens
gaagattaattgcactactcgttggcagaagcatgactgatgatcaacacacgatgaaggagaaggaaatgagaaagaaagcaacgaagcaaaggaaaagaggaagcagtgcaggatggcagggcagttcttagtatgcacccagccatttcctagctctacctgctaactgggcctggacatgacaccatggtgacaatgaacacactaagcaaccggaccttggtctctaaataccattcccagtaaaggactccttggagaaatgg

SEQ ID NO: 389013 - DNA, 530 bp, Homo sapiens
tacagggtgtgaaggcaaacaagatgatctcttacaggggaagagagggcttaggacagcctccatgggggcaggtgagtcctgagttgggtgccaaagtatagagtaggagttcctagggaaataaggaaagccagtcacttcccaggggagaaatcagtatagtcacataactcagtgttctagacttcgtaaaccaacccagaggcatgatagcataagtttgactctttagtctgccattactgtgtgttcttaaacaagtcttctatgtctcggggtctgcatctgaaagatgaggataatagcagtacccacctcaaggggctgctgtgaagattacataagatgacctctaattaatcatacattaataaaaatgagtgcaaaattattttaaggcttttcaggagcaagggagtaggaatgctgattctgagatgaagaaaatgttttatacttctaaaatctcttgccaagatcattaagaagtaggagattgaagagaaagaaaggtggtgtgtaagcac

SEQ ID NO: 389014 - DNA, 5326 bp, Homo sapiens
ggatttcatcagggctttcctgctccttctggttgcctcagtcccaggcaagatagggtcccagaatcttacagcccagaggccacctgttgcaacttcttttttacagatggagtcatcagaacccactgtgaggaagtgacttctccttgaggtcacccagacactccaaacagagcagagcaaaagcgcctagaacttgaaattttggacctgtctccaacaccctggggatttccaccaggaaggtgagcacccccactgagaattccaggctgctcagaggtgccagggaacacagaccagggaccagctgtggccccctcctccgatgtgcccagggaagtgggggaagccagcggcagcctgcgattctcaaccaggggaactctcactgtgctttctgagagtctgtgacacgggtcattttctctgacttgctctcttgctttttctcactctaaaaaaaaaaaaaaatgactggacactcctaaagccttcagtcaccatccaggggatttttatcgccacaaagggtaattcctgctccatccctgctgtgactcagctgtgacgttgaaccacacaagccagagagaagaagataaagtcatcagagctcctactcaccagagagtgaggcccaggccaggactccacaaggctggtcccctgccctggagcaacttaaacaggccctctggccagcctggaaccctgagatggcctccagctcaggcagcagtcctcgcccggcccctgatgagaatgagtttccctttgggtgccctcccaccgtctgccaggacccaaaggagcccagggctctctgctgtgcaggctgtctctctgagaacccgaggaatggcgaggatcagatctgccccaaatgcagaggggaagacctccagtctataagcccaggaagccgtcttcgaactcaggagaaggctcaccccgaggtggctgaggctggaattgggtgcccctttgcaggtgtcggctgctccttcaagggaagcccacagtctgtgcaagagcatgaggtcacctcccagacctcccacctaaacctgctgttggggttcatgaaacagtggaaggcccggctgggctgtggcctggagtctgggcccatggccctggagcagaacctgtcagacctgcagctgcaggcagccgtggaagtggcgggggacctggaggtcgattgctaccgggcaccctgctccgagagccaggaggagctggccctgcagcacttcatgaaggagaagcttctggctgagctggaggggaagctgcgtgtgtttgagaacattgttgctgtcctcaacaaggaggtggaggcctcccacctggccctggccacctctatccaccagagccagctggaccgtgagcgcatcctgagcttggagcagagggtggtggagcttcagcagaccctggcccagaaagaccaggccctgggcaagctggagcagagcttgcgcctcatggaggaggcctccttcgatggcactttcctgtggaagatcaccaatgtcaccaggcggtgccatgagtcggcctgtggcaggaccgtcagcctcttctccccagccttctacactgccaagtatggctacaagttgtgcctgcggctgtacctgaatggagatggcactggaaagagaacccatctgtcgctcttcatcgtgatcatgagaggggagtatgatgcgctgctgccgtggcccttccggaacaaggtcaccttcatgctgctggaccagaacaaccgtgagcacgccattgacgccttccggcctgacctaagctcagcgtccttccagaggccccagagtgaaaccaacgtggccagtggatgcccactcttcttccccctcagcaaactgcagtcacccaagcacgcctacgtgaaggacgacacaatgttcctcaagtgcattgtggagaccagcacttagggtgggcggggctcctgagggagctccaactcagaagggagctagccagaggactgtgatgccctgcccttggcacccaagacctcagggcacaaagatgggtgaaggctggcatgatccaagcaagactgaggggtcgacttcgggctggccatctggttaggatggcaggacgtgggctgggcccacaaaggcaaagggtccagaaggagacaggcagagctgctcccctctgcacggaccatgcgacactgggaggccagtgagccactccggccccgaatgttgaggtggactctcaccaaatgagaagaaaatggaaccaggcttggaaccgtaggacccaagcagagaagctctcgggctaggaagatctctgcagggccgccagggagacctggacacaggcctgctctctttttctccagggtcagaaacaggaccgggtggaagggatggggtgccagtttgaatgcagtctgtccaggctcgtcattggaggtgaacaagcaaacccagacggctccactaggacttcaaattgggggttggatttgaagacttttaagtttccttccagcccagaaagtctctcattctaggcctcctggcccaggtgagtcctagagctacaggggttctggaaacattcaggagcttcctgtcctcccagctcctcactcaccttcagtaacccccactggactgacctggtccacagggcacctgccaccctgggcctggcagctcagcttccccaacacgcaggagcacacccagcccccacatcctgtgcctccatcagctaaacaccacgtcacttcatgcaggtgaaacccagtcactgtgagctcccaggtgcagccagaggcacctcaagaagaagaggggcataaactttcctcttcctgcctagaggccccacctttggtgctttccagaatcccgtaacacctgattaactgaggcatccacttctttcagcagactgatcaggacctccaagccactgagcaatgtataaccccaaagaaataatttttagaatctctttcgaagttttcctaaagtgtatggtttgggagttgtttgtactgagccaggtttgaaaaggccattgctgagtttgaggtggtgccaccagttttgcaggtggcatcagaggctggcatgctggcaggaacatcccctcttagccccagtcttctcttttctataatgagacccaccccagcttgcctccctccctggcttctctgaccctcaaaggagatgccacgcaggacagactggagagagaagcctgggcaatactgcccgcctgtcatggcctggtggtggcccacacctatcttctcaccttggaggccacacccaactttccaaagaccctgagacaagtcaggaccctactactctcccctgctgctttcctgacagcttactcttcctccacctgctgagcctgtgccagactccattgctcaaatcgttagggttgcttctataaaaatgggtcagtagcccttcctgttctctccagcccagcatacaggaggatcaaaggaggtgacggagcatcgtggcacggcagtctcaatgggtcagaaacccaggccagctgggctctaagcctggcatcctgtcatgcttagtccttcagctgaagatcagaggaagcctctcccttgccctctccagctctaggggttttcaggaggcccaactgcaataatggagcactagtgcttttatgtgcaatggtgtcgtccatgcacgacagcagcaaacattctggggctgctttttattgttcccacggctgacagcgtggcagcggagactgtggaggcagtggagactgacttcttcctgctgacagctggatgtcacacatgaaggtctggcctagcgagtgatgggtctaggccctgaaactgatgtcctagcaataacctcttgatccctactcaccgagtgttgagcccaaggggggatttgtagaacaagcccccatgagaaacagctgttactctacacttttgattgcctatttctgatggcaagagatacatactctcttcaaagagcatgagatgcagccattctttcagcaaagcttcattgacacctgcacctgttaactgtgttcgacattgaagggagaaaggcaagatgtgcactctggactcaagaaactcttagttcagtggaggaaatgagcagataagtagatcattatgattgagagtaggagaagcttagagaaagcacagaaccccagatccagctggtgaaggagggaaggcttcaggcctttaagctcagcctgagaatattgtgaaatgcagaggatggggaaaagggaagagtaccgacttgaaaacggagagctgtcttggctgagggcagggtctgtgtggcaggatgggggagggagtcagaagggtcagatgaactggagtgtagacagcatcagatgcagcagtgcccaccgcccccccccccaccccccgccctgcccacagagcacctgctggtaaccctgggcctattgaaagcaggatgagatgataatttaagacactgaatgatttcttttccaacaaagctctatgttaagtgcatcaaagatgtgacattgcatcttttacaggtgattcaagggtgggggaggcaagatgcaggcaaagccaccgtttcactgggtggattcagtaggtcccccacccccagcagttcccgaaggtgctggggagatttttaaaacaccagtgacagaatctcacccccgtaagtgataaagcctgagcatcaggatgaagtctccgcagggggttctaatgtacagggtgaggatgcttcagttggcaacgggaagccattcaggtttctgatgggcttttcgggggcacgtggcagggaagagggtttgtgtcacttttagacaatcagcttctcaggggaaactgtctgcactgtgtataccagaagctccacaaatgtctcaggacatcgatgacagcccctcagtagaagacctccctgttctggcccttctgccttgcccccggaggttccagctgtagttgatgaagcaaaactttccaagccagaggaggtgttacagagatggggtttcgccacgttggccagactggtctcgaaatcctgacctcaggtgatccgcctgcctcggcctgccaggctgctgggattacaggtgtgagccaccatgcccggctgagaatttaatatttcattcgtatttttatattgatgacatgttgaaatgataaaaaaaaatttgataggttaaagtatattaaaattcatttcatctgcaaaaagtt

SEQ ID NO: 389015 - DNA, 2721 bp, Homo sapiens
ggatttcatcagggctttcctgctccttctggttgcctcagtcccaggcaagatagggtcccagaatcttacagcccagaggccacctgttgcaacttcttttttacagatggagtcatcagaacccactgtgaggaagtgacttctccttgaggtcacccagacactccaaacagagcagagcaaaagcgcctagaacttgaaattttggacctgtctccaacaccctggggatttccaccaggaaggtgagcacccccactgagaattccaggctgctcagaggtgccagggaacacagaccagggaccagctgtggccccctcctccgatgtgcccagggaagtgggggaagccagcggcagcctgcgattctcaaccaggggaactctcactgtgctttctgagagtctgtgacacgggtcattttctctgacttgctctcttgctttttctcactctaaaaaaaaaaaaaaatgactggacactcctaaagccttcagtcaccatccaggggatttttatcgccacaaagggtaattcctgctccatccctgctgtgactcagctgtgacgttgaaccacacaagccagagagaagaagataaagtcatcagagctcctactcaccagagagtgaggcccaggccaggactccacaaggctggtcccctgccctggagcaacttaaacaggccctctggccagcctggaaccctgagatggcctccagctcaggcagcagtcctcgcccggcccctgatgagaatgagtttccctttgggtgccctcccaccgtctgccaggacccaaaggagcccagggctctctgctgtgcaggctgtctctctgagaacccgaggaatggcgaggatcagatctgccccaaatgcagaggggaagacctccagtctataagcccaggaagccgtcttcgaactcaggagaaggctcaccccgaggtggctgaggctggaattgggtgcccctttgcaggtgtcggctgctccttcaagggaagcccacagtctgtgcaagagcatgaggtcacctcccagacctcccacctaaacctgctgttggggttcatgaaacagtggaaggcccggctgggctgtggcctggagtctgggcccatggccctggagcagaacctgtcagacctgcagtgctttttattgttcccacggctgacagcgtggcagcggagactgtggaggcagtggagactgacttcttcctgctgacagctggatgtcacacatgaaggtctggcctagcgagtgatgggtctaggccctgaaactgatgtcctagcaataacctcttgatccctactcaccgagtgttgagcccaaggggggatttgtagaacaagcccccatgagaaacagctgttactctacacttttgattgcctatttctgatggcaagagatacatactctcttcaaagagcatgagatgcagccattctttcagcaaagcttcattgacacctgcacctgttaactgtgttcgacattgaagggagaaaggcaagatgtgcactctggactcaagaaactcttagttcagtggaggaaatgagcagataagtagatcattatgattgagagtaggagaagcttagagaaagcacagaaccccagatccagctggtgaaggagggaaggcttcaggcctttaagctcagcctgagaatattgtgaaatgcagaggatggggaaaagggaagagtaccgacttgaaaacggagagctgtcttggctgagggcagggtctgtgtggcaggatgggggagggagtcagaagggtcagatgaactggagtgtagacagcatcagatgcagcagtgcccaccgcccccccccccaccccccgccctgcccacagagcacctgctggtaaccctgggcctattgaaagcaggatgagatgataatttaagacactgaatgatttcttttccaacaaagctctatgttaagtgcatcaaagatgtgacattgcatcttttacaggtgattcaagggtgggggaggcaagatgcaggcaaagccaccgtttcactgggtggattcagtaggtcccccacccccagcagttcccgaaggtgctggggagatttttaaaacaccagtgacagaatctcacccccgtaagtgataaagcctgagcatcaggatgaagtctccgcagggggttctaatgtacagggtgaggatgcttcagttggcaacgggaagccattcaggtttctgatgggcttttcgggggcacgtggcagggaagagggtttgtgtcacttttagacaatcagcttctcaggggaaactgtctgcactgtgtataccagaagctccacaaatgtctcaggacatcgatgacagcccctcagtagaagacctccctgttctggcccttctgccttgcccccggaggttccagctgtagttgatgaagcaaaactttccaagccagaggaggtgttacagagatggggtttcgccacgttggccagactggtctcgaaatcctgacctcaggtgatccgcctgcctcggcctgccaggctgctgggattacaggtgtgagccaccatgcccggctgagaatttaatatttcattcgtatttttatattgatgacatgttgaaatgataaaaaaaaatttgataggttaaagtatattaaaattcatttcatctgcaaaaagtt

SEQ ID NO: 389016 - DNA, 565 bp, Homo sapiens
atggcctccagctcaggcagcagtcctcgcccggcccctgatgagaatgagtttccctttgggtgccctcccaccgtctgccaggacccaaaggagcccagggctctctgctgtgcaggctgtctctctgagaacccgaggtgaggtgatggaggagcggagggtgggcagaaagtgggtgccagggagggacccctgatgggaggtgaggggcagaggagcctgtgacttcaggcggtgacttttcttctctgggcctcagtttccacacccttttctcacactccctgacactgcccctctggctgtggtggaaggagaggaagccacagaaaggcatcagctcccacaggggaaagccatccacaccgaggagagcctcgaggctgtgaggccactgtctcactgtgtggtctggtgctctgctaatgtccctaagccgcagctcgcttgtctgtaaagctgttttctgtgtcatagaattgttaatgaagcccaatgaataataatcacaaaagtccttataataacaaatataaacctcttggtgaatgacaaactgtta

SEQ ID NO: 389017 - DNA, 2173 bp, Homo sapiens
ccaggagaagacagctggtttcaaatccctgcccccaggcaagtaaaaccctgacttgctcaagacagaagatcttttctcctgtttttcaaaataaacatatatagggatggaccctgtgcattgtggcctgccttggtgtcctagaattggagccagtctttagcttaatgtctgaagtatttatacggccaatatgtgttttcttatgtcagaccaaactgtctttttgaatatcagttcatttcctctcaccgagtgcttttcggtgagaggcaaagagaaagaatgaacaatcaagtattgacagactggcattagcaggacagagccatactagtgacaagggcatcccaaggcacttgcccagagctgcagagttgtgtgtgccatacctgcggctcaaagggaaggccttctatcccctgagtttctatcagctgaaaatggcaactgctgtctcagtaaaagctctgtcttgactgcagaggctccaaaagcattcacagttgagggggagaaagacagaaagaagaagccaaagataacctgatccctgcctgtctgttggcacctgtcatcctctggcttctgctcccaaaagcaagtctggatgactgagttttgtggacatggcactcccggagacagcagtggccaccatggcacccagagtttgcccaagtactgaatgttttgtgagcaaccatgttccccaagtaggtagccagcgctgcagaaaccaaacagcctcttagctacctgactttaaacaggaatgacctaggtgttctgccaaaggagttatctatcatctctggcaaacttgacaatcatcacttacctcgacaaccctgccccacatcactttataaagtcagcaggatgtcctctcacccaccctgtgctggtgtctaacaaatttatcttgtcatgctcaaatgtgtttggcagccacaccgatcggctgggtgctgaaccgcctctctgtaattgtagcatcaaaatgacaacagcagcagagcagcgaatcttgcacagccccacagcatgcctgagacaagactccaacaagtaataattagctttttttctcctgccgcctacagtacctgtctaactaaagagcttcccaaagtggagggaaaggccatagaatccaggtgtcattcagagccagtccttgctgaaatgtggtcttccagtggaagcacctgtattattgagaggaaaaagtgttggatgcaaagtaacaccaggactagagagaaagagaaaggtgaaccatcctaaggagctttggatacttttttagaaggataaatattatgcttactgaggagaaaaaaaaaagcgatcacagaaaaatttcacagctaatatttttacaaaagttgtgccagacattacagagtgaaaacgtctctcaaggtggaatgctttagagagcaaaggcttagcatagacctagacccttgtgtgggtatgacatgacatgacatgtccatgtcaaaattcactttagtcagaaccagagtattgataaacaaaatgtcagttacctggagcagtcctggagaggttaagacattctatactgttctacgtcaaccatttctacaaagttgtccagacacctaaaagcagctttcttggttatccagatgccagaatcaaccttgtatctgacaatgcacatctgttgattctaaagtatatttatgtgtgtgtgtatgtgtgtgtatacagcacatatttacatctatgaagacatagacacttacagagacccacatgagctggcactttctgagcctttacagcctttaagactcggaggttgagaattagagacacaagagaggctgtggatggcctattaaaatgattaaagatgtaaattcagtgccattttaaaactgttcatatttatcaaacaattactgtctacagctacattttttgttaacttacttaaagtcatgtcgcaagaaagatcaaacccatgaatgcttagtagctaaggctagtgttcaaaagcactctaaaagacattttgtccacattttggaaaagaaaatatttgcatgtttaattcataatttaggctatctttgagtatactgtaaagtgctgtgtgatataatatcaataaagtacttattaaatggca

SEQ ID NO: 389018 - DNA, 2018 bp, Homo sapiens
ccaggagaagacagctggtttcaaatccctgcccccaggcaagtaaaaccctgacttgctcaagacagaagatcttttctcctgtttttcaaaataaacatatatagggatggaccctgtgcattgtggcctgccttggtgtcctagaattggagccagtctttagcttaatgtctgaagtatttatacggccaatatgtgttttcttatgtcagaccaaactgtctttttgaatatcagttcatttcctctcaccgagtgcttttcggtgagaggcaaagagaaagaatgaacaatcaagtattgacagactggcattagcaggacagagccatactagtgacaagggcatcccaaggcacttgcccagagctgcagagttgtgtgtgccatacctgcggctcaaagggaaggccttctatcccctgagtttctatcagctgaaaatggcaactgctgtctcagtaaaagctctgtcttgactgcagaggctccaaaagcattcacagttgagggggagaaagacagaaagaagaagccaaagataacctgatccctgcctgtctgttggcacctgtcatcctctggcttctgctcccaaaagcaagtctggatgactgagttttgtggacatggcactcccggagacagcagtggccaccatggcacccagagtttgcccaagtactgaatgttttgtgagcaaccatgttccccaagtaggtagccagcgctgcagaaaccaaacagcctcttagctacctgactttaaacaggaatgacctaggtgttctgccaaaggagttatctatcatctctggcaaacttgacaatcatcacttacctcgacaaccctgccccacatcactttataaagtcagcaggatgtcctctcacccaccctgtgctggtgtctaacaaatttatcttgtcatgctcaaatgtgtttggcagccacaccgatcggctgggtgctgaaccgcctctctgtaattgtagcatcaaaatgacaacagcagcagagcagcgaatcttgcacagccccacagcatgcctgagacaagactccaacaagtaataattagctttttttctcctgccgcctacagtacctgtctaactaaagagcttcccaaagtggagggaaaggccatagaatccaggtgtcattcagagccagtccttgctgaaatgtggtcttccagtggaagcacctgtattattgagaggaaaaagtgttggatgcaaagtaacaccaggactagagagaaagagaaaggtgaaccatcctaaggagctttggatacttttttagaaggataaatattatgcttactgaggagaaaaaaaaaagcgatcacagaaaaatttcacagctaatatttttacaaaagttgtgccagacattacagagtgaaaacgtctctcaaggtggaatgctttagagagcaaaggcttagcatagacctagacccttgtgtgggtatgacatgacatgacatgtccatgtcaaaattcactttagtcagaaccagagtattgataaacaaaatgtcagttacctggagcagtcctggagaggttaagacattctatactgttctacgtcaaccatttctacaaagttgtccagacacctaaaagcagctttcttggttatccagatgccagaatcaaccttgtatctgacaatgcacatctgttgattctaaagtatatttatgtgtgtgtgtatgtgtgtgtatacagcacatatttacatctatgaagacatagacacttacagagacccacatgagctggcactttctgagcctttacagcctttaagactcggaggttgagaattagagacacaagagaggctgtggatggcctattaaaatgattaaagatgtaaattcagtgccattttaaaactgttcatatttatcaaacaattactgtctacagctacattttttgttaacttacttaaagtcatgtcgctttccacctagacgtcgctttccacctag

SEQ ID NO: 389019 - DNA, 2497 bp, Homo sapiens
ccaggagaagacagctggtttcaaatccctgcccccaggcaagtaaaaccctgacttgctcaagacagaagatcttttctcctgtttttcaaaataaacatatatagggatggaccctgtgcattgtggcctgccttggtgtcctagaattggagccagtctttagcttaatgtctgaagtatttatacggccaatatgtgttttcttatgtcagaccaaactgtctttttgaatatcagttcatttcctctcaccgagtgcttttcggtgagaggcaaagagaaagaatgaacaatcaagtattgacagactggcattagcaggacagagccatactagtgacaagggcatcccaaggcacttgcccagagctgcagagttgtgtgtgccatacctgcggctcaaagggaaggccttctatcccctgagtttctatcagctgaaaatggcaactgctgtctcagtaaaagctctgtcttgactgcagaggctccaaaagcattcacagttgagggggagaaagacagaaagaagaagccaaagataacctgatccctgcctgtctgttggcacctgtcatcctctggcttctgctcccaaaagcaagtctggatgactgagttttgtggacatggcactcccggagacagcagtggccaccatggcacccagagtttgcccaagtactgaatgttttgtgagcaaccatgttccccaagtaggtagccagcgctgcagaaaccaaacagcctcttagctacctgactttaaacaggaatgacctaggtgttctgccaaaggagttatctatcatctctggcaaacttgacaatcatcacttacctcgacaaccctgccccacatcactttataaagtcagcaggatgtcctctcacccaccctgtgctggtgtctaacaaatttatcttgtcatgctcaaatgtgtttggcagccacaccgatcggctgggtgctgaaccgcctctctgtaattgtagcatcaaaatgacaacagcagcagagcagcgaatcttgcacagccccacagcatgcctgagacaagactccaacaagtaataattagctttttttctcctgccgcctacagtacctgtctaactaaagagcttcccaaagtggagggaaaggccatagaatccaggtgtcattcagagccagtccttgctgaaatgtggtcttccagtggaagcacctgtattattgagaggaaaaagtgttggatgcaaagtaacaccaggactagagagaaagagaaaggtgaaccatcctaaggagctttggatacttttttagaaggataaatattatgcttactgaggagaaaaaaaaaagcgatcacagaaaaatttcacagctaatatttttacaaaagttgtgccagacattacagagtgaaaacgtctctcaaggtggaatgctttagagagcaaaggcttagcatagacctagacccttgtgtgggtatgacatgacatgacatgtccatgtcaaaattcactttagtcagaaccagagtattgataaacaaaatgtcagttacctggagcagtcctggagaggttaagacattctatactgttctacgtcaaccatttctacaaagttgtccagacacctaaaagcagctttcttggttatccagatgccagaatcaaccttgtatctgacaatgcacatctgttgattctaaagtatatttatgtgtgtgtgtatgtgtgtgtatacagcacatatttacatctatgaagacatagacacttacagagacccacatgagctggcactttctgagcctttacagcctttaagactcggaggttgagaattagagacacaagagaggctgtggatggcctattaaaatgattaaagatgtaaattcagtgccattttaaaactgttcatatttatcaaacaattactgtctacagctacattttttgttaacttacttaaagtcatgtcgcaagaaagatcaaacccatgaatgcttagtagctaaggctagtgttcaaaagcactctaaaagacattttgtccacattttggaaaagaaaatatttgcatgtttaattcataatttaggctatctttgagtatactgtaaagtgctgtgtgatataatatcaataaagtacttattaaatggcactttaatgttttcttttaaaataacgcactgttctaaacttcagtattgactattgactcgtgcatagaatccaatgctgtaattagaaagtaatctgtgactagaatagacctttgtccctgttagtagccctgttgccatgttcaggcttttaaaaaatgcttttgtgtcaccaaatatatctataaagaaaacaaaatttctgttcagaggcctctgaaacttggctttcttacatgtggttggtttatgtgacaatccctatgaaatgagtggacgtatgatttttgaattaaatgacttttccatttggtggtattttc

SEQ ID NO: 389020 - DNA, 306 bp, Homo sapiens
cttgagtccttcttctgattggccacatgcccatagagtttgttaattcctttctctgcaccagtggttggcaaactttttctgtaaagggtcagacagtaaatgttaggttttgcaggccacgcagtctgttgccactattcaactctactattgtggcacaaaagcagctactggatgagtgtgactgggttccagtaaaactatttatgggcctggcatggtggctcacacctacaatcccagcactttgagaggccaaggcaggatgatcgcttgagcccaggagttcgagaccagtctggg

SEQ ID NO: 389021 - DNA, 213 bp, Homo sapiens
tgccaatggcatgagggctatactggccaactaggtctttgcttaaggttccaaagagtgcaaacactatagaaggtcaagtctccctcctattaaaagactttttttttctaacattttgaaatcttttgttacatgtttacacggaagtatttgaagaaatacaagggagtacaagcagtttttctaatgtttcataaagaaaaacaggtg

SEQ ID NO: 389022 - DNA, 382 bp, Homo sapiens
gtggaaggggaggcagcacactcagtgtaacttttactgaaaaaaatctgcaagtaagcagatctgagcaactcaaacccatgttgttcaagggtcaaccatgtaagcagaatggttgtggtagagcagaggaaaggtaagagaaagagtatttaaaacaatgagagcaatatatttccctcattgcttatcacttgcaattagaaaagcccagcagattgatttggttaaatattttgagtaagtttaagaatttttctttcaaattcaagagtttgtctgggcagatagtagaaaaaatataagataagtgaactcagagagcagtgcttcctctagattctgctgaggggtctccatcctggtgaatatttccttgaac

SEQ ID NO: 389023 - DNA, 393 bp, Homo sapiens
actataacttcatactaagtctttatatttggtaggacaagaattgctcaccttcttcttcacaagtgcgttgcctgtttcttattctttgttcttctattatggtttcgattcagtttgtccaattccaccaaaaaaagttgaaattttgtttggaattgcatagaatctatagataaatttgagggtaactgacatccttacagtattgttttctaatatgtgaatatggtgtgtctctgtttacatcccctttaatgtcttttaatcaatatttttttttttttttgagatggagtcatgctctgtcgcccaggttggagtgcaatggcatgatctcagctcactgcaacctctgcctcccaggttcaagtgattctcctgcctcagcct

SEQ ID NO: 389024 - DNA, 309 bp, Homo sapiens
agaaaaatcatattttctaatgatttccaccaaattattgcctttaaaggttaatacttagcctctttgcacaacctcaataatggaaatttttacctacctatttttaaaaattttattacttttttttattgaggcataatttaaactcaggaaaattgacaaatatcgtgtatttggtttgatgagtttgagggggaaatgaataaactagtactgacagttgttgaagtaggccaacccggaaaacatgaaatttaaaatattaaagacagtttttaggaaagattctttgtgactggcttcttg

SEQ ID NO: 389025 - DNA, 1650 bp, Homo sapiens
cctgaagctactggttggttccctgagaggtcccagaactctgcaaagtgagtccagcgctgagatttttcttgcagatccatcaggatgagcatccaggccccaccgagactactggagctggcggggcagagcctgctgagagaccaggccttgtccatctctgccatggaggagctgcccagggtgctctatctcccactcttcagggaggccttcagcaggagacacttccagactctgacggtgatggtgcaggcctggcctttcacctgcctccctctggtatcgctgatgaagacgcttcatctggagccattgaaagcattgctggaagggcttcatatgctgcttacacagaaggatcgccccaggaggtggaaacttcaagtgctggatttgcgggatgttgatgagaatttctgggccagatggcctggagcctgggccctgtcctgcttcccagaggccatgagtaagaggcagacagcagaggactgtccaaggacgggagagcaccagcccttaaaggtgttcatagacatctgcctcaaggaaataccccaggatgaatgcctgagatacctcttccagtgggtttaccaaaggagaggtttagtacacctgtgctgtagtaagctggtcaattatctaacgccaattaaatatctcagaaagtcattgaaaataatatacattaatagtattggggagctggaaattcacaacacgtgctggccacatctgataagaaagctttattgttacctgaaggagatgaagactctttgcaaactcgttttctccaggtgccatcattacacgtcagataatgaactcgagggatggttagtcaccagattcacctctgtgttcctcaggctggaacacctccagttgcttaaaataaaattgatcaccttcttcagtgggcacctggaacagctgatcaggtgcctccagaaccccttggagaacttggaattaacttgtggcaacctattagaagaggacttgaagtgtctctcccagttcccaagcctcggttacctaaagcatctgaatctcagctacgtgctgctgttccgcatcagtcttgaacccctaggagctctgctagagaaaattgctgcctctctcgagaccctcgtgttagagggctgtcagatccactactcccaactcagtgccatcctgcctggcctgagctgctgctcccagctcaccaccttctactttggcagcaattgcatgtctattgacgccctgaaggacctgctgcgccacaccagtgggctgagcaagttaagcctggagacgtatcctgcccctgaggagagtttgaattccttggttcgtgtcaattgggagatcttcaccccacttcgggctgagctgatgtgtacactgagggaattcaggcagcccaagaggatcttcattggccccaccccctgcccttcctgtggctcatcaccgtctgaggaactggagctccatctttgctgctagggaaggcgtgcccagtggggtagagaaatccaaagttctcttccaggcacttggacactaaaatctactatgtaggtgcaaactatttttctcttttcttatttatttcattttttaataattccaaaatgaattaaa

SEQ ID NO: 389026 - DNA, 270 bp, Homo sapiens
gaagaagtccaagaccatatgcagtctacagaggttccatctatggagcaaaagttgggagcagaccagcagggttggcagcgtgaagattctagttctctctgttgaagtctcaactgccgagccagcactcagacacagagaatggtggttcccaaaagttttgggaatccatattgtgaacaggctgacactctgcctacctactgtttaagggaatttagactgttttgggaaacaatcgtgtaagaaggcttgcctgtgctgcct

SEQ ID NO: 389027 - DNA, 1022 bp, Homo sapiens
cacagaagcagcttccctggagaacagcaagctcgtcagctgccacaacagctatgccaccaccctagcatggcctgggggctgccttgccatcagaacactgctggtgccaacccacacctcttcctggggtgctactcaacctccagcctacaggggctggagtatgggggccagcgtggagatgcccatgggaaacccggggtcctgcacggtgagcttgagcctcacgaccacacttcccgcctggagagacacgatctgcattctcagcttcccacttcggtacaagtcagacaccactggtgggaaggagctctcgacctagccaagaagaggcaacagcagacatccatcaacgtcttcacgaccattaagcagggttccaggtgtgaccgatggatggtgcttggagccatttctctcctctacaatcaagaggaggcacctgacgaccgacctctcagagcacgcagagaagtccgttcacagcaccttagctgggctttccctgggacggccgggcctggcctggtgtgtgctggggactcacagtgaccactgcaatcaagctcccagttgtggagcatcagatggacaatcccctctgagtgtcctgaaaactggtgcgaaggtcatttgtgtgagcgtgtgagaaagactgattgattgatagatggagaggccccaccaaggaacaatgcctatggctatttggagctgtcccccctcttactaggctgtatcccacacaaaacacgcacacagagccaggtgcttagggctacccatgcccaagcaagggagataccagcctggttccctgcctttgtgccaacccatacttgcacacacaagtgagttaacatttcaaaagggagggaattctctgaaaacattgaaaaccagattcctcctccaggcaaatgttgggaagcaacactctgtgggtctctggcatttctacacatcttgcaagtagacgcactaactgcccttttgttccagaatatctttccaag

SEQ ID NO: 389028 - DNA, 431 bp, Homo sapiens
gggacacagaaaggctttcagcaaggaaatgccatgttcagactttaatttttagatgactatttagagtgcagtatgaataaggtattgtaggtgccaaaagagctacagtgttagggatgtagttctgtgttcccagaatgaaatgataagagctttaggctaagcatatagtgaaaagggaggaaagtgaataaatttaagagctgtttaagtggtctattttgtcaagattccttggttacatgtaattcgaactttcaaatgagtgaaatgtgaggtgagaacagtattactagctcacaatttccaaccacagaaagaccagggatggcagtgacaagtcacggacacaagggcccagggccctctcaccgtctctctgtgcagtgggttccttgcctctgaatgcagtagaccagtccagtgtg

SEQ ID NO: 389029 - DNA, 413 bp, Homo sapiens
tccggaaagtgctgagaggaaatgtatctatactactgcgttctgtcctctgtatgacctttgtgtgatgacgtgcaaaatagatggtagagattgggataacaaatgatttgtggaacatcgtggtgataattttactgtcttaaaggtagaatccatgaacttggccttgccactatataggcttttgaattttgacaagccttggggggatgaaacctagaataagttatttatggcgttacgctttaatagggttgacacttaaaaccttgttttcataaatgctaccttttggttatgttgatctgatgaacagatactggctgtcattgaaagaaagttaaccgaatgttcagatacttattgggctcctggaacatggctgctctgtagcttcatgaatattcata

SEQ ID NO: 389030 - DNA, 629 bp, Homo sapiens
cggggtttcaccgtgttagccaggctggtcttgaactctggaccttgtgatctgcccatctcagcctcccaaagtgctgggataacacgtgtgagccactgcgcccagccttatctccttttttatacatgaatagcagcgtgctatatatatagtctttgctccatgcaattattttattttatttttttttttagaaaggttcttgttctgtcacccaggctggagtgcaatggtgcaatctcagctcactgcagcttcgacttcctggctcaagcaatcttcccatcttagcctcccaggtagctgggactacaggcacacatcactgcacccagctaaattttaattatttttttagggacaaagtctccttcactgtgttgcccaggatggtcttgaactcctgacctcaggtgatcctacttccttggcctcccaaagtgctgggattataggcatgggccattgcatctggcctcattgtttatttgtttgttttcaagatggggtctcactctgccacccaggctggagtgcagtggtgtaatcatggctcactgcagcctcaacctttcctgttaaaatcagcctgcaaagcctcgaaattctctcccaccttttgccat

SEQ ID NO: 389031 - DNA, 120 bp, Homo sapiens
aaactatgagaaatgatccaatgattcttgtgaacttcccttccctacttcctgccacccacgcctgctccactctgtgcagcctggagaaggtcctccacagggaagatggaaacaaac

SEQ ID NO: 389032 - DNA, 416 bp, Homo sapiens
acagaagaggcatctgagtaacagacatgtttcctttactcacctagcttcctttttctatcctttattgaattataataatagaataggtcttattatcaattaagtgatctttcttgttctcacaatgagagcagctgcatcaagtaagttttcgccttactaaaaactttcagatgtcttttggttttattattcaatttttgagatgtataattaaatccctgggaatgagtggatataatttagaaggcaattcagctctgtgaacttatacagatgtcactaaaatcatgtttgatggataatttcagaaacaatgaaagcatcattaactagagtaacttggaaaagcacaagtaaaagacactgttattttgacaatattgagttaaatagaggccacaggaaaaaaa

SEQ ID NO: 389033 - DNA, 373 bp, Homo sapiens
ggaaaattaatgccattgtaaaaaaaaagatctattaattttaaaaattcaagggcaaacactaataaaatagaagcaggatattttccactgccatgctactaaatagggggaaaaaaaaggaataggccaggcatggtggctcatgcctgtaatcccagcactttgggacgctgaggtggatagatcgcctgaggtcaggagttcaagaccagccttgccaacatgctgaaaccttgtctctactaaaaatacaaaaaattagccaggcatgatggtggttgcctgtaatctcagctactcgggaggctgaagcaggagaattgcttgaacctgggaggtggaggttgcagtgagccaagatcatgcaatt

SEQ ID NO: 389034 - DNA, 156 bp, Homo sapiens
cagaggttaacatgggtttaccattaaaaaggagtaattacaacaatgataataataacttatgaagccctttgtgtgtcctgggcacagggctaaatgctttccttgtattgttgcactgaatcttcacaacttccccatgagtaagcattctta

SEQ ID NO: 389035 - DNA, 347 bp, Homo sapiens
ggtcacctgaggaggagaaaatgttaagtatgagagagaagaccgaggacaatgccagagggaatgccacagtttagaaatcatggagatgagaaggaatcagcaaaaaagattgagaaggagtaggcagtgaaataggagaacctagagagtggtgtcgccaagactaagggaaagacgtgtttcaggaaagaggaagtgatcagctgtatcgaatactgcagagaaattgaggaagatgagtacttagaattggttattgcatttggctagggacatgttatcagtagcctatctcacagtgttgagagagttccccatggatgttgttaaaaactctgttttga

SEQ ID NO: 389036 - DNA, 585 bp, Homo sapiens
aaaggaaaggaaaggggaaagggaaaggaaagggaaggaagtttctgctgtgctgaaatacatacattatatcccagccctgctttctccctagatgtttagtgtcacagatttctaggaagttctccttgatgtgactttcctcgctgtgctgcagtttcaagtctttttcttttactatattccttaatgtatcctggaaagagtctgttcacacccacccacctaaggctcttaacaaaaagactgtacttatattttggatcctgattttaaaaatcataagacatttttccagatattcatgaaattttatatggactgagtttgataattttgtctagcatgaaatgacattgtgcttatgcaagaaaatactcatacattttaaatttgtagggttaaaataacacgatgtctgggatttgcttttacatactttagccaaaacaaaaacaaaaacaacaactagtaaggataaacaaagcaaatgtggcaaggtgttgatagttgttggacctgggtggggcagatggaggtccagcatatccttataaatactcagacctctcttggtcagttaca

SEQ ID NO: 389037 - DNA, 286 bp, Homo sapiens
tttttgtcatatcgtaataaaatgaaggcaaagagctcctacaatcaatgagataaaccacaatcaaatagaataaatgacaaaaaataaacagttcacacacaaaaatcactcttaaatatgtatctacaaaaatactacttaaattctgaaaggccaccaattttctcttatattaacaaaggcccaccaagtcttaacaatatcccatgcagcaagactcctattctgttaattggtacagtctctatagagggcaactaaaaaaacatttctttgaccaagc

SEQ ID NO: 389038 - DNA, 404 bp, Homo sapiens
ggggaatagatagtgttaggagagctaattttgtaaacccaagcttttataaaagtgacattgaagttatgttagatatggaaattggcacatctgacccagacactgcaaccctgcaaggggagaacctctgcccctggtgcccgggagaggcccagggacacagggaaccacaatcactacatcaatgcactgatgatgagcacacagcaacacacactcacacaggatgctgttaacagcaacacacacactccatgcctgcacaggcacatgcatacacgtgtgttacaccaacacatgcagagtcacactcaagcaggagtcacaacccacactcactgtgtttgtccagagcctgggatccccaagaaatggacagaccttaaggagctcctctgacc

SEQ ID NO: 389039 - DNA, 1072 bp, Homo sapiens
agtctgacaggacaataaaatttagaaatggagttggaggatgtcataatacaattcaccagtgtcctatcttacatgcaatttcaaaggcagacaagaggaagtcatcagtcacattttagaggcaccaaacaggtgccacatccatacaggctgactccctgctcccagcccattttttcctgaatctttggcttgccaatcaagaatgtcctcaaaatttgctcagaggtgtgggcctttgggtaaaggtgtcttcagaagctccacattaaagatccatcagtggttaagggcaaattgaagagaaataaagactaagatatttttttaaaagactgaaagaatagaacaatgaaaaagccccatctgtaatacggtttttctttttctttttttttgagacaaggtctctctctgtcacccaggctggagtagagtggcattatcctggctcattgcaatctgggcctcctggtttcaagtgattctggtgtctcagccacctgagtagtcaggattacaggtgcacaccaccacgcatggctaaatttttgtatttttagtagagatggggtttcaccatgttgagcaagctggtcttaaactcctgacctcaagtgatccgtctgtcttggcctttcaaaatgctgggattataggcgtgatccactgtgcctggcctggtgtttctttaggtataatgtctttaccagagagctaatgcagactgtcatgggtgagattgttctctgatgttcaattcccctactttgtatattgagtcagtatgagatgcgatttgtttggcaagcacctttgttcctgctgttactgacccttatcttgtagcctcacagctactatgcttttgtccagtccaactagataggagcttcttcctctgctgcagtgactggtctcacccagggctttcaggaaggtgagaataagcaccttcctcctcccaggaagttttgagtttcctgtgtttcatttctgaatgtaatgtctccatttattttcaattatgtttgattatatttgattaaaaacaataatttttttggca

SEQ ID NO: 389040 - DNA, 1018 bp, Homo sapiens
agtctgacaggacaataaaatttagaaatggagttggaggatgtcataatacaattcaccagtgtcctatcttacatgcaatttcaaaggcagacaagaggaagtcatcagtcacattttagaggcaccaaacaggtgccacatccatacaggctgactccctgctcccagcccattttttcctgaatctttggcttgccaatcaagaatgtcctcaaaatttgctcagaggtgtgggcctttgggtaaaggtgtcttcagaagctccacattaaagatccatcagtggttaagggcaaattgaagagaaataaagactaagatatttttttaaaagactgaaagaatagaacaatgatctctctgtcacccaggctggagtagagtggcattatcctggctcattgcaatctgggcctcctggtttcaagtgattctggtgtctcagccacctgagtagtcaggattacaggtgcacaccaccacgcatggctaaatttttgtatttttagtagagatggggtttcaccatgttgagcaagctggtcttaaactcctgacctcaagtgatccgtctgtcttggcctttcaaaatgctgggattataggcgtgatccactgtgcctggcctggtgtttctttaggtataatgtctttaccagagagctaatgcagactgtcatgggtgagattgttctctgatgttcaattcccctactttgtatattgagtcagtatgagatgcgatttgtttggcaagcacctttgttcctgctgttactgacccttatcttgtagcctcacagctactatgcttttgtccagtccaactagataggagcttcttcctctgctgcagtgactggtctcacccagggctttcaggaaggtgagaataagcaccttcctcctcccaggaagttttgagtttcctgtgtttcatttctgaatgtaatgtctccatttattttcaattatgtttgattatatttgattaaaaacaataatttttttggca

SEQ ID NO: 389041 - DNA, 1200 bp, Homo sapiens
agtctgacaggacaataaaatttagaaatggagttggaggatgtcataatacaattcaccagtgtcctatcttacatgcaatttcaaaggcagacaagaggaagtcatcagtcacattttagaggcaccaaacaggtgccacatccatacaggctgactccctgctcccagcccattttttcctgaatctttggcttgccaatcaagaatgtcctcaaaatttgctcagaggtgtgggcctttgggtaaaggtgtcttcagaagctccacattaaagatccatcagtggttaagggcaaattgaagagaaataaagactaagatatttttttaaaagactgaaagaatagaacaatgaaaaagccccatctgtaatacggtttttctttttctttttttttgagacaaggtctctctctgtcacccaggctggagtagagtggcattatcctggctcattgcaatctgggcctcctggtttcaagtgattctggtgtctcagccacctgagtagtcaggattacaggtgcacaccaccacgcatggctaaatttttgtatttttagtagagatggggtttcaccatgttgagcaagctggtcttaaactcctgacctcaagtgatccgtctgtcttggcctttcaaaatgctgggattataggcgtgatccactgtgcctggcctggtgtttctttaggtataatgtctttaccagagagctaatgcagactgtcatgggtgagattgttctctgatgttcaattcccctactttgtatattgagtcagtatgagatgcgatttgtttggcaagcacctttgttcctgctgttactgacccttatcttgtagcctcacagctactatgcttttgtccagtccaactagataggagcttcttcctctgctgcagtgactggtctcacccagggctttcaggaaggtgagaataagcaccttcctcctcccaggaagttttgagtttcctgtgtttcatttctgaatgtaatgtctccatttattttcaattatgtttgattatatttgattaaaaacaataatttttttggcaaccaagatttctgtacatgtgtcatagaaatagttgaacttttccacaactgtatactgacaaacattattctttcttaattaattcagtagctatattaaaatatgtattagatcaagttcataatg

SEQ ID NO: 389042 - DNA, 1813 bp, Homo sapiens
  misc_feature (156)..(156): n is a, c, g, or t
ctgctttgtttacccaagcaagcctgggcaatggcgggcgcccctcccccagccttgctgcggccttgcagtttgatctcagactgctgtgctagcaatcagcgagactccgtgggcgtaggaccctcctagccaggtgcaagatataacctcgcnggtgcgccgttttttaagccggtccgaaagcgcaatattcgggtgggagagacccgattttccagtgagatgaacccagtacctcagatggaaatgcagaaatcacccggtcttcttgcgtcgctcacgctgggagctgtagaccggagctgttgctattcggccatcttggctcctctcctgcactgcaagaatggactaatacgctatgtgaagacaaaggggatgtctgcaagccaggacgagtgcgttaccagaaactgagttctgctggactttgatctaggacatccagcctccagaatggaatgtgccatatgtggagacctgcatggaaaggaactgaggatgctctctcactaaaagctagaaggaactgaggccctcagtcaacagtctacaagacactgaatcttgccagcagccaagcagtgagcttgaaagcagatctatcatcagctgaaccttcagatgagaccgcagcctaagcagataccttggttgcagccatgtgagacaacctgaaacagagggcacagctaagcctcagccaggttcatgaccctctgaggaaactgtgagaaagcaaatgtcattttaagctatttaattttggaggtagtttattacacaacaataaataactattataattatcttgaggatttatttcctggggagaatacatggaattgcatatataggtcctcatatgcagaatactggtaccctagagatgttcaccccagagatgttttaggaacctgtgaatatgttacattaaatggcaaagttttcctggatggtttaagtttaagatggaaaagttttactggattatccagtgggtccaatctagtaacatgagtccttaaaaatggagaatattttttggccatgatcagagagacatgtgatgatggaaaaagtgtcagagatgcaatgtgaggggactaaaactgctgttgctgactttaaagatggagagaggggaacccgagtcaaggaatgcaaatggcctctggaagctggaaaaagcaagaaatggattctcctttagagcctgtggaataaaatgcagtcatgctgacaccttgattttacctcagtgagaccaatactggagtatgaccttcggagctgaataaaattatacgtacacatcttaatttcttgggatttgattacttcttctgctttgaaattagaccaagtttagcctgcctttgctattttggcgtatctccaattcttcatgattttctcatagtgtgctcatatgatgcaaatatccacctagccctgacatgaaacttaattgaaagtatccaacagtggcgcaaaggccacataaggacagtgagaaggcagccacctgcaagccaggaagaaaggtctcaccagataccaaccctgccagcatgttgatcttggacttccagcctccaaaactggccttctgctcacatgggcttccgtgcacctgcttcaggagacagcaacacttgcgcccgcaccgcggcaggctcccatcacctggtggatatgccgcgccgagtctcatcacaccttagtgaaggaacacatggacccatatgttagcggatgtatttacatcgttttatacagaaaggggaagtatgtttcacaataaatg

SEQ ID NO: 389043 - DNA, 1429 bp, Homo sapiens
tcttgttgatgtagtaacttacttttaactaatagaatatggcaaaagtgaaggaatggcactcttgaggttagattttaaaagaccatgacaaccaccttcctgacaccttttctctctctctctctgcttactcactctgatgaaggaatgtgccatatgtggagacctgcatggaaaggaactgaggatgctctctcactaaaagctagaaggaactgaggccctcagtcaacagtctacaagacactgaatcttgccagcagccaagcagtgagcttgaaagcagatctatcatcagctgaaccttcagatgagaccgcagcctaagcagataccttggttgcagccatgtgagacaacctgaaacagagggcacagctaagcctcagccaggttcatgaccctctgaggaaactgtgagaaagcaaatgtcattttaagctatttaattttggaggtagtttattacacaacaataaataactattataattatcttgaggatttatttcctggggagaatacatggaattgcatatataggtcctcatatgcagaatactggtaccctagagatgttcaccccagagatgttttaggaacctgtgaatatgttacattaaatggcaaagttttcctggatggtttaagtttaagatggaaaagttttactggattatccagtgggtccaatctagtaacatgagtccttaaaaatggagaatattttttggccatgatcagagagacatgtgatgatggaaaaagtgtcagagatgcaatgtgaggggactaaaactgctgttgctgactttaaagatggagagaggggaacccgagtcaaggaatgcaaatggcctctggaagctggaaaaagcaagaaatggattctcctttagagcctgtggaataaaatgcagtcatgctgacaccttgattttacctcagtgagaccaatactggagtatgaccttcggagctgaataaaattatacgtacacatcttaatttcttgggatttgattacttcttctgctttgaaattagaccaagtttagcctgcctttgctattttggcgtatctccaattcttcatgattttctcatcgcaaaggccacataaggacagtgagaaggcagccacctgcaagccaggaagaaaggtctcaccagataccaaccctgccagcatgttgatcttggacttccagcctccaaaactggccttctgctcacatgggcttccgtgcacctgcttcaggagacagcaacacttgcgcccgcaccgcggcaggctcccatcacctggtggatatgccgcgccgagtctcatcacaccttagtgaaggaacacatggacccatatgttagcggatgtatttacatcgttttatacagaaaggggaagtatgtttcacaataaatg

SEQ ID NO: 389044 - DNA, 577 bp, Homo sapiens
taaggaatccatacatacctacttattttagattttattttattattattattattattatttgagacagagtctcattctgtattttagattttaaaaaatgcacacttgtggccaggcaccatggttcacctgtaatcccagcactttgggaggccgaggtgggcggatcacttgaggtcaggagtttgagaccagcctggccaacgtggtgaaaccccatctctacaaaaattagctgggcatggtggcgggcacctataatcccagctactcgggaggttgaggcagaagaatcgcttgaacctaggaggcggaggttgtagtgagccgagatcacaccactgcactgcctgggtgaaagagcaagactccgtcgcaagaaaaaagaagtgcatgttctaattctccaaagttgtttacacttgcccagatagaccctaaatcagctctgtttaatactcatgcctcattaatgcacttttaatgaactttgaattataaaagcagcgtatgtttggtagagaatttttttaagatgcaataaaagaagacaattattcgtaattccttcacc

SEQ ID NO: 389045 - DNA, 794 bp, Homo sapiens
gctgatgtggcctgctcttatgaggggcagtcagtagggccaatggacagtggggacagggaggtcgctttggcagcatctgcctggcactgcccagggagggggtctccagcagccaacatgaccatcctgcctgctgggggagcatgtcctggggtggtgctggcagccatctgcccagcccaacatttattagtagtgatcgtgtgttccaccctggaagcgctcccagtgcactggggaagtcacgtgccctcgcactgggtgatatgaggtttgataggaggagctctaagtgggtggaggaactcctaatactgctttgaggctcaaggaagtcttctcagaaggtctttagactaggtcttgagggaggcctaggagttcactaggaaagactttccagagaaggtgaaattgggttgggtcttgagggatacaaaaagttcactcagaaaacaagagaggaaacaccttttctggacactgggttctctttaggggctcatgtaggccatcagaccagtaagaccacagtattccgggaccctgctcacccatgccagcctctcctgtacgccctgtgtgtgaccgtatgggtgagggcccctccactgccccatcctagagcggttgggattgtgccagtgtggagtgtgctcggcacacagcaagtgcttggtcggagtgggctctcagaatcgtgcagctggtccgaggtggggccatgtctagggtctgcagcttgcatactcgtgacaggcactcaccctgctgcaggcagcccttccttc

SEQ ID NO: 389046 - DNA, 534 bp, Homo sapiens
  misc_feature (136)..(136): n is a, c, g, or t
  misc_feature (532)..(532): n is a, c, g, or t
taagtatcctgtggagagttactctactaaaaatacaaaaattagctgggtgtggtagctcacacttgtgatcccagctacttgggaggctgagacaggagaatctcttgaacctttgcctcccagtctcaagcanttccactgcctcaacctcccaagtagctgggattacatgtgtgcaccaccatgtttttgttttttcagtagagacagggtttcaccatgttggccagactggtctcgaactcctaatctcaggtgatcggcccacttcggcctcccaaagtgccaggattacaggcgtgagccaccaaaccctgccaaatatcctgtttctcatgaaactttcaccttctggttttatagccaaagtctaagcagaagcccctgcgaccattccaacactgacagaacattcctctgccttgttttacagatacattggggaaacttaaggatgagaactttagaaatggtatttcttggaaacccacttgcttgtaaatcagtggttgaaagaaaagaaaaaaanaa

SEQ ID NO: 389047 - DNA, 190 bp, Homo sapiens
  misc_feature (27)..(27): n is a, c, g, or t
tgcgaggtcgctctagacggatccctncgtaatatgtaccaaaaaccactgtactccaaagctattgaaataaaaatatattaaatttaaaaacttataaataaaaatatataggtcatataactttattattttcatgagtaaaggcaaaataaatgtttatgttgaatatcaatgattaatttgttga

SEQ ID NO: 389048 - DNA, 618 bp, Homo sapiens
cctcccaaagtgctgggaatacagccatcagccaccgtgcccaaccagttttttctttaatgattgtatagagataacagtactataataaataagttaaatgttagaaacatcaacataaactaaacaaagataatttctgaccatccataactttttctagttggcactgttttgattgcccaagagtacttagtggaaggctgcttgctgttccaactaaaacaatatttcaaggatatgaaaaagtgtgtaaattgagtttcacttaaattatttcacaataaaagtgattcataaaagttgattagtccgggcatggtggttcacgcctgtaatcccagcactttgggaggcagaggtgggcagatcccttgagtccaggagttctagaccagcctgggcaacgtggtgaaaccatctctacaaatacaaaaaaattagccaggtgtgctggtgcatgcctgtggtcccagctatttgagagggtgaggtgggaagatcacctaagcctgggactcggaggttgcagtgacagtgagccgcgatcgtgccactgcactccagcctgggtgacagagtgaaaccctgtctaaaaataaaaatttaaaaaagaaa

SEQ ID NO: 389049 - DNA, 435 bp, Homo sapiens
  misc_feature (27)..(27): n is a, c, g, or t
tcgatctagaggatcggtcgacggggnatttttaaataatgaaagataactcaggatgaactggaaaatcttccaaaaatctgacacaagagccaaaacagattaatgccatggcaaaaatgggaaaagttcccaaaaatctactataaaaaaggcaccagttccaagatggtttttcaaaaaacttttataagcctaaatttcttatattcttcaaatggttctagagcagagaaattataatagaattttaacattcactgagtatttaatatgtgccaggcactacgctaaacaatttatatgtacagttggccctcagtatctgcaggttacgcacccgtggattcaacaaatcttggatcaaaaatattcaggcggaaaaaaatcaattaaaaaagtaccacaataaaaaaatatacaaattcaaaaata

SEQ ID NO: 389050 - DNA, 416 bp, Homo sapiens
gcaatctaaggaaagactaaaagtacagtactttgaaaagactgctaaaccacaaatatacaacatcagaaataaaaaaagggggtatagttacaggcatataggagatttttaaataatgaaagataactcaggatgaactggaaaatcttccaaaaatctgacacaagagccaaaacagattaatgccatggcaaaaatgggaaaagttcccaaaaatctactataaaaaaggcaccagttccaagatggtttttcaaaaaacttttataagcctaaatttcttatattcttcaaatggttctagagcagagaaattataatagaattttaacattcactgagtatttaatatgtgccaggcactacgctaaacaatttatatgtacagttggccctcagtatctgcaggttac

SEQ ID NO: 389051 - DNA, 398 bp, Homo sapiens
ctttgcagcaacatggaaggcactggagacctttatccttaagaaactaaagcaggaacagaaaaccaaatgcctcatgttctcacttataagcaggagctaaataaaaagaacacatggtcacaaagaggggaataacagatgctagggcctgcttgagggtggaagatgggagaagtgagaggatcagaaaaaatacctttcagacactatgcttaatacctgggtgatgacataatctgtacaccaaaccctcatgacatgagtatacctatataacaaacctgcccatatactcctgaacctaaaagttaaaagaaaacaaacaaacaaaaaatgaaaacaaagcaaaacaaaaggtgtgagactctatagcttttcaacaatgagagtgggaa

SEQ ID NO: 389052 - DNA, 673 bp, Homo sapiens
gaggaagcagcagggatacggtttggatgttttcccttctaaccctcatgttgaactataatccccaatgttggaggtagggcctggtgggaggtgactgggtcatgggatgggtccctcatggcttggtgctatcctcgtgatagtaagttctcgtgagatctggttatttaaaagtgcgtggcatctcggccgggcgtggaggctcacgcctgtaatcccagcactctggaaggccgaggcaggcagatgacttgaggtcaagagttcgagaccagcctggccaacatggtgaaaccttgtctctactaaaaagacaaaaaaaaattagctgggtatgctggtgcgcgcctgtagtcccagctactcagggaggctgaggcaggagaagcgattgaacccaggaggtgaaggttgcagtgagccaagattgcgccactgcactccagcctgggcaacagagggagactccatttcaaaaaaaaaaaaagtgtgtggcacctcccccgactgtctcttgctcctactttcaccatgtgatgtgcctgctcctgctttgccttctactatgagtaaaagctctctgaggcctccccagaagctgagcaaatgccaatgccatgcttacacagcctgtagagccaggaagcaattaaatctcttttctttataa

SEQ ID NO: 389053 - DNA, 251 bp, Homo sapiens
tcagacaaatggtgatgctcttggtggggatatcagtggggggccaggcactcggcgacacagctttcatttgggcagccttccttgattaagaataggcctctttggagtgttctagctttgaacaagccagcctccctgcaagcagaagattacaaactgcagagatgtcagtagcaccaaacccgcagtgagttctagttttcagggctgtgttcagactggaagatgggaattatctgtgttctgtt

SEQ ID NO: 389054 - DNA, 505 bp, Homo sapiens
  misc_feature (59)..(59): n is a, c, g, or t
  misc_feature (69)..(69): n is a, c, g, or t
cgcactccagcctgggtgcaagagcgaaactctgtctcaaaaaaaaaaaaggaagtggnatatttggtnaattgataaattaccactgtcaaattatattggtgagtctatatctattgttgtccccagatgttgcctttgcaagaattagtgtaaaattggaaaaaatactcaatgttgaaagctgtcattgttgagatctttatgaaattattgtgcccatgtccaagtttgaattagagatacacagcacacaatcatttctgttaccacttttggaatatctagcattagccttgatagttttgtgtggtgtgttttgagtatatctgaactgttagttatatttggttaatttattaaaagatgtgtgttaaaccttaatatttatgcagtgtttaagtatttggaatatatttgaaataaattatccagtgttttagataaatggttatttaattgcttaaagtgattctctaaaaaataaaacattaatgaaatatct

SEQ ID NO: 389055 - DNA, 811 bp, Homo sapiens
taaagcataaggcctggtgcagtggctcatgcctgtaatcccaacattttaggagcccaaggccggaggatcacttgagcacaggagttcgaggctgcaggctgcagtaagctatgattgtgccactgcattccagcctaggcaaccaagtgagaccctgtctctaaaagtgaacaaacaaataaatgtaaagcataaagctataatttttagaagataacattggaaaaaatcctcaggacctaaggttcagtgaaaggtttttaagacataaccccaaaagtaccattcataaatggaaaaattgatgttagacttcatcaaaatttaaaattcatgttctctgaaagaccttggtaagaggataaaaagacaagctacagactgggtgaaaatatttataaactacatattcagctaagggctagcatctagaatatataaagaaccctcaaaattcaacagttaaaaaaagttagaaaatgggcaaaaaacataaagagacatttcactaaagaagatagatgacagataagcacataaaaagatattcaacaatgcatctcagaatgttcctccaaatttgaaaaaaaaaaaaaaaaaaagatattcaacatcattagccattagggaaatgcaaattaagatcatgatcagctggattacaggcacgagccaccacgcccagcctgtaggtcttttgtgggctatcctctttggctattctgggactttgtgattctatataaattttaggattatttttctatttctatgaagaatgttattgttactttgatagggattgcat

SEQ ID NO: 389056 - DNA, 403 bp, Homo sapiens
tccctagttcttttcaggacacgataaggctgagttgatgagaacatattaaagtcttgaggataaagccagccaaacccaaggaacagcttacacctgataccaggtgggtttggactcacaacctcagatctacacctaaacttcagagtctccttttctgctagttcttagctcggttccatcttttccctgccatagggaataaatcaagcctgtgcatgcttgagcacctagacccaaatggtttgccctatttctaggcttaaaaaacaaacaaacaaacaaacaaacaaacaacatctctggattacttcctcccaggatggctgccagtgggaaattcattttcctccagaagagatttcacagtgtggcttggctccctgtctctgaatatgta

SEQ ID NO: 389057 - DNA, 426 bp, Homo sapiens
attttttgtagagacagagtctcgctgtattgcccaggctggtctcagactcaagtggtccttctgccttggtcttccaaagtgctgggattacaggcttaaaccacagtgcccaacctataaaacttttaaatatttttcacctattcaccctttctaacattctttcttcttgccacctgtatgccacaaatataagaatgaaataggccaggtgcagtggctcatgcctgtaatcccagcactttgggaggctgaggtgggtggatcgcctgaggtcaggagttcgagaccagtctggccaacatggtgaaaccctgtctttacttaaaaaaaatacaaaaattagccaggtgtgatggcaggcacctatgtataatcctagctactcagtaggctgaggcaggagaatagcttgaacctggg

SEQ ID NO: 389058 - DNA, 248 bp, Homo sapiens
attttttgtagagacagagtctcgctgtattgcccaggctggtctcagactcaagtggtccttctgccttggtcttccaaagtgctgggattacaggcttaaaccacagtgcccaacctataaaacttttaaatatttttcacctattcaccctttctaacattctttcttcttgccacctgtatggactctcggcgtgtgcacttcgtccatagtgatctgaagtatatggaggctcggcgtgtgca

SEQ ID NO: 389059 - DNA, 449 bp, Homo sapiens
atttgcctgcctggaaaattcagacctgctgtcgctcttcggaagctgtagaaagaagaggacttaggagtccctgcattgaagagtggaaaggtttaattatccctgtctcagcttgtcacttcatttgtctctgtgttttgtgtcccctgttcaggggccttaggttttgttgtcctagaataagcatctagtcttttgtggctagagggggcagtgatctcaagggcagagaaggggactgagcatctaactacatacttcttaaatagactttccatcccttctctcattttttgtaaatccctacctttacttcatgaggacccagtttttgggtctgtgggacagtactgcagtgtagcaaatctggctacttcttgactttcgccaacttagagttaatttttattgtgtctcattaaccttcttttaaacccttataattt

SEQ ID NO: 389060 - DNA, 133 bp, Homo sapiens
cagtgtgaggacatagcaaggaggaagctgtctgcaagcccagaagagacccctcaccacaccatgctggcatcctaacctcaaacttccagactccagaacgttggaaaaaaaattcctgtcattacatcca

SEQ ID NO: 389061 - DNA, 409 bp, Homo sapiens
gcatgccaccatgcttggctaatttttgtatttttagtagagacagggtttcaccatgttggccagcctggtctcgaactcctgacctcaggcgatccacccgtctcagcctcccaaagtgctgggattacaggcgtgagccactgtgcccggcctcaatcccaattttcaacaatttcttttatattattctgcgctccactgccaccctggtctacacctgcaattatattttcacagggttctaccaggagcaatgtcaataactaatcttttcattatctcacctctgttatccttgaatgccaccccaatgtagttccctcaattatttatcttttcctatcctctttttttttttttaatacagagtctcactctgttgcttaggcttaggctggagtgcggt

SEQ ID NO: 389062 - DNA, 468 bp, Homo sapiens
ctttaaccagaggaatttcactttcctgactttcacaggagattgcattgtggttttttttgttttttttttttttgtttttttttgttttgttttgttttgagatggagtcttgctctgttacccaggctggagtgcagtggctgggtctcagctcactgcaacctccttcttctaggttcaaacgattctctcacctcaacctctcaggtagctgggattacaggcatgcaccaccatgcccagctaatttttgtattttttttagcagagacggggtttcatcatgttggctaggctggtctcgaactcctgaccacagatgatctgcccgccttggcctttcttttttttgtttgcgttttttttgttgttttgttttgttttttgagacagagtctcgctctgtcaccaggctggagtgcagtggcacgatttctgctcactgcaatccctgcctcccaggtt

SEQ ID NO: 389063 - DNA, 215 bp, Homo sapiens
atggagtcttgttatgttgctcaggctggcctcaagcaagtcctccatctcagccttccgatctttccttttttatattaaaacagtaatttccaccctgagaaataaagttttattacacaagaatgttaggagaaaacaaggcagggacaggttgacacaactataaagaatgagtcaaagagattgggcgtacggggattgggcgtacgggg

SEQ ID NO: 389064 - DNA, 233 bp, Homo sapiens
gctcctgagtagctaggattacaggcattcaccacacgcccggctaatttttgtatttttagtagagatgggtttcaccatgttggccaggctggtctcaaactcctgaccttgtgatctgcctgcctcggcctcccaaagtgctgggattacaggcgtgagccaccgcacctggccacatatgctaatttttagagacattgaatatagtcaaaagcaaaacaagaagatac

SEQ ID NO: 389065 - DNA, 407 bp, Homo sapiens
gttggcttggtttaaagaaggaacttgacctactgccttcttcctgttttcccttgcagtggcctccagggccactgtctctgggcctctccccaaacccctaccactatgttatcaccaccctgagagtccaggcccttgggtggcccacaattgctcaccatgcctggcctttctccagccctctctctccttgcctgctgagaagctccttcttataggaagctgctctcaggtagggagtagccacactcaggcataatacttcctaaagaatttaagtgcagatgtccaatcttccggagaggtccaatcttccggagaggaccaatcttccggagaggtccaatcttccggggaggaccaatcttccggagaggtccaatcttccggagaggaccaatctt

SEQ ID NO: 389066 - DNA, 239 bp, Homo sapiens
aaaatttcatctttaccagggtcctaagtattaataagaaataaattttaaattacttttgtaggttagaaatacttatttttttttcccctgagacagagtcttgctctgtcacccagagctggagtgcaatggcttgatctcggctcactgcaacctccgcctcccgggttcaagcaattctcctgcctcagcctcctgagtaggtgggactacaggtgtgtgctaccatgcctggc

SEQ ID NO: 389067 - DNA, 223 bp, Homo sapiens
ggctgaggcagaagaatcacttgaacctgggaggcagaggtttcagtgagcagagatcgtgccactgagcgacatgcctgagtgacagagcaagactctgtctcaaaaaataaaaataaaataaataaaaatggttaagatggtagatttaatgttacatgtattttaccacaatttaaaaagaaaatcataacatttttacaaaactgatattttgtggaaa

SEQ ID NO: 389068 - DNA, 581 bp, Homo sapiens
agcagctcattttgcaaatggagttctctttttttatatataaaccattttcttaaagcagctttcttcagctctcttaaacgttgtacacacttagtagtgcctacatcaacactgacacaaccctgtataaggaacacctaatatactcattcagggagaagaaaaggtgtaaggctttctctgggcactctgtgtcataatataccagaagaaatctaacttttggttcatttagcatcacatcacatgaggtgcagaagttatttatttataagcttaaggatttgtcttgagagcagtgagtcaaaagactaaatttcgaggcgggcagatcacttgaggtcaggagttcaagaccagcctggccaacatggtgaaaccccatctctactaaaaatacaaaaattacccgggcatggtggtgggcacctgtaatcccagccacttgggaggctgaggcaggaaaattgtttgaacctgggaggtggaggttgcggtgagcggagatcgtgccactgtactccagcctggcaacagagcgagactccctctcaaaaaaaaaaaaaaaaaaaaaaaaa

SEQ ID NO: 389069 - DNA, 536 bp, Homo sapiens
aatgaatacccatggccatgttccaatataactttatttacaaaatctaatttagttcataggttacggtttgctgattcctaagatagagcattacagtgtctgtttcagatgggaagtaagtcttcctatggcatgttcaggccctccttttcagggaatgagaaagagtggggagggtatttcaacaagtaataaattgcagaataccctccccacaaaaatacacatatgtcagactctttattatggtaaaagcacaaaacaggtcatctttttgtggaaatgctggagtctaccttttcctttttatcttctgatttttgttcctaaaataaaatcccaagtgatgttgcctcattccaagtcagttttgtagaccatgtaacatgtcttaatacactgtatggggaaaaaataaaagttagccttagatttctttgttttctatggttattgttgtacagaagaaagacaaactgtaaataatgtatatttaataaagagaacattttgtatgattttgtgtggaagac

SEQ ID NO: 389070 - DNA, 713 bp, Homo sapiens
tggctctgtcttattacccatgggacaggatcataacttggtctgggtcatttgtcacctttgtcctgggcttcaaatctagaagtttagattttttggtattctcagtttctgtccacatggttctttgagttttttcctaggcagctgctagaaagattttgatcaactggtcaaagatattaaagaagtcaatgttgatcagtaggaaaatttagagtgccagataaaagaggtgtctgggatggcagtgtcttgtcaaagggctggaggtgatgcgttcacttgctttggaatcacagattcgggaatgtgacggcaatgtgacgcagacctcgctgctgaggcgaaaaggacgttagaattaagggactcagaagacatcaaagttaaagcggttcttgttgcccggagaaaacagaaatacgaaagcatctgcctggggagtatcaaggtactcctttcatttctccagcagaggagcagcagggacagtgatcgactctgaggaagtgagaggcccggagagcttccagcccggccatcctaacaccaccttagaattggggcgcctgagacagccctcagcaccaggctcccagcccaggatgctctttgagctctgtacttaccttccagtagcttttcctagaatccccttcctgattaagtgaaatgaggggtaatagatgggcaatttacacgagttagaa

SEQ ID NO: 389071 - DNA, 361 bp, Homo sapiens
gctcagctgcctcaagaagctctagttagacaaaacaaacatggtggaaacaattgcatgtaactgagggctaaataacatggaaaagatgcaacatgtatccatagacttgtggacagtgtattcacaggaggcaataaaggcagtgagaatacctaggaaatgtttcctggaaatgctatccttgatctcagcttgaaggatggtcagaggacaggatacatacagccccaagaagaggagaggggattccatctactcttatctctttcactcccctgctcacagttgatacttagccagcatcacctggaaacatgagagttgaaaagcaaatctccagacccatcccagtcctatg

SEQ ID NO: 389072 - DNA, 335 bp, Homo sapiens
ctggctctgtggctcaggctggaatgcagtgggccgaggttggctcactgcaacctccacctcctgatctcaagccgtcctcccacctcagcctctcaagtagctggaactacagtggaactacaggtggacaacatcacacccagctaatttttgttattttttgtagagacggggtttcaccctgttgcccaggctggtctcaaactcctgagctcaagcaatctgcccacctaagcctctcaaagtgctggcattacaggcatgagccaccgtgcctggcctgggaagctcttttaacagaggtgatgtaaagtagaaaaagcagtgggctc

SEQ ID NO: 389073 - DNA, 426 bp, Homo sapiens
agcaaaaccacccaaaatactaccataataatactacggagaggaggggaattaatgaaaaaggatacataaatctatatcccttctgaatctgtttacttatgtgctctttaaatactattgtagatgctaaacaaatggttttcttgaatacagtgcatttgcccctatgccaattagatctgaactttgacacaatgtgttttacatacaggagaagaaaagagaacattatatgtgactgccatatgacaaggcaactttgggtattctgggagaaaaaagctgttttggcagtaagagaaagtgctggcaatgtgcaccaacgtaactcgtctgtcactttaagagctgaaataggaaaacctgtaccatttttgtacttttgttcattcttttcaactcattctaagttgccccctggga

SEQ ID NO: 389074 - DNA, 1041 bp, Homo sapiens
gcgggaccctcaagggcaggccacagtgggatgactcatcctcatgggcaatgccaggggaccaatatcagggtgggcagaggtttgggcagggctgatgtgaacacaaatgtcagtgactgagccaggccccaagaaccctacaggagaatgttcagagagccccctcttcatcccagtcgataaaacccaccaaagccaggaggctccggttgatggtgggaatggagttctgggcaggtctgcttggccgccctcacctctccccgggaatcccaagtcacctctgggaaccaagatggaaatgagagaaagccccctggtttctacaggaagccccccaacaacacacaagtcgttatggaagagcacaccatgctcagatgggcccccacagcagagtcttccagaacacgctgtcctggagaccagggtccgaggaccaggctgcccctcgccagctgccacttcagcctcggtttcctcacctgtgatgggaaggacagcctcggcggagcctgtgactggcatctgggtgggctttgcacaacatgaagaattactcaaatgtacagccaaggccaccccacaaccccctgtccacagagagccccacttgttcctggcagtgattggcctcaccagggtatcactttgattagatactaagtttccatctgttacagacaggttcattctgagtatcacagcactgccagggacaaaagccacctgcacgcagtgatgcaggcgctctgcacctgtcatgcaggtgttcacgagaagccgtccaggaacccccgaagaacgggctttccccaagtctgagcaacactcgcttgctggggccaagcagaggctggaccccaccccacccaccctccagtgtagctcatactgggaagaatttgcagggtcagataacagtaatctgacagatgccacctcacttaatgccccgagtcagatgacttggtttgcccagtttgacagagagggaggctggataccagagctgttgcatagttgatctgaggtccc

SEQ ID NO: 389075 - DNA, 633 bp, Homo sapiens
ggcaatgtaagaagtgcttttcaccgtccgtgccatgattctgaggcctccccagccatgtggaactctaatgctatgaccatctgcccaagctggaatcatgaactccatcctccttatccactgggaggtcagttctgccctagaactgttaccgaatagagttgcccaggttctcggcctgttgaacaaataattgaacaaaatgcacaaagtaacaaaagaatgaagcaaccaaagccaacgcaacagaataagggagtaatgaaagcacagatgtattgaagacaactcactgagtgggactgggctccagcaagctgcacaagagcctctccagttaggatttttataaagccaaaagaacttggcaacacccctaggtgccctttagaggcctccaattggttacatcctatgaaggattggcctgcaaccaatcagaggctgaagtagaaatatctgtcttgtcacaggattgaagatatggcctgtacgcagcccagtcttgcctagaactggctgcacctgctgttcctttgcttatgccccaacccttggctaccctaattccctattctcctgcctcagaactatcttctgatctgtccatgtcttttactcctttgtcat

SEQ ID NO: 389076 - DNA, 1170 bp, Homo sapiens
aatctagacccagttgagattagtactgtacaatggtatgctttgattgtatttatagaaatataacataaaacatggaccatgttttgaaatcttagaggaattctggtttaaaatctgaaatactttaaagttttctatccttttactgattatgcagcttcttataacccccaaggtacagattatttcagcttaaaagaaataattggcaccatgttctgagaaagattttgagatatacattgttttttgtttttgagacagggtctcactcttgcctaggctggagtgcggtggcgcgatcttggcttactgcaccctctgcctcccaggttcaagtggttctcctgcctcagcctcccaagtagctgggattataggtgtgcgccaccacaccagctaatttttgtatttttagtagagacggggttttactttgttggccaggctggtctcgaactcctgatctcaagtgatccacccgccttggccacccaaagtgctgggattacaggtgtgagacactgtgcctggccagatatacattgttttagatcccctgatacagaactacttttgagatggtaagattagaatatcatgaaagtttaaactgaatccttgcagcgacttccggaatttaggaagcattccctcttctacaggggtctggtcacaagggctggattctctgacaaaaatttcttctatggattctggacagaagacacttgagggtgatatgttttaaaggaaagaggttatgcttatcttcttagcagttgataaaatattaaaactctcttgccatagagaatacaccatcaaagaaaacacaaccctttccctttggtgtacagttatttattaagttgattttggggtttctttcgccagggatcttttcaaaactggtagtagttatttttaaaaatcatgtttgacatctttctattgctcgtaaccagtccctgtagctgtctaagttatgggtggagaagcctgggtatgactttccgttgtgtacactcacacttcatgattgacatttatttattcttttatttccatttggttatgcttatttttgtttgaaatttgtttttttcaaatatgtttcctttttgaacttacagaattaaataaaaattagccattccagaaata

SEQ ID NO: 389077 - DNA, 1613 bp, Homo sapiens
aatctagacccagttgagattagtactgtacaatggtatgctttgattgtatttatagaaatataacataaaacatggaccatgttttgaaatcttagaggaattctggtttaaaatctgaaatactttaaagttttctatccttttactgattatgcagcttcttataacccccaaggtacagattatttcagcttaaaagaaataattggcaccatgttctgagaaagattttgagatatacattgttttttgtttttgagacagggtctcactcttgcctaggctggagtgcggtggcgcgatcttggcttactgcaccctctgcctcccaggttcaagtggttctcctgcctcagcctcccaagtagctgggattataggtgtgcgccaccacaccagctaatttttgtatttttagtagagacggggttttactttgttggccaggctggtctcgaactcctgatctcaagtgatccacccgccttggccacccaaagtgctgggattacaggtgtgagacactgtgcctggccagatatacattgttttagatcccctgatacagaactacttttgagatggtaagattagaatatcatgaaagtttaaactgaatccttgcagcgacttccggaatttaggaagcattccctcttctacaggggtctggtcacaagggctggattctctgacaaaaatttcttctatggattctggacagaagacacttgagggtgatatgttttaaaggaaagaggttatgcttatcttcttagcagttgataaaatattaaaactctcttgccatagagaatacaccatcaaagaaaacacaaccctttccctttggtgtacagttatttattaagttgattttggggtttctttcgccagggatcttttcaaaactggtagtagttatttttaaaaatcatgtttgacatctttctattgctcgtaaccagtccctgtagctgtctaagttatgggtggagaagcctgggtatgactttccgttgtgtacactcacacttcatgattgacatttatttattcttttatttccatttggttatgcttatttttgtttgaaatttgtttttttcaaatatgtttcctttttgaacttacagaattgttgaaattttctactaacagccagctaaaatttggtatatgttagctctatctgtttcacttggacgtttcattttgaaagaaagaaattttatgtttcacatatagttttatacaaagtagccagtcccataatgaaatgctgtattgccatagtggtcacacccaagtggtccagtatctcaatggtgaggcagccagactggtcagggctgctttgttgaaatgtgatgattttcatatgccttctttctctttctctctctctttttttttccttttttggcccaatgttgaagatgtagaactttgtttttaaataatgtttttataatttcattcgtatacctaagtttgtattttttgtgactttggacttcaacagtttgtatattgggacttctaatgtgattactgtactaaataaattccactaataaacatcttacattaacaccttaaaaaatgga

SEQ ID NO: 389078 - DNA, 665 bp, Homo sapiens
agctcgtgccccccaaatggcaatccctgtagctgtctaagttatgggtggagaagcctgggtatgactttccgttgtgtacactcacacttcatgattgacatttatttattcttttatttccatttggttatgcttatttttgtttgaaatttgtttttttcaaatatgtttcctttttgaacttacagaattgttgaaattttctactaacagccagctaaaatttggtatatgttagctctatctgtttcacttggacgtttcattttgaaagaaagaaattttatgtttcacatatagttttatacaaagtagccagtcccataatgaaatgctgtattgccatagtggtcacacccaagtggtccagtatctcaatggtgaggcagccagactggtcagggctgctttgttgaaatgtgatgattttcatatgccttctttctctttctctctctctttttttttccttttttggcccaatgttgaagatgtagaactttgtttttaaataatgtttttataatttcattcgtatacctaagtttgtattttttgtgactttggacttcaacagtttgtatattgggacttctaatgtgattactgtactaaataaattccactaataaacatcttacattaacaccttaaaaaatgga

SEQ ID NO: 389079 - DNA, 367 bp, Homo sapiens
ggctgccaatgatctgtactataacaggtatattagaaaataccaaattctcttagagaaaaaaaaattgcacaacaatctcaacactgagaggactgtccaaggatgaaagcaaggtactcctaggttagtagtttttcaaacctatagatggcatttggaaagaagtacacgcataggcttcaaaaaaccctgaacaccagaaacctaattagcactttcattttaggggcacgggctttcccttatccttttctacagccaaccttaatggggtccaattaaggcaacaatgaaaggttacaaaagtctacaaaaaggtcccattacagcatttaaacagggttcattttttttaatcaaatag

SEQ ID NO: 389080 - DNA, 243 bp, Homo sapiens
ctagaggatctgagaggcaccagggaggctttgcaaatccaaacatttaagggaagtggtttagggatggaagagaaacacggtagaggtctggggctgtggattttcatctagggtgggtggggaaggaagggagtaaactttagcccaataaagaggaacttttgcatcctccagagcagcctagagaagtgctgacctccctggcccctcaaaggaagagggctggagagatgccgagag

SEQ ID NO: 389081 - DNA, 813 bp, Homo sapiens
ctcccagtacagtggcccagggcagactagctggaatcagcctcccgggtgggtttcgaggcgtttccagggtcaggggtcaagtaggggcatgttcccgggacactgcttctttctgccagaaggacgaagaatctggagagtgcaatatttggatctggtcctgctgatgtgtttctgtgctacagaaaccttctccacccctcttctacccaacagctagaggacatggggtccggaagtgcatgtggctggagccagtgtggtcgctgtcgtgatggccgagtccagatgagctgccgctggggaaacacagggtacctgaggtctgaggtcgggacgtctttgtccaaccactaagagtccacattctcctttggagccgggtctccgttttctccagcatcatgggcccctcaaggaagctgatgcatgccacaggctgtcttctcagaaaaggtacccaagaacacattttgggtttgcatgtggattgggaagcccaacgtggcctccagcggtgctccttggctttgtctagactgcaggatcccacccatgccctgtggatttgccacgtggacactgacgtgagcaaatggacaattcaacatcagtggcagaaaggagctcagtctggttcacacgtggaaggcagcacattctgaaagagaatcacttgaacccaggaggcgaaggttgcattgagccaagattgtgctattgcactccagcctggacaacagagcaagactctgtctctcaaaaaaagaaaaagaaaagcgacgacattcagtcaatcagccagatatt

SEQ ID NO: 389082 - DNA, 327 bp, Homo sapiens
ccagctttgttcctttcaagcacctcgagtcataaaataactctcaaagattgaagaatctttttgagagtaaattaagatttcattggacatatgcacttgttggttcaagaatgttttttcttgttctccaattttcttgtcatttggaacctgatattaatcagaatttctatgtgtgtccctttgccctgtattttcttcaagatctcttcattataaacataaacttttaagttcctgattttctctgttctcccctttagaccagtactgttcaatagaaatataatatgaaccacatatatcacttaaaaataaacaagt

SEQ ID NO: 389083 - DNA, 317 bp, Homo sapiens
gggtttctccatattggtcaggctggtttcaaactctcaacctcaggtgatctgtctgccttggcctcccaaagtgctgggattacaggtgtgaggtattattttttaagtaggagtatttggacctaaacaggcagaattcttcaacaaagtacaatgaaaggcatttctttgacagtagcctgaatttggaggctcatttgcaaaggcactttccactgccactctaccccagaaattgcttatgaaataattctggcatttactccttcttcctcccctcccccttttattaaagagactagcttgtacaaagt

SEQ ID NO: 389084 - DNA, 749 bp, Homo sapiens
tcttcagtgatcatgattcactaactttctgtgctagatatagttcatgcttagcatagccatgcaggataacttccaggtccttaatctgttacccttaggagttgtctcgttgttagtttacaggttctcccctttttagtatgttactagccttgtattgtacatgtgacaaatgttcttccaaagaacattgaatacaaacattggtcattttagccaagttagaattttagttccaagctacctaaaatttaataacacagtccacgtcaaataatgtaaactagtatatgatataatttcaaaaggtatcaaaagttattctctattcgtgggaacattggttgtggtactgctcattagctttatatacactggtgttttattcagaaacaattttctgaatttttctggacctcaagtaatagaattttcatattgttttttcttgatttttttcttccaaaattataacacagactgtagctgatgccataataaagaaatgtaccttcatgctactcatttaaatatccttgcgtgtgactaattaacttaattcattagtacactctattaataaggcaagcaaaaatcctttgttctgtgtttgtgttagcttactaattttgttcttcaacatggcaaaatttttatccctgtccatggtcagaactgcctgataccgaaatcgatctttcaatcacaggttgggactagtgtgctagtatatatgcctctctgcc

SEQ ID NO: 389085 - DNA, 467 bp, Homo sapiens
agccagaaatgtaatcccatcctaccgtgtttgcttggttaagttgctaaacacgtctcattttataagggaagaaaagagaagaaaaaggcttctaaatgcccatgaattgttagaagccatgtctggtgcttaatttcatttaattctcatggctgctggcccagaaggtgttaatttttagagtcaaatcttagatttgcaaggggatttggctgaggtcacacagttaagtggcatgatttaaatctgttttccaagtcccttttctttgccctgcatttaggaggagggccttcagcacccccaagctgaactggattccacttgaatcttgtcctttttataccaaacccatctgggggatggagtgttgcatccgcagcacatcccaagtgacaagtgcagctgatgccatcactccctgtggtagacgagccaatcgttaagtggctatttatgtgtcg

SEQ ID NO: 389086 - DNA, 393 bp, Homo sapiens
gccacacgcatttgctgagagtggatcacagggacagcacagccacctttttccagccagggaggagcatggcccagaaggaaaggaaagatggggatgcgagacaaaagaccaacccctcccccaaggacccattcacccagggcagaaaggtctctgcttctcaactgctgaatcccagggggaaagttccaaagtgtggtaacagaaccttccctgttccagtttcctaagccccactcacccgtcgcccatggagggaaggcacggaaggcagcctcagccgctggcgctgggattcattcgctcttgctctttcccaggggggatgaactctgatcctctcctgtccctctgtccactccagctttaaggagggagaggggccccagg

SEQ ID NO: 389087 - DNA, 233 bp, Homo sapiens
ggggcgcagagggtagagtggctgctcttccagtcttaggtctgtatggaagcacttatgttctaaggcagtgagggctggctttgctggtccaagaagaggaggatgcctgaggtgcttggacaactccagatgcttgtagggagagagggaccagaggcaggagagactggtcctgagaaggaagatctcagcatcccagctcctggatctttcacctcttgttcagaccc

SEQ ID NO: 389088 - DNA, 467 bp, Homo sapiens
ttctcccctgctctgagaagctcttccaagaatggcagctggaaggatgctctaagcacagggaaaaacaggacctgtggaattaataagtaaatatgcaaaataatgttattagcagggattacagacaggaatacagaatctttgctataaacctgcttctatgtgggaactggaacaccactaaagtgacacatgcatctcaatgaaggtgtgacaagtgaaagagacagttctggaaatttcctttgacaagaatataaacatacctctcagctaagactcttcaaccatgcggtcagcccctttctgcgtggcaccaactcctgcacactagcagcctagattcttagggaggatttccttctacgtgggtgggttcagacagatcttccacctactccacatactagatgcccgcacacagagggaatcacagtgaggggtttcagactctcctaagtctt

SEQ ID NO: 389089 - DNA, 730 bp, Homo sapiens
gggacctcttggtaaggaagtgagagtagtctctaggagcttagagctggtcccagctgatagccagcagggaaacagggattttgatgccacaactgcaaagacctaaattatcccagtgacaacaacgaattaggaaaagaacactcaactccatgtgaaaacgcagctggctgacaccctgatgttaacctgagcagaatccagccttgaattgcctggacttctgacccacagaactgagctaaatggatgttgttacatgttgctcaatttgtagtcatccattacctagcagtagaaaatgaatacacctccaaatgtggccaaacaaatccctttcagtgcactgggaaagcatggggttgaccagaacatagaggagtttttgggcacagattgtcccaatagaagtcataccgtaccctgaacaactcctgtgggttcacaaagtattcagatttacggagtactgaggttttatcattcagctttagtatgttaaaagcatgtatagtgtccaaactcatcaagcacatttgatctgggcaaaactccaagaattctatgagtttgaagctcagttcctctcagcatttgggtccataatcatgtttgtaagcagatggtaatccaagacattgtatgatagaaaaaccctacctcaatattttctctctaaatccaaatcacttccctaagatgtgtaatagtcaaataaaatggtaaa

SEQ ID NO: 389090 - DNA, 820 bp, Homo sapiens
tctttagcataatagaaccagaaatggaaagtgtctcttattgtgctagatacttgggtagagttataaggattctcagaagctgagcagaaatagctctagacaagaactgaatagggtgggcctacttacatgctgcagttggaaccctgtgaaatggtatatattgttcaagatttccgaacttcagtgtctttgtcaataaaatattacaggtgctttacttacctcaactattgttcttaatacaaaatgtagaagcacattgaaaacgttataaaaacagagatgaagaatgatgttattggttatggtaatatgaaggttacctcagattcttaccactttcaacctgctcacaatgtaaattctgttatcaatatctaatagaaaagggcctattattatatattcgtgttaaattgttcacatatagtacacgtaactttgtgtgcaaatcttccctctagggcattccctagaaagtcctcaatttagctagcagtgtattgttgattattaagagaaatccgccaccagaaagtccattaatagaggatatgttccttctgaattgtaattttcaacttaattgtaatagatttgctgcttttagtttttattaacttcatagtaatgtgttaaacaatattcattttttaaagtaacattacatatataacttacataaattagattcttctaatgtgaagatcagacagtgaaggtctgacttttaaaagaaatctaaaattaatttcaaactctaaaaagatttgcttatattatatgtaaataaatacgtatgatacattaatac

SEQ ID NO: 389091 - DNA, 376 bp, Homo sapiens
tctggaaatcagacaatttgggggcaccaggttatactgaaagagataaagaagttttatgtccttattttgccataaatttgaggaatgctgagagattggccagtatctcaaaactcatacacaatctgaattattttttaattttgttttctttttatgtgaaataattatgtagcttttcttgaatatatctattttggggaaatgaagagaattatggaagaactaaaatgtaacccttctcttcagcctccttttgccattgacactgcttttcagtagatttgtgaaggaggctacctcagttgaaagtagtactcagttttgatctttttctagatggatttgggtcttactcttataggtcacaaga

SEQ ID NO: 389092 - DNA, 363 bp, Homo sapiens
aaaagtctccacttacatgagggaaattagggaataaccacaaatctccagaggaagatgaaggctcagaaaagacccaagatgaccttaagtttatatgtcaagataatccttagcaaagacacaagctacaccaactttttaaagtagcaaagcctggggaagggagtgaatctgattttcagagttaacacattattagattcaaatatgcaattttgacaaaaaaatcacaaagtatacaaagaagcaggataatatggtccactcaaagattaaaaaaaagtgagccaacagaaattgtccctgaaaaagacctgatggcagagctacaagaaaaacttcaaaacatttgtactagag

SEQ ID NO: 389093 - DNA, 479 bp, Homo sapiens
ccccatttggcgaggcagtctctcagtatttgtaaatgaaaactattttgcatttttttagaaagatgttttctcaatttttttgtttattaacagatctaagtatacttaacctttctgtgccatatgaatgaattatatataactgacaattcagaagccagtcctatttaattttactaacaatttaaaaactagttttatttatcaaatattaacacatagacacacagaagcagatcttacagctttcataaataattttcatttgctggcttttaaataattttttttccccattctactaccaatcttccaattatctgtttcattgccctaagcaattgttagctgggcaaccctaaatttgcattttcaaagggatggctcttagaagaaacgaggtagaaaatttatatctccaaagcacagagctgagatttcaggcctaaataattaattgtataatcatttgccca

SEQ ID NO: 389094 - DNA, 750 bp, Homo sapiens
atgttaccacttaaattatcattcaaatataaaagcatagtaaagctgacattaagcctcaagcatacaagttcacagaaaatttgtcacacaaggacccacattataagagaagcagaaattcatactgctttaagagatatcagaggctgggtgtggtggcccatgcctataatgccagcactttgggaagccaaggcaggaggatcgtttgagcccaggagttcaagaccagcctgggcaacatagtgagcccttgtctctataaaaaataaaaaaattagccatggccctggtgtggtggctcacgcctgtaatcctaccgccttggcctcccaaagtgctgggcttacaggcatgagccactgcacccagcaggaaaaatttaatataaaggttactaactaataaaacatggttaactattaagacagataaaggataactctaaagaataccagaacctgggcacaagggctcatgcctgtaattccagcactttgggaggccaaggtaggaggatcacttgagcccaggtgttcaagaacagcttaggcaacatagtgagaccccatctctacaaaaaattaaaaaacagccaggcatagtggtacatacctgtagtctcagctcctcaggaggctgaggttagaggatagtttgaacctaggaggttgaggctgcagtgaatcatgattgtatcactgcactccagcttgggtaacagagtgagaccgtttctaaaaatta

SEQ ID NO: 389095 - DNA, 426 bp, Homo sapiens
atgttaccacttaaattatcattcaaatataaaagcatagtaaagctgacattaagcctcaagcatacaagttcacagaaaatttgtcacacaaggacccacattataagagaagcagaaattcatactgctttaagagatatcagaggctgggtgtggtggcccatgcctataatgccagcactttgggaagccaaggcaggaggatcgtttgagcccaggagttcaagaccagcctgggcaacatagtgagcccttgtctctataaaaaataaaaaaattagccatggccctggtgtggtggctcacgcctgtaatcctatcaaacatggtaccatccctaatgaagtcaacgggtccagcatgacaggatggaagtacaagtgtcagcacctatgtgagtcccaagaggggaaattagaaaca

SEQ ID NO: 389096 - DNA, 220 bp, Homo sapiens
tggatcactcataagttttcagtggttaattactacagtttaagaagacgtgtgatttatttttagatctgacccagcagatcatacctctcccttgaattacatggtcttcttttggcttctaagatgtcacactcctgtcttagtggccactgctcctcaagccccctttgctagctcttcctcatctgtccagccctaacctgaccgtgctatgtaa

SEQ ID NO: 389097 - DNA, 447 bp, Homo sapiens
ctgaagatctagtttggaacacccaaagttcaagtcttcaggcaacgccgtcatctattctgtgtgtcaggaagctgtctgggaagccttcaggactttttgggatcgacttcctgggcgtgaggaatatcattactggatgaatttgtgtgaggatggagtcacaagtatatttgaaatgggcacaaattttagtgaatctgtggaacatagaagcttaatcatgaaggtaagtgtcacaacaaaggaagggattcctggactattgtaggagcatttacacagctaaggcctaaaggaagcaaaagcaagtggcaaatgcctgtattactcttttgttgaattgggctatctgagtaagctgccctagggtgtggcctagtcttttattcctagctctggcctctataatatacattattaatattttcatgttattctgtccac

SEQ ID NO: 389098 - DNA, 4017 bp, Homo sapiens
  misc_feature (1603)..(1603): n is a, c, g, or t
  misc_feature (1872)..(1872): n is a, c, g, or t
ctgaagatctagtttggaacacccaaagttcaagtcttcaggcaacgccgtcatctattctgtgtgtcaggaagctgtctgggaagccttcaggactttttgggatcgacttcctgggcgtgaggaatatcattactggatgaatttgtgtgaggatggagtcacaagtatatttgaaatgggcacaaattttagtgaatctgtggaacatagaagcttaatcatgaagaaactgacttatgcaaaggaaactgtaagcagctctgaactgtcttctccagttcctgttggtgatacttcaacattgggagacactactctcagtgttccacatccagaggtggacgcctatgaaggtgcctcagagagcagcttggaaaggccagaggagagtattagcaatgaaattgagaatgtgatagaagaagccacaaaaccagcaggtgaacagattgcagaattcagtatccaccttttggggaagcagtacagggaagaactacaggattcctccagctttcaccaccagcaccttgaagaagaatttatttcagaggttgaaaatgcatttactgggttaccaggctacaaggaaattcgtgtacttgaatttaggtcccccaaggaaaatgacagtggcgtagatgtttactatgcagttaccttcaatggtgaggccatcagcaataccacctgggacctcattagccttcactccaacaaggtggaaaaccatggccttgtggaactggatgataaacccactgttgtttatacaatcagtaacttcagagattatattgctgagacattgcagcagaattttttgctggggaactcttccttgaatccagatcctgattccctgcagcttatcaatgtgagaggagttttgcgtcaccaaactgaagatctagtttggaacacccaaagttcaagtcttcaggcaacgccgtcatctattctggataatacctttcaagctgcatggccctcagcagatgaatccatcaccagcagtattccaccacttgatttcagctctggtcctccctcagccactggcagggaactctggtcagaaagtcctttgggtgatttagtgtctacacacaaattagcctttccctcgaagatgggcctcagctcttccccagaggttttagaggttagcagcttgactcttcattctgtcaccccggcagtgcttcagactggcttgcctgtggcttctgaggaaaggacttctggatctcacttggtagaagatggattagccaatgttgaagagtcagaagattttctttctattgattcattgccttcaagttcattcactcaacctgtgccaaaagaaacaataccatccatggaagactctgatgtgtccttaacatcttcaccatatctgacctcttctataccttttggcttggactccttgacctccaaagtcaaagaccaattaaaagtgagccctttcctgccagatgcatccatggaaaaagagttaatatttgacggtggtttaggttcagggtctgggcaaaaggtagatctgattacttggccatggagtgagacttcatcagagaagagcgcngaaccactgtccaagccgtggcttgaagatgatgattcacttttgccagctgagattgaagacaagaaactagttttagttgacaaaatggattccacagaccaaattagtaagcactcaaaatatgaacatgatgacagatccacacactttccagaggaagagcctcttagtgggcctgctgtgcccatcttcgcagatactgcagctgaatctgcgtctctaaccctccccaagcacatatcagaagtacctggtgttgatgattnctcagttaccaaagcacctcttatactgacatctgtagcaatctctgcctctactgataaatcagatcaggcagatgccatcctaagggaggatatggaacaaattactgagtcatccaactatgaatggtttgacagtgaggtttcaatggtaaagccagatatgcaaactttgtggactatattgccagaatcagagagagtttggacaagaacttcttccctagagaaattgtccagagacatattggcaagtacaccacagagtgctgacaggctctggttatctgtgacacagtctaccaaattgcctccaaccacaatctccaccctgctagaggatgaagtaattatgggtgtacaggatatttcgttagaactggaccggataggcacagattactatcagcctgagcaagtccaagagcaaaatggcaaggttggtagttatgtggaaatgtcaacaagtgttcactccacagagatggttagtgtggcttggcccacagaaggaggagatgacttgagttatacccagacttcaggagctttggtggttttcttcagcctccgagtgactaacatgatgttttcagaagatctgtttaataaaaactccttggagtataaagccctggagcaaagattcttagaattgctggttccctatctccagtcaaatctcacggggttccagaacttagaaatcctcaacttcagaaatggcagcattgtggtgaacagtcgaatgaagtttgccaattctgtccctcctaacgtcaacaatgcggtgtacatgattctggaagacttttgtaccactgcctacaataccatgaacttggctattgataaatactctcttgatgtggaatcaggtgatgaagccaacccttgcaagtttcaggcctgtaatgaattttcagagtgtctggtcaacccctggagtggagaagcaaagtgcagatgcttccctggatacctgagtgtggaagaacggccctgtcagagtctctgtgacctacagcctgacttctgcttgaatgatggaaagtgtgacattatgcctgggcacggggccatttgtagtggctccagcaggcagcctgacagcctctcatctattgagaatgctgtgaagtacaaccccgtgtatgaaagtcacagggctggatgtgagaagtatgagggaccctatcctcagcatcccttctacagctctgctagcggagacgtgattggtgggctgagcagagaagaaatcagacagatgtatgagagcagtgagctttccagagaggaaattcaagagagaatgagagttttggaactgtatgccaatgatcctgagtttgcagcttttgtgagagagcaacaagtggaagaggtttaaccaaaactcctgttctgaaactgattagaagcctggagaagatggagattacttgttacttatgtcatataattaacctggattttaaacactgttggaagaagagttttctatgaaaaaattaaatatagggcacactgtttttttttcagcttaagttttcagaatgtagtaagagatgttaccatttttatttctataaagactgaatgctgtgtttaaataattgaaaactacgtaaactctggaaagtattctataagaaaaagctggacctaggatttagggctgcagttgctgtctgcttctgaatcactgggggtgtctcctaagaactgtgcctcgggtttttcaataggaaaataaggtgagactcttacatggagaagtctggcttagtaagggaatattttggagcatatttgttattgttgggtagaaggggaaacctttgaaatagtcttaatggatagtttataatcaggcattcatctaaataaaattctttcttttttttgatcaaactgctaaagaaaaagcaaacttttttgctgcaggatagaattcgggttgtatttttatgcttctatcagtgtcttgcatttcctgagcatattaatcaagaccatgttattgttatgttaactatgttaatatcctttttttcttagttttcaggatgaatgcatatatatatatatatatatatatatatatatatatatatatatatatatatataaagtttagaa

SEQ ID NO: 389099 - DNA, 3184 bp, Homo sapiens
  misc_feature (1603)..(1603): n is a, c, g, or t
  misc_feature (1872)..(1872): n is a, c, g, or t
ctgaagatctagtttggaacacccaaagttcaagtcttcaggcaacgccgtcatctattctgtgtgtcaggaagctgtctgggaagccttcaggactttttgggatcgacttcctgggcgtgaggaatatcattactggatgaatttgtgtgaggatggagtcacaagtatatttgaaatgggcacaaattttagtgaatctgtggaacatagaagcttaatcatgaagaaactgacttatgcaaaggaaactgtaagcagctctgaactgtcttctccagttcctgttggtgatacttcaacattgggagacactactctcagtgttccacatccagaggtggacgcctatgaaggtgcctcagagagcagcttggaaaggccagaggagagtattagcaatgaaattgagaatgtgatagaagaagccacaaaaccagcaggtgaacagattgcagaattcagtatccaccttttggggaagcagtacagggaagaactacaggattcctccagctttcaccaccagcaccttgaagaagaatttatttcagaggttgaaaatgcatttactgggttaccaggctacaaggaaattcgtgtacttgaatttaggtcccccaaggaaaatgacagtggcgtagatgtttactatgcagttaccttcaatggtgaggccatcagcaataccacctgggacctcattagccttcactccaacaaggtggaaaaccatggccttgtggaactggatgataaacccactgttgtttatacaatcagtaacttcagagattatattgctgagacattgcagcagaattttttgctggggaactcttccttgaatccagatcctgattccctgcagcttatcaatgtgagaggagttttgcgtcaccaaactgaagatctagtttggaacacccaaagttcaagtcttcaggcaacgccgtcatctattctggataatacctttcaagctgcatggccctcagcagatgaatccatcaccagcagtattccaccacttgatttcagctctggtcctccctcagccactggcagggaactctggtcagaaagtcctttgggtgatttagtgtctacacacaaattagcctttccctcgaagatgggcctcagctcttccccagaggttttagaggttagcagcttgactcttcattctgtcaccccggcagtgcttcagactggcttgcctgtggcttctgaggaaaggacttctggatctcacttggtagaagatggattagccaatgttgaagagtcagaagattttctttctattgattcattgccttcaagttcattcactcaacctgtgccaaaagaaacaataccatccatggaagactctgatgtgtccttaacatcttcaccatatctgacctcttctataccttttggcttggactccttgacctccaaagtcaaagaccaattaaaagtgagccctttcctgccagatgcatccatggaaaaagagttaatatttgacggtggtttaggttcagggtctgggcaaaaggtagatctgattacttggccatggagtgagacttcatcagagaagagcgcngaaccactgtccaagccgtggcttgaagatgatgattcacttttgccagctgagattgaagacaagaaactagttttagttgacaaaatggattccacagaccaaattagtaagcactcaaaatatgaacatgatgacagatccacacactttccagaggaagagcctcttagtgggcctgctgtgcccatcttcgcagatactgcagctgaatctgcgtctctaaccctccccaagcacatatcagaagtacctggtgttgatgattnctcagttaccaaagcacctcttatactgacatctgtagcaatctctgcctctactgataaatcagatcaggcagatgccatcctaagggaggatatggaacaaattactgagtcatccaactatgaatggtttgacagtgaggtttcaatggtaaagccagatatgcaaactttgtggactatattgccagaatcagagagagtttggacaagaacttcttccctagagaaattgtccagagacatattggcaagtacaccacagagtgctgacaggctctggttatctgtgacacagtctaccaaattgcctccaaccacaatctccaccctgctagaggatgaagtaattatgggtgtacaggatatttcgttagaactggaccggataggcacagattactatcagcctgagcaagtccaagagcaaaatggcaaggttggtagttatgtggaaatgtcaacaagtgttcactccacagagatggttagtgtggcttggcccacagaaggaggagatgacttgagttatacccagacttcaggagctttggtggttttcttcagcctccgagtgactaacatgatgttttcagaagatctgtttaataaaaactccttggagtataaagccctggagcaaagattcttagaattgctggttccctatctccagtcaaatctcacggggttccagaacttagaaatcctcaacttcagaaatggcagcattgtggtgaacagtcgaatgaagtttgccaattctgtccctcctaacgtcaacaatgcggtgtacatgattctggaagacttttgtaccactgcctacaataccatgaacttggctattgataaatactctcttgatgtggaatcaggtgatgaagccaacccttgcaagtttcaggcctgtaatgaattttcagagtgtctggtcaacccctggagtggagaagcaaagtgcagatgcttccctggatacctgagtgtggaagaacggccctgtcagagtctctgtgacctacagcctgacttctgcttgaatgatggaaagtgtgacattatgcctgggcacggggccatttgtaggtatgttgtagttacagattttgactttagaggctatagatatttcctctaaagaaaaggggcctgcacctataattttaggatacttattatagtatgcattatagaagttatatctaggcaatagatgggagccatctaactgtcatgtgaggatgagttgttaaacaggcctgaatttcaattcagtaatttatgctgttagggaactgcaaaaaaaaaa

SEQ ID NO: 389100 - DNA, 4669 bp, Homo sapiens
  misc_feature (2066)..(2066): n is a, c, g, or t
  misc_feature (2335)..(2335): n is a, c, g, or t
cgggctactttgaaaggacaaccatttttctttccgctaatttataatggttttgaagtggttgttcattctcaaacatagacttttaaatgttaggtctttcctataactctttgttattggaagtttcaaggatttggacactcaattaaggattctgtcctctcctcattcctttggttttggcccaaatgattatgtttcctctttttgggaagatttctctgggtattttgatatttgtcctgatagaaggagactttccatcattaacagcacaaacctacttatctatagaggagatccaagaacccaagagtgcagtttcttttctcctgcctgaagaatcaacagacctttctctagctaccaaaaagaaacagcctctggaccgcagagaaactgaaagacagtggttaatcagaaggcggagatctattctgtttcctaatggagtgaaaatctgcccagatgaaagtgttgcagaggctgtggcaaatcatgtgaagtattttaaagtccgagtgtgtcaggaagctgtctgggaagccttcaggactttttgggatcgacttcctgggcgtgaggaatatcattactggatgaatttgtgtgaggatggagtcacaagtatatttgaaatgggcacaaattttagtgaatctgtggaacatagaagcttaatcatgaagaaactgacttatgcaaaggaaactgtaagcagctctgaactgtcttctccagttcctgttggtgatacttcaacattgggagacactactctcagtgttccacatccagaggtggacgcctatgaaggtgcctcagagagcagcttggaaaggccagaggagagtattagcaatgaaattgagaatgtgatagaagaagccacaaaaccagcaggtgaacagattgcagaattcagtatccaccttttggggaagcagtacagggaagaactacaggattcctccagctttcaccaccagcaccttgaagaagaatttatttcagaggttgaaaatgcatttactgggttaccaggctacaaggaaattcgtgtacttgaatttaggtcccccaaggaaaatgacagtggcgtagatgtttactatgcagttaccttcaatggtgaggccatcagcaataccacctgggacctcattagccttcactccaacaaggtggaaaaccatggccttgtggaactggatgataaacccactgttgtttatacaatcagtaacttcagagattatattgctgagacattgcagcagaattttttgctggggaactcttccttgaatccagatcctgattccctgcagcttatcaatgtgagaggagttttgcgtcaccaaactgaagatctagtttggaacacccaaagttcaagtcttcaggcaacgccgtcatctattctggataatacctttcaagctgcatggccctcagcagatgaatccatcaccagcagtattccaccacttgatttcagctctggtcctccctcagccactggcagggaactctggtcagaaagtcctttgggtgatttagtgtctacacacaaattagcctttccctcgaagatgggcctcagctcttccccagaggttttagaggttagcagcttgactcttcattctgtcaccccggcagtgcttcagactggcttgcctgtggcttctgaggaaaggacttctggatctcacttggtagaagatggattagccaatgttgaagagtcagaagattttctttctattgattcattgccttcaagttcattcactcaacctgtgccaaaagaaacaataccatccatggaagactctgatgtgtccttaacatcttcaccatatctgacctcttctataccttttggcttggactccttgacctccaaagtcaaagaccaattaaaagtgagccctttcctgccagatgcatccatggaaaaagagttaatatttgacggtggtttaggttcagggtctgggcaaaaggtagatctgattacttggccatggagtgagacttcatcagagaagagcgcngaaccactgtccaagccgtggcttgaagatgatgattcacttttgccagctgagattgaagacaagaaactagttttagttgacaaaatggattccacagaccaaattagtaagcactcaaaatatgaacatgatgacagatccacacactttccagaggaagagcctcttagtgggcctgctgtgcccatcttcgcagatactgcagctgaatctgcgtctctaaccctccccaagcacatatcagaagtacctggtgttgatgattnctcagttaccaaagcacctcttatactgacatctgtagcaatctctgcctctactgataaatcagatcaggcagatgccatcctaagggaggatatggaacaaattactgagtcatccaactatgaatggtttgacagtgaggtttcaatggtaaagccagatatgcaaactttgtggactatattgccagaatcagagagagtttggacaagaacttcttccctagagaaattgtccagagacatattggcaagtacaccacagagtgctgacaggctctggttatctgtgacacagtctaccaaattgcctccaaccacaatctccaccctgctagaggatgaagtaattatgggtgtacaggatatttcgttagaactggaccggataggcacagattactatcagcctgagcaagtccaagagcaaaatggcaaggttggtagttatgtggaaatgtcaacaagtgttcactccacagagatggttagtgtggcttggcccacagaaggaggagatgacttgagttatacccagacttcaggagctttggtggttttcttcagcctccgagtgactaacatgatgttttcagaagatctgtttaataaaaactccttggagtataaagccctggagcaaagattcttagaattgctggttccctatctccagtcaaatctcacggggttccagaacttagaaatcctcaacttcagaaatggcagcattgtggtgaacagtcgaatgaagtttgccaattctgtccctcctaacgtcaacaatgcggtgtacatgattctggaagacttttgtaccactgcctacaataccatgaacttggctattgataaatactctcttgatgtggaatcaggtgatgaagccaacccttgcaagtttcaggcctgtaatgaattttcagagtgtctggtcaacccctggagtggagaagcaaagtgcagatgcttccctggatacctgagtgtggaagaacggccctgtcagagtctctgtgacctacagcctgacttctgcttgaatgatggaaagtgtgacattatgcctgggcacggggccatttgtaggtgccgggtgggtgagaactggtggtaccgaggcaagcactgtgaggaatttgtgtctgagcccgtgatcataggcatcactattgcctccgtggttggacttcttgtcatcttttctgctatcatctacttcttcatcaggactcttcaagcacaccatgacaggagtgaaagagagagtcccttcagtggctccagcaggcagcctgacagcctctcatctattgagaatgctgtgaagtacaaccccgtgtatgaaagtcacagggctggatgtgagaagtatgagggaccctatcctcagcatcccttctacagctctgctagcggagacgtgattggtgggctgagcagagaagaaatcagacagatgtatgagagcagtgagctttccagagaggaaattcaagagagaatgagagttttggaactgtatgccaatgatcctgagtttgcagcttttgtgagagagcaacaagtggaagaggtttaaccaaaactcctgttctgaaactgattagaagcctggagaagatggagattacttgttacttatgtcatataattaacctggattttaaacactgttggaagaagagttttctatgaaaaaattaaatatagggcacactgtttttttttcagcttaagttttcagaatgtagtaagagatgttaccatttttatttctataaagactgaatgctgtgtttaaataattgaaaactacgtaaactctggaaagtattctataagaaaaagctggacctaggatttagggctgcagttgctgtctgcttctgaatcactgggggtgtctcctaagaactgtgcctcgggtttttcaataggaaaataaggtgagactcttacatggagaagtctggcttagtaagggaatattttggagcatatttgttattgttgggtagaaggggaaacctttgaaatagtcttaatggatagtttataatcaggcattcatctaaataaaattctttcttttttttgatcaaactgctaaagaaaaagcaaacttttttgctgcaggatagaattcgggttgtatttttatgcttctatcagtgtcttgcatttcctgagcatattaatcaagaccatgttattgttatgttaactatgttaatatcctttttttcttagttttcaggatgaatgcatatatatatatatatatatatatatatatatatatatatatatatatatatataaagtttagaa

SEQ ID NO: 389101 - DNA, 441 bp, Homo sapiens
ccaattctctgaacacacacagtgggcaccatgtccaatagtcattagtcaagctctgtggtctggtatttacaaatttccaggaaacgagtccagcgtggtgcgagaggctctccgttactttgttcagtaagctgagatgttatcagaagtgacaatttttaaaaaaattattatttgttttaatattttaatctagaagccattggctacctggcattttgaaagttttccagtggttgaacatttacaagaacaattgtgaacctgtgcctgttggcttccaaatactgatcgttcctaaacattctcttaccagcataatgttgacctttgcacaacttccttctttctttggtgctcacatttctgtgatttaatcgtcctttttacaagtactttaagaaagaaaaaataaaaaagattttctagtagtaaaac

SEQ ID NO: 389102 - DNA, 142 bp, Homo sapiens
actccctcccataaaaatagggtaacctttaaaatcacaaacaacacagcccacactaccaacgttcttccgtcactgacagtgacaggatctagctagttctcatgctccaaaagttatatatatatacatgaactttaaa

SEQ ID NO: 389103 - DNA, 381 bp, Homo sapiens
tcctttggatgttattatttctcattattttaagcattgaaaggagaaaaaaaaagctactctggtgtcaataaataagagcaacactccttcatgggttttcctccttaagatttcttacttctacaatctcaccagacctcttggcaaatggtcccaccttgccccaacttatcctcatttcaggtaagacatttagcctctttggatctcagttttctcatatgaaaagtgaggaggttggattaggagcaagatgggtaactggtagcctaggggcagtattctggacagcagatatttgttagtctcacaaatgtatatgtatgtttaaagttgtttgccaatatgtaatagtcaagatagttctcataacatctc

SEQ ID NO: 389104 - DNA, 195 bp, Homo sapiens
agtaaagtgctgaacaaatgctaactgttattatggatctatcctgacccactgtctatcagtgtctatcaatctttatgcctagatgtgataacatgtgagaaaacaaacgggtggagaacttggccttccctaaagtgcagcatggaccagagttgggggtcagtctgaaaaagtgtgagaatttttaatgcc

SEQ ID NO: 389105 - DNA, 499 bp, Homo sapiens
aggttaagggccaaaagtgatttctacaagaatcctaaagagaagctatcatctctcctgtctcgtccttgcaaaggatagtggtcaggaatggggctggatctgccacattctggggaacagagatgacctcaaccttcagcaccagagcagttccagggagcaccaactggccaaagtcacaggtgaatcagtcaagagttttaagacagctttcccttgagataacacactcccgtgctggctgttctgacccagtcagaatgcaaatgtttgtgtagttatatttattaatagagtccacggttagccaggcctggcacatggctagggctctgtattgaaaccaataagtaaaagcctggaatttctattttcgttcccactcctgttgctactgggggccttttatccagtcctgtttttaatccagcagcctgcaaggggcaggaaagaggcaggtaaagttgtctagcaaggcagagtagaaggcacacct

SEQ ID NO: 389106 - DNA, 390 bp, Homo sapiens
ggaataggtgatctgttttctaacataatcaggaaataggccatcttgttcaatgaaatgttctggtcaatagcatcacattacacataccatacccatttaatccatattctgtgaatccaattatactaaactgcatttaactctaaaacccactgatcataatttaaatgctgatgaaaacatttgaagaccgtacagtgctttaatgatcacttacctttgcaccatgcagtactctagtattctcagtagcagctgcagtaatccctgtgatagaaaactgggtgaaccaggttttactaaaatcaatagaacattctgtagttattgcaagtactgtgagataaaggtcaattaattctaatagtcaagaagaaagaatatatg

SEQ ID NO: 389107 - DNA, 287 bp, Homo sapiens
atattgtatccattttgtaccttaggaaaggccatccatgagcatcactgggtggagatttttgggtaagaggtgtatagtttctagcacaagggtcaaactcaactccgatggaaaattcttcgttggggcagtgtcttctgaggcaatgtcatctcagccagtgaaatttgggggccagagtgatatcatgatgtcatctgggatgtgggactggggaatcctttgttgttgttgttgttgttttgagatggagtctcactctattgcccaggctggagctcagt

SEQ ID NO: 389108 - DNA, 327 bp, Homo sapiens
  misc_feature (18)..(18): n is a, c, g, or t
tctggtcgtcacaggacncatgggttacgcccctgatatagcattcgcctactccgtgaagtctagggacaggaagatggttggcgacgtgaccggggcccaggcctatgcctccaccgccaagtgcctgaacatctgggccctgattctgggcatcctcatgaccattctgctcatcgtcatcccagtgctgatcttccaggcctatggatagatcaggaggcatcactgaggccaggagctctgcccatgacctgtatcccacgtactccaacttccattcctcgccctgcccccggagccgagtcctgtatcagccctttatac

SEQ ID NO: 389109 - DNA, 1107 bp, Homo sapiens
gcggcgcggcgagcacgacgttccacgggacccgcggagccgcgtcgtgatcgccgccggcctcccgcacccgcaccctctccgctcgcgccctgctcagcgcgtcctcccgcggcggcccgcgggacggcgtgacccgccgggctctcggtgccccggggccgcgcgccatgggcagcccccgctccgcgctgagctgcctgctgttgcacttgctggtcctctgcctccaagcccaggaaggcccgggcaggggccctgcgctgggcagggagctcgcttccctgttccgggctggccgggagccccagggtgtctcccaacaggtaactgttcagtcctcacctaattttacacagcatgtgagggagcagagcctggtgacggatcagctcagccgccgcctcatccggacctaccaactctacagccgcaccagcgggaagcacgtgcaggtcctggccaacaagcgcatcaacgccatggcagaggacggcgaccccttcgcaaagctcatcgtggagacggacacctttggaagcagagtccgagtccgaggagccgagacgggcctctacatctgcatgaacaagaaggggaagctgatcgccaagagcaacggcaaaggcaaggactgcgtcttcacggagattgtgctggagaacaactacacagcgctgcagaatgccaagtacgagggctggtacatggccttcacccgcaagggccggccccgcaagggctccaagacgcggcagcaccagcgtgaggtccacttcatgaagcggctgccccggggccaccacaccaccgagcagagcctgcgcttcgagttcctcaactacccgcccttcacgcgcagcctgcgcggcagccagaggacttgggccccggagccccgataggtgctgcctggccctccccacaatgccagaccgcagagaggctcatcctgtagggcacccaaaactcaagcaagatgagctgtgcgctgctctgcaggctggggaggtgctgggggagccctgggttccggttgttgatattgtttgctgttgggtttttgctgtttttttttttttttttttttttaaaacaaaagaggct

SEQ ID NO: 389110 - DNA, 987 bp, Homo sapiens
gcggcgcggcgagcacgacgttccacgggacccgcggagccgcgtcgtgatcgccgccggcctcccgcacccgcaccctctccgctcgcgccctgctcagcgcgtcctcccgcggcggcccgcgggacggcgtgacccgccgggctctcggtgccccggggccgcgcgccatgggcagcccccgctccgcgctgagctgcctgctgttgcacttgctggtcctctgcctccaagcccagcatgtgagggagcagagcctggtgacggatcagctcagccgccgcctcatccggacctaccaactctacagccgcaccagcgggaagcacgtgcaggtcctggccaacaagcgcatcaacgccatggcagaggacggcgaccccttcgcaaagctcatcgtggagacggacacctttggaagcagagtccgagtccgaggagccgagacgggcctctacatctgcatgaacaagaaggggaagctgatcgccaagagcaacggcaaaggcaaggactgcgtcttcacggagattgtgctggagaacaactacacagcgctgcagaatgccaagtacgagggctggtacatggccttcacccgcaagggccggccccgcaagggctccaagacgcggcagcaccagcgtgaggtccacttcatgaagcggctgccccggggccaccacaccaccgagcagagcctgcgcttcgagttcctcaactacccgcccttcacgcgcagcctgcgcggcagccagaggacttgggccccggagccccgataggtgctgcctggccctccccacaatgccagaccgcagagaggctcatcctgtagggcacccaaaactcaagcaagatgagctgtgcgctgctctgcaggctggggaggtgctgggggagccctgggttccggttgttgatattgtttgctgttgggtttttgctgtttttttttttttttttttttttaaaacaaaagaggct

SEQ ID NO: 389111 - DNA, 1020 bp, Homo sapiens
gcggcgcggcgagcacgacgttccacgggacccgcggagccgcgtcgtgatcgccgccggcctcccgcacccgcaccctctccgctcgcgccctgctcagcgcgtcctcccgcggcggcccgcgggacggcgtgacccgccgggctctcggtgccccggggccgcgcgccatgggcagcccccgctccgcgctgagctgcctgctgttgcacttgctggtcctctgcctccaagcccaggtaactgttcagtcctcacctaattttacacagcatgtgagggagcagagcctggtgacggatcagctcagccgccgcctcatccggacctaccaactctacagccgcaccagcgggaagcacgtgcaggtcctggccaacaagcgcatcaacgccatggcagaggacggcgaccccttcgcaaagctcatcgtggagacggacacctttggaagcagagtccgagtccgaggagccgagacgggcctctacatctgcatgaacaagaaggggaagctgatcgccaagagcaacggcaaaggcaaggactgcgtcttcacggagattgtgctggagaacaactacacagcgctgcagaatgccaagtacgagggctggtacatggccttcacccgcaagggccggccccgcaagggctccaagacgcggcagcaccagcgtgaggtccacttcatgaagcggctgccccggggccaccacaccaccgagcagagcctgcgcttcgagttcctcaactacccgcccttcacgcgcagcctgcgcggcagccagaggacttgggccccggagccccgataggtgctgcctggccctccccacaatgccagaccgcagagaggctcatcctgtagggcacccaaaactcaagcaagatgagctgtgcgctgctctgcaggctggggaggtgctgggggagccctgggttccggttgttgatattgtttgctgttgggtttttgctgtttttttttttttttttttttttaaaacaaaagaggct

SEQ ID NO: 389112 - DNA, 1074 bp, Homo sapiens
gcggcgcggcgagcacgacgttccacgggacccgcggagccgcgtcgtgatcgccgccggcctcccgcacccgcaccctctccgctcgcgccctgctcagcgcgtcctcccgcggcggcccgcgggacggcgtgacccgccgggctctcggtgccccggggccgcgcgccatgggcagcccccgctccgcgctgagctgcctgctgttgcacttgctggtcctctgcctccaagcccaggaaggcccgggcaggggccctgcgctgggcagggagctcgcttccctgttccgggctggccgggagccccagggtgtctcccaacagcatgtgagggagcagagcctggtgacggatcagctcagccgccgcctcatccggacctaccaactctacagccgcaccagcgggaagcacgtgcaggtcctggccaacaagcgcatcaacgccatggcagaggacggcgaccccttcgcaaagctcatcgtggagacggacacctttggaagcagagtccgagtccgaggagccgagacgggcctctacatctgcatgaacaagaaggggaagctgatcgccaagagcaacggcaaaggcaaggactgcgtcttcacggagattgtgctggagaacaactacacagcgctgcagaatgccaagtacgagggctggtacatggccttcacccgcaagggccggccccgcaagggctccaagacgcggcagcaccagcgtgaggtccacttcatgaagcggctgccccggggccaccacaccaccgagcagagcctgcgcttcgagttcctcaactacccgcccttcacgcgcagcctgcgcggcagccagaggacttgggccccggagccccgataggtgctgcctggccctccccacaatgccagaccgcagagaggctcatcctgtagggcacccaaaactcaagcaagatgagctgtgcgctgctctgcaggctggggaggtgctgggggagccctgggttccggttgttgatattgtttgctgttgggtttttgctgtttttttttttttttttttttttaaaacaaaagaggct

SEQ ID NO: 389113 - DNA, 983 bp, Homo sapiens
gcggcgcggcgagcacgacgttccacgggacccgcggagccgcgtcgtgatcgccgccggcctcccgcacccgcaccctctccgctcgcgccctgctcagcgcgtcctcccgcggcggcccgcgggacggcgtgacccgccgggctctcggtgccccggggccgcgcgccatgggcagcccccgctccgcgctgagctgcctgtaactgttcagtcctcacctaattttacacagcatgtgagggagcagagcctggtgacggatcagctcagccgccgcctcatccggacctaccaactctacagccgcaccagcgggaagcacgtgcaggtcctggccaacaagcgcatcaacgccatggcagaggacggcgaccccttcgcaaagctcatcgtggagacggacacctttggaagcagagtccgagtccgaggagccgagacgggcctctacatctgcatgaacaagaaggggaagctgatcgccaagagcaacggcaaaggcaaggactgcgtcttcacggagattgtgctggagaacaactacacagcgctgcagaatgccaagtacgagggctggtacatggccttcacccgcaagggccggccccgcaagggctccaagacgcggcagcaccagcgtgaggtccacttcatgaagcggctgccccggggccaccacaccaccgagcagagcctgcgcttcgagttcctcaactacccgcccttcacgcgcagcctgcgcggcagccagaggacttgggccccggagccccgataggtgctgcctggccctccccacaatgccagaccgcagagaggctcatcctgtagggcacccaaaactcaagcaagatgagctgtgcgctgctctgcaggctggggaggtgctgggggagccctgggttccggttgttgatattgtttgctgttgggtttttgctgtttttttttttttttttttttttaaaacaaaagaggct

SEQ ID NO: 389114 - DNA, 427 bp, Homo sapiens
cctcttgtcagctggaaagattattaggagccatgaatgtcctttaatatggttatctttgttactattgagtttacagtttttcaccagaatctatgtgcctctttctcttctttaccctaattactgtcctaacattgacccagccaccagtactagggatgccctagctttatgctcacctattttatccataaaaaatcttcagaccagcctgggcaacatagcgggaccctgtatctaccaaaaaaaaaaaaaaaaaaaaaaaaaaagctgggtgtggtgccacacacctgtagttccagctacttgggaggccaaggtgggaggatcgcttgggcccaggagttcaaagctgcagtgatccctgattgcatgactgcactccatcctgagcaacagagagggaccctgtctcaaaaaaaaa

SEQ ID NO: 389115 - DNA, 391 bp, Homo sapiens
tggacaacagatgtctcatgagaatgacccatatatcctacatagtctaattagaagagttactactgtaacaatttcatgttcatgcaataccagctgcttcatgttcattcttataaaagaggaactaggactgaagcagtggctcatgcctgtaatcctagcactttgggaggctgaggcaggcagatcgattgagctcaggaatttgagactagctaggcaacatggtgaaaccccatctctactaaaaaaaaatacaaaaaaatggccaggcacagtggctcacacctgtaatcccaacactttgggaggccgaggcaggcggatcacctgacgtcaggagttcgaaatcagcctcgaccaacatggtagaacgctgtctctacta

SEQ ID NO: 389116 - DNA, 350 bp, Homo sapiens
ctcagaagaagagttccaaacaaaagatctactaccctgagaagcggtgaagtgctcctggggcccaccaaggccacacaagtcaaggagtggatggccttgccccagctatggctcagatcacctttgcaggatgacatcttgttgggagatggtcatcagagacagggccatggaagacgctgtcaggaggaggcacagaggaaaggctatgggagcacaaagcaagaaagtggccttctgcaagccaggaagagaggcctccccagaaaccaactctaccagcacatcgatcttggacttttggcctctagaacattgagaaaataaaagtctgctgttaaaccacc

SEQ ID NO: 389117 - DNA, 328 bp, Homo sapiens
ttttcatggcagcctgagcagactaagacagcagctaacacagcaagatcataccagttaaccttcctggttagaagacctgagcctcctgacttccggtcactggatactctctgttaggctcatgatttaaactctgtagtcactgctggcttggaaacctctaactctctctgcctcttgacagtgttccctcaagggagtccattagccaggactaggttacatgcccctgtgttagctgtgagggacaaggcagagaaataactgcccaagttcagcttcccataatgtttggggatgctatgactcaactttgatctatttt

SEQ ID NO: 389118 - DNA, 257 bp, Homo sapiens
gcaaatgacatactggcattaagtagtacagagagcttttgtggtcttactgctctaataaaggcagaaactgtcttaatttaacagccttctgttaaatgtagcttataaacttcccaattagttattattctatatactctgtaaaaacataaatttataatgtacagtatgtcatgtgtcacacaacctacataataaatgcacatttaagtaaagtatgttttgttccccaaatcatatactttatatatctc

SEQ ID NO: 389119 - DNA, 295 bp, Homo sapiens
tcatagtgagaattagtaaatattaagtagtattaggattattatcttgtggttaatatgaaaacagagggagactgggacagaataaataagttgggaagtgcagtaggagatgagtctagggtgagggacccattatgcaaagctgtataaaccagtgtaaggactttgtgtttagtttgatcgaaaagtgagctactggaggtttctgaattgagatgtaacgtggtctgacttaggttttgaaaggacctctggctgctttgttttggacaggctgtggaaagtcagaatg

SEQ ID NO: 389120 - DNA, 392 bp, Homo sapiens
aagctgtggacatgagtaaaattattcaggtaaaatacatttaggttgtatatttatgttaatggtcttcaaaaaagcttacttagcctaacatgaaaacagtgagtggctagccaggtgcagtggctcacgcctgtaatcccagcactttgagaggccaaggcaggtagatcacttgaggccaggagttcaggaccaggctggctaatatgggaaaccccctatctactaaaaatataaaaattagccaggtgtggtggtgcacacctgtattcccaactacttgggaggctgaggcacaagaatcgcttgaacccgggaagtggaggttgcaatgagccaagactgtgccattgcactccagcctgggtgacagagtgagaccctgtctc

SEQ ID NO: 389121 - DNA, 2086 bp, Homo sapiens
cccctttcccccctactgctgaaacccaatcctctgcagcagcgccggctcagcaccgccggctcagcaccgctccgcagcccctgcctgccacggtcagctacgtcccacctggtctgctgcggagtccccagcccagtgcctagcccagtggagccaccgcctgttcctcgggaaggaacagtgggacctgaccggccaagatcacctcctccaatcctgccaggctagtgcctccctgccttccaaccttggctgtctcccacctctctcttctcctctccttgcctggcctcctgaatcctatcttagcctccttagccccctgactgactctctctcgcttcttccaagcctctgtagctggttccgctcctgggttctggccatgaagcccacctcaggcccagaggaggcccggcggccagcctcggacatccgcgtgttcgccagcaactgctcgatgcacgggctgggccacgtcttcgggccaggcagcctgagcctgcgccgggggatgtgggcagcggccgtggtcctgtcagtggccaccttcctctaccaggtggctgagagggtgcgctactacagggagttccaccaccagactgccctggatgagcgagaaagccaccggctcatcttcccggctgtcaccctgtgcaacatcaacccactgcgccgctcgcgcctaacgcccaacgacctgcactgggctgggtctgcgctgctgggcctggatcccgcagagcacgccgccttcctgcgcgccctgggccggccccctgcaccgcccggcttcatgcccagtcccacctttgacatggcgcaactctatgcccgtgctgggcactccctggatgacatgctgctggactgtcgcttccgtggccaaccttgtgggcctgagaacttcaccacgatcttcacccggatgggaaagtgctacacatttaactctggcgctgatggggcagagctgctcaccactactaggggtggcatgggcaatgggctggacatcatgctggacgtgcagcaggaggaatatctacctgtgtggagggacaatgaggagaccccgtttgaggtggggatccgagtgcagatccacagccaggaggagccgcccatcatcgatcagctgggcttgggggtgtccccgggctaccagacctttgtttcttgccagcagcagcagctgagcttcctgccaccgccctggggcgattgcagttcagcatctctgaaccccaactatgagccagagccctctgatcccctaggctcccccagccccagccccagccctccctatacccttatggggtgtcgcctggcctgcgaaacccgctacgtggctcggaagtgcggctgccgaatggtgtacatgccaggcgacgtgccagtgtgcagcccccagcagtacaagaactgtgcccacccggccatagatgccatgcttcgcaaggactcgtgcgcctgccccaacccgtgcgccagcacgcgctacgccaaggagctctccatggtgcggatcccgagccgcgccgccgcgcgcttcctggcccggaagctcaaccgcagcgaggcctacatcgcggagaacgtgctggccctggacatcttctttgaggccctcaactatgagaccgtggagcagaagaaggcctatgagatgtcagagctgcttggtgacattgggggccagatggggctgttcatcggggccagcctgctcaccatcctcgagatcctagactacctctgtgaggtgttccgagacaaggtcctgggatatttctggaaccgacagcactcccaaaggcactccagcaccaatctgcttcaggaagggctgggcagccatcgaacccaagttccccacctcagcctgggccccagacctcccacccctccctgtgccgtcaccaagactctctccgcctcccaccgcacctgctaccttgtcacacagctctagacctgctgtctgtgtcctcggagccccgccctgacatcctggacatgcctagcctgcacgtagcttttccgtcttcaccccaaataaagtcctaatgcatca

SEQ ID NO: 389122 - DNA, 2106 bp, Homo sapiens
cccctttcccccctactgctgaaacccaatcctctgcagcagcgccggctcagcaccgccggctcagcaccgctccgcagcccctgcctgccacggtcagctacgtcccacctggtctgctgcggagtccccagcccagtgcctagcccagtggagccaccgcctgttcctcgggaaggaacagtgggacctgaccggccaagatcacctcctccaatcctgccaggctagtgcctccctgccttccaaccttggctgtctcccacctctctcttctcctctccttgcctggcctcctgaatcctatcttagcctccttagccccctgactgactctctctcgcttcttccaagcctctgtagctggttccgctcctgggttctggccatgaagcccacctcaggcccagaggaggcccggcggccagcctcggacatccgcgtgttcgccagcaactgctcgatgcacgggctgggccacgtcttcgggccaggcagcctgagcctgcgccgggggatgtgggcagcggccgtggtcctgtcagtggccaccttcctctaccaggtggctgagagggtgcgctactacagggagttccaccaccagactgccctggatgagcgagaaagccaccggctcatcttcccggctgtcaccctgtgcaacatcaacccactgcgccgctcgcgcctaacgcccaacgacctgcactgggctgggtctgcgctgctgggcctggatcccgcagagcacgccgccttcctgcgcgccctgggccggccccctgcaccgcccggcttcatgcccagtcccacctttgacatggcgcaactctatgcccgtgctgggcactccctggatgacatgctgctggactgtcgcttccgtggccaaccttgtgggcctgagaacttcaccacgatcttcacccggatgggaaagtgctacacatttaactctggcgctgatggggcagagctgctcaccactactaggggtggcatgggcaatgggctggacatcatgctggacgtgcagcaggaggaatatctacctgtgtggagggacaatgaggagaccccgtttgaggtggggatccgagtgcagatccacagccaggaggagccgcccatcatcgatcagctgggcttgggggtgtccccgggctaccagacctttgtttcttgccagcagcagcagctgagcttcctgccaccgccctggggcgattgcagttcagcatctctgaaccccaactatgagccagagccctctgatcccctaggctcccccagccccagccccagccctccctatacccttatggggtgtcgcctggcctgcgaaacccgctacgtggctcggaagtgcggctgccgaatggtgtacatgccaggcgacgtgccagtgtgcagcccccagcagtacaagaactgtgcccacccggccatagatgccatgcttcgcaaggactcgtgcgcctgccccaacccgtgcgccagcacgcgctacgccaaggagctctccatggtgcggatcccgagccgcgccgccgcgcgcttcctggcccggaagctcaaccgcagcgaggcctacatcgcggagaacgtgctggccctggacatcttctttgaggccctcaactatgagaccgtggagcagaagaaggcctatgagatgtcagagctgcttggtgacattgggggccagatggggctgttcatcggggccagcctgctcaccatcctcgagatcctagactacctctgtgaggtgttccgagacaaggtcctgggatatttctggaaccgacagcactcccaaaggcactccagcaccaatctgcttcaggaagggctgggcagccatcgaacccaagttccccacctcagcctgggccccagcactctgctctgttccgaagacctcccacccctccctgtgccgtcaccaagactctctccgcctcccaccgcacctgctaccttgtcacacagctctagacctgctgtctgtgtcctcggagccccgccctgacatcctggacatgcctagcctgcacgtagcttttccgtcttcaccccaaataaagtcctaatgcatca

SEQ ID NO: 389123 - DNA, 1203 bp, Homo sapiens
cccctttcccccctactgctgaaacccaatcctctgcagcagcgccggctcagcaccgccggctcagcaccgctccgcagcccctgcctgccacggtcagctacgtcccacctggtctgctgcggagtccccagcccagtgcctagcccagtggagccaccgcctgttcctcgggaaggaacagtgggacctgaccggccaagatcacctcctccaatcctgccaggctagtgcctccctgccttccaaccttggctgtctcccacctctctcttctcctctccttgcctggcctcctgaatcctatcttagcctccttagccccctgactgactctctctcgcttcttccaagcctctgtagctggttccgctcctgggttctggccatgaagcccacctcaggcccagaggaggcccggcggccagcctcggacatccgcgtgttcgccagcaactgctcgatgcacgggctgggccacgtcttcgggccaggcagcctgagcctgcgccgggggatgtgggcagcggccgtggtcctgtcagtggccaccttcctctaccaggtggctgagagggtgcgctactacagggagttccaccaccagactgccctggatgagcgagaaagccaccggctcatcttcccggctgtcaccctgtgcaacatcaacccactgcgccgctcgcgcctaacgcccaacgacctgcactgggctgggtctgcgctgctgggcctggatcccgcagagcacgccgccttcctgcgcgccctgggccggccccctgcaccgcccggcttcatgcccagtcccacctttgacatggcgcaactctatgcccgtgctgggcactccctggatgacatgctgctggactgtcgcttccgtggccaaccttgtgggcctgagaacttcaccacgatcttcacccggatgggaaagtgctacacatttaactctggcgctgatggggcagagctgctcaccactactaggggtggcatgggcaatgggctggacatcatgctggacgtgcagcaggaggaatatctacctgtgtggagggacaatgaggagaccccgtttgaggtggggatccgagtgcagatccacagccaggaggagccgccctgacatcctggacatgcctagcctgcacgtagcttttccgtcttcaccccaaataaagtcctaatgcatca

SEQ ID NO: 389124 - DNA, 2512 bp, Homo sapiens
cccctttcccccctactgctgaaacccaatcctctgcagcagcgccggctcagcaccgccggctcagcaccgctccgcagcccctgcctgccacggtcagctacgtcccacctggtctgctgcggagtccccagcccagtgcctagcccagtggagccaccgcctgttcctcgggaaggaacagtgggacctgaccggccaagatcacctcctccaatcctgccaggctagtgcctccctgccttccaaccttggctgtctcccacctctctcttctcctctccttgcctggcctcctgaatcctatcttagcctccttagccccctgactgactctctctcgcttcttccaagcctctgtagctggttccgctcctgggttctggccatgaagcccacctcaggcccagaggaggcccggcggccagcctcggacatccgcgtgttcgccagcaactgctcgatgcacgggctgggccacgtcttcgggccaggcagcctgagcctgcgccgggggatgtgggcagcggccgtggtcctgtcagtggccaccttcctctaccaggtggctgagagggtgcgctactacagggagttccaccaccagactgccctggatgagcgagaaagccaccggctcatcttcccggctgtcaccctgtgcaacatcaacccactgcgccgctcgcgcctaacgcccaacgacctgcactgggctgggtctgcgctgctgggcctggatcccgcagagcacgccgccttcctgcgcgccctgggccggccccctgcaccgcccggcttcatgcccagtcccacctttgacatggcgcaactctatgcccgtgctgggcactccctggatgacatgctgctggactgtcgcttccgtggccaaccttgtgggcctgagaacttcaccacgatcttcacccggatgggaaagtgctacacatttaactctggcgctgatggggcagagctgctcaccactactaggggtggcatgggcaatgggctggacatcatgctggacgtgcagcaggaggaatatctacctgtgtggagggacaatgaggagaccccgtttgaggtggggatccgagtgcagatccacagccaggaggagccgcccatcatcgatcagctgggcttgggggtgtccccgggctaccagacctttgtttcttgccagcagcagcaggtacccttccgtgtgcctccacacctactacttcaagcccacaccacctcagaccctaaaccctcagctcctcagacctgtctaggggcctctccccagctggcctctcacgctctccgggaagcctccttaaccctgtccccccacagctgagcttcctgccaccgccctggggcgattgcagttcagcatctctgaaccccaactatgagccagagccctctgatcccctaggctcccccagccccagccccagccctccctatacccttatggggtgtcgcctggcctgcgaaacccgctacgtggctcggaagtgcggctgccgaatggtgtacatgccaggcgacgtgccagtgtgcagcccccagcagtacaagaactgtgcccacccggccatagatgccatgcttcgcaaggactcgtgcgcctgccccaacccgtgcgccagcacgcgctacgccaaggagctctccatggtgcggatcccgagccgcgccgccgcgcgcttcctggcccggaagctcaaccgcagcgaggcctacatcgcggagaacgtgctggccctggacatcttctttgaggccctcaactatgagaccgtggagcagaagaaggcctatgagatgtcagagctgcttggtgacattgggggccagatggggctgttcatcggggccagcctgctcaccatcctcgagatcctagactacctctgtgaggtgttccgagacaaggtcctgggatatttctggaaccgacagcactcccaaaggcactccagcaccaatctggtaacagcccctcttctggagcccttgcctgctccaagggtgctagggcccacccctgaagcctagaccaccatcccgccccagctgaggagaaacaggcaggagggtgtgcagtgacctcgactggtccctgggaggaggaccactccccacctctgaccctctcgtcctcacacagcttcaggaagggctgggcagccatcgaacccaagttccccacctcagcctgggccccaggtaacacataatggccccctaaaatcaagggagggcaggggcaggctcaggacagtgggtgtgcccgttcccaccccagcactctgctctgttccgaagacctcccacccctccctgtgccgtcaccaagactctctccgcctcccaccgcacctgctaccttgtcacacagctctagacctgctgtctgtgtcctcggagccccgccctgacatcctggacatgcctagcctgcacgtagcttttccgtcttcaccccaaataaagtcctaatgcatca

SEQ ID NO: 389125 - DNA, 1548 bp, Homo sapiens
cccctttcccccctactgctgaaacccaatcctctgcagcagcgccggctcagcaccgccggctcagcaccgctccgcagcccctgcctgccacggtcagctacgtcccacctggtctgctgcggagtccccagcccagtgcctagcccagtggagccaccgcctgttcctcgggaaggaacagtgggacctgaccggccaagatcacctcctccaatcctgccaggctagtgcctccctgccttccaaccttggctgtctcccacctctctcttctcctctccttgcctggcctcctgaatcctatcttagcctccttagccccctgactgactctctctcgcttcttccaagcctctgtagctggttccgctcctgggttctggccatgaagcccacctcaggcccagaggaggcccggcggccagcctcggacatccgcgtgttcgccagcaactgctcgatgcacgggctgggccacgtcttcgggccaggcagcctgagcctgcgccgggggatgtgggcagcggccgtggtcctgtcagtggccaccttcctctaccaggtggctgagagggtgcgctactacagggagttccaccaccagactgccctggatgagcgagaaagccaccggctcatcttcccggctgtcaccctgtgcaacatcaacccactgcgccgctcgcgcctaacgcccaacgacctgcactgggctgggtctgcgctgctgggcctggatcccgcagagcacgccgccttcctgcgcgccctgggccggccccctgcaccgcccggcttcatgcccagtcccacctttgacatggcgcaactctatgcccgtgctgggcactccctggatgacatgctgctggactgtcgcttccgtggccaaccttgtgggcctgagaacttcaccacgatcttcacccggatgggaaagtgctacacatttaactctggcgctgatggggcagagctgctcaccactactaggggtggcatgggcaatgggctggacatcatgctggacgtgcagcaggaggaatatctacctgtgtggagggacaatgaggagaccccgtttgaggtggggatccgagtgcagatccacagccaggaggagccgcccatcatcgatcagctgggcttgggggtgtccccgggctaccagacctttgtttcttgccagcagcagcaggtacccttccgtgtgcctccacacctactacttcaagcccacaccacctcagaccctaaaccctcagctcctcagacctgtctaggggcctctccccagctggcctctcacgctctccgggaagcctccttaaccctgtccccccacagcaggcccagaggaggcccggcggcagcctcggacatccgcgtgttcgccagcaactgctcgatgcacgggctgggcacgtcttcgggccaggcagcctgagcctgcgccgggggatgtgggcagcggcggtggtcctgtcagtggccaccttcctctaccaggtggctgagagggtgcgctactacagggagttccag

SEQ ID NO: 389126 - DNA, 379 bp, Homo sapiens
ccaaagtgcagggagtacaggtgtgagccaccgtgcccggcctctcccagggttcttgaaaggagtgggagaacccacagctgcttcttgccagcagtgggcaccaggcggtggccagcccacatttgaggccattcttgtcctcagggagaacgtgctggccctggacatcttctttgaggccctcaactatgagaccgtggagcagaagaaggcctatgagatgtcagagctgcttggtgtgtgtgcagggcccccagggctgggggggtgtgggcaggcaggtggctgtaagttgaagggtgaccctgtctccacaggtgacattgggggccagatggggctgttcatcggggccagcctgctcaccatcctcgag

SEQ ID NO: 389127 - DNA, 2027 bp, Homo sapiens
cccctttcccccctactgctgaaacccaatcctctgcagcagcgccggctcagcaccgccggctcagcaccgctccgcagcccctgcctgccacggtcagctacgtcccacctggtctgctgcggagtccccagcccagtgcctagcccagtggagccaccgcctgttcctcgggaaggaacagtgggacctgaccggccaagatcacctcctccaatcctgccaggctagtgcctccctgccttccaaccttggctgtctcccacctctctcttctcctctccttgcctggcctcctgaatcctatcttagcctccttagccccctgactgactctctctcgcttcttccaagcctctgtagctggttccgctcctgggttctggccatgaagcccacctcaggcccagaggaggcccggcggccagcctcggacatccgcgtgttcgccagcaactgctcgatgcacgggctgggccacgtcttcgggccaggcagcctgagcctgcgccgggggatgtgggcagcggccgtggtcctgtcagtggccaccttcctctaccaggtggctgagagggtgcgctactacagggagttccaccaccagactgccctggatgagcgagaaagccaccggctcatcttcccggctgtcaccctgtgcaacatcaacccactgcgccgctcgcgcctaacgcccaacgacctgcactgggctgggtctgcgctgctgggcctggatcccgcagagcacgccgccttcctgcgcgccctgggccggccccctgcaccgcccggcttcatgcccagtcccacctttgacatggcgcaactctatgcccgtgctgggcactccctggatgacatgctgctggactgtcgcttccgtggccaaccttgtgggcctgagaacttcaccacgatcttcacccggatgggaaagtgctacacatttaactctggcgctgatggggcagagctgctcaccactactaggggtggcatgggcaatgggctggacatcatgctggacgtgcagcaggaggaatatctacctgtgtggagggacaatgaggagaccccgtttgaggtggggatccgagtgcagatccacagccaggaggagccgcccatcatcgatcagctgggcttgggggtgtccccgggctaccagacctttgtttcttgccagcagcagcagctgagcttcctgccaccgccctggggcgattgcagttcagcatctctgaaccccaactatgagccagagccctctgatcccctaggctcccccagccccagccccagccctccctatacccttatggggtgtcgcctggcctgcgaaacccgctacgtggctcggaagtgcggctgccgaatggtgtacatgccaggcgacgtgccagtgtgcagcccccagcagtacaagaactgtgcccacccggccatagatgccatgcttcgcaaggactcgtgcgcctgccccaacccgtgcgccagcacgcgctacgccaaggagctctccatggtgcggatcccgagccgcgccgccgcgcgcttcctggcccggaagctcaaccgcagcgaggcctacatcgcggagaacgtgctggccctggacatcttctttgaggccctcaactatgagaccgtggagcagaagaaggcctatgagatgtcagagctgcttggtgacattgggggccagatggggctgttcatcggggccagcctgctcaccatcctcgagatcctagactacctctgtgaggtgttccgagacaaggtcctgggatatttctggaaccgacagcactcccaaaggcactccagcaccaatctgacctcccacccctccctgtgccgtcaccaagactctctccgcctcccaccgcacctgctaccttgtcacacagctctagacctgctgtctgtgtcctcggagccccgccctgacatcctggacatgcctagcctgcacgtagcttttccgtcttcaccccaaataaagtcctaatgcatca

SEQ ID NO: 389128 - DNA, 1343 bp, Homo sapiens
gatggccatcaccctgtctgcccgccccagatcttcacccggatgggaaagtgctacacatttaactctggcgctgatggggcagagctgctcaccactactaggggtggcatgggcaatgggctggacatcatgctggacgtgcagcaggaggaatatctacctgtgtggagggacaatgaggagaccccgtttgaggtggggatccgagtgcagatccacagccaggaggagccgcccatcatcgatcagctgggcttgggggtgtccccgggctaccagacctttgtttcttgccagcagcagcaggtacccttccgtgtgcctccacacctactacttcaagcccacaccacctcagaccctaaaccctcagctcctcagacctgtctaggggcctctccccagctggcctctcacgctctccgggaagcctccttaaccctgtccccccacagctgagcttcctgccaccgccctggggcgattgcagttcagcatctctgaaccccaactatgagccagagccctctgatcccctaggctcccccagccccagccccagccctccctatacccttatggggtgtcgcctggcctgcgaaacccgctacgtggctcggaagtgcggctgccgaatggtgtacatgccaggcgacgtgccagtgtgcagcccccagcagtacaagaactgtgcccacccggccatagatgccatgcttcgcaaggactcgtgcgcctgccccaacccgtgcgccagcacgcgctacgccaaggagctctccatggtgcggatcccgagccgcgccgccgcgcgcttcctggcccggaagctcaaccgcagcgaggcctacatcgcggagaacgtgctggccctggacatcttctttgaggccctcaactatgagaccgtggagcagaagaaggcctatgagatgtcagagctgcttggtgacattgggggccagatggggctgttcatcggggccagcctgctcaccatcctcgagatcctagactacctctgtgaggtgttccgagacaaggtcctgggatatttctggaaccgacagcactcccaaaggcactccagcaccaatctgcttcaggaagggctgggcagccatcgaacccaagttccccacctcagcctgggccccagacctcccacccctccctgtgccgtcaccaagactctctccgcctcccaccgcacctgctaccttgtcacacagctctagacctgctgtctgtgtcctcggagccccgccctgacatcctggacatgcctagcctgcacgtagcttttccgtcttcaccccaaataaagtcctaatgcatca

SEQ ID NO: 389129 - DNA, 2014 bp, Homo sapiens
cccctttcccccctactgctgaaacccaatcctctgcagcagcgccggctcagcaccgccggctcagcaccgctccgcagcccctgcctgccacggtcagctacgtcccacctggtctgctgcggagtccccagcccagtgcctagcccagtggagccaccgcctgttcctcgggaaggaacagtgggacctgaccggccaagatcacctcctccaatcctgccaggctagtgcctccctgccttccaaccttggctgtctcccacctctctcttctcctctccttgcctggcctcctgaatcctatcttagcctccttagccccctgactgactctctctcgcttcttccaagcctctgtagctggttccgctcctgggttctggccatgaagcccacctcaggcccagaggaggcccggcggccagcctcggacatccgcgtgttcgccagcaactgctcgatgcacgggctgggccacgtcttcgggccaggcagcctgagcctgcgccgggggatgtgggcagcggccgtggtcctgtcagtggccaccttcctctaccaggtggctgagagggtgcgctactacagggagttccaccaccagactgccctggatgagcgagaaagccaccggctcatcttcccggctgtcaccctgtgcaacatcaacccactgcgccgctcgcgcctaacgcccaacgacctgcactgggctgggtctgcgctgctgggcctggatcccgcagagcacgccgccttcctgcgcgccctgggccggccccctgcaccgcccggcttcatgcccagtcccacctttgacatggcgcaactctatgcccgtgctgggcactccctggatgacatgctgctggactgtcgcttccgtggccaaccttgtgggcctgagaacttcaccacgatcttcacccggatgggaaagtgctacacatttaactctggcgctgatggggcagagctgctcaccactactaggggtggcatgggcaatgggctggacatcatgctggacgtgcagcaggaggaatatctacctgtgtggagggacaatgaggagaccccgtttgaggtggggatccgagtgcagatccacagccaggaggagccgcccatcatcgatcagctgggcttgggggtgtccccgggctaccagacctttgtttcttgccagcagcagcaggtacccttccgtgtgcctccacacctactacttcaagcccacaccacctcagaccctaaaccctcagctcctcagacctgtctaggggcctctccccagctggcctctcacgctctccgggaagcctccttaaccctgtccccccacagctgagcttcctgccaccgccctggggcgattgcagttcagcatctctgaaccccaactatgagccagagccctctgatcccctaggctcccccagccccagccccagccctccctatacccttatggggtgtcgcctggcctgcgaaacccgctacgtggctcggaagtgcggctgccgaatggtgtacatgccaggcgacgtgccagtgtgcagcccccagcagtacaagaactgtgcccacccggccatagggagaacgtgctggccctggacatcttctttgaggccctcaactatgagaccgtggagcagaagaaggcctatgagatgtcagagctgcttggtgacattgggggccagatggggctgttcatcggggccagcctgctcaccatcctcgagatcctagactacctctgtgaggtgttccgagacaaggtcctgggatatttctggaaccgacagcactcccaaaggcactccagcaccaatctgcttcaggaagggctgggcagccatcgaacccaagttccccacctcagcctgggccccagctctagacctgctgtctgtgtcctcggagccccgccctgacatcctggacatgcctagcctgcacgtagcttttccgtcttcaccccaaataaagtcctaatgcatca

SEQ ID NO: 389130 - DNA, 369 bp, Homo sapiens
cacagaccacaggagctgggagagtaagatgggactgggtccagggagtgctgatcaagtcatgtactggagtactcttctggggcacagaatgtaacaccatggcagagatctcacgagacaatgcccatatgtcagtaggctggctctggaaagcctagggaaaatgatggtccacactgtataaagtagaaacactagcctgtgttgtgactcacgcctgtaatcccagcactttgggaggcagaggtggatggatcacctgaggtcaggagttaaagaccagcctggccaacatggtgaaaccccgtctctactaaaagcacaaaaattagccaggcatagtggtgcatgcctgtaatcccagca

SEQ ID NO: 389131 - DNA, 235 bp, Homo sapiens
gacttgggttttgctttgctagtggagaatatggctgggatctgggttagggcagaaagctcaggtagatgacaggtgccagagcagtggttcaaacttgggagaatcacagcaggagcctattaacaatgcagattccagggccccttgatagacctgggaaggggggtgcaatcagcattgttaataagtttgtgtgattgtgaggcaggtggccccaggattgtgctctggt

SEQ ID NO: 389132 - DNA, 142 bp, Homo sapiens
ccaccttgacctctcaaagtgctgggattacaggcatgagtcaccacacctggtttctcacagtctcttattgcagataaaagaatcacatgaaatggttaaataactggatgggcaatatatatataatatatagcagagc

SEQ ID NO: 389133 - DNA, 320 bp, Homo sapiens
cccgaataggtcctgtggcgtctgtaacagtaatgtccaccagtcaggcaccttacactgctcttcccggcctcctcacgcggactctctgagactaattctgttattatccacacttcacagatgagaaaactcagccaggtttctgtgggcactgtactgggctggatagtgtccccagcaaaactcatgtctgctcagaacctgtgactgtaacctcatttggaaacggtccttacagacgtaaccaagtgaaaataatggcacctgctggaatagggtaggccctaagtccaacaagactggtgtccttctaaaag

SEQ ID NO: 389134 - DNA, 89 bp, Homo sapiens
tttaaaaaaagtaaatatatttcatttaaaaatttaatctcaattcaaattttttcagatatattctcagtaaaaatatactttggatc

SEQ ID NO: 389135 - DNA, 446 bp, Homo sapiens
cggcttgcagggcagcctgcttctaaattgtgggtaggggcagacttttatcttacctctgaagctgggagtttcagggggtaggttgagagctgacacgtatacacattaactcttctgcccagatcttcctactgctaaattaatctagcctaagaactcctttgcagcattgagaaaagcacagctcaaaaatcaaagtacaaacccagagaaaaactttccaggtagcaacctcaaagattgagctttacttttattttttatgtattttgtaatgccccagaacagttggtcttgttaaaatcaagttgtataatagtcaccaacccttctgtatctcctgaccccacaggacaggcttggaaagggcaggagaaatgagggtggtatgtgatacacccagaaggctgagggggcccggtcaggagccaaatttacttctc

SEQ ID NO: 389136 - DNA, 329 bp, Homo sapiens
acctagtaaggctagattacaaggcagaggatcttacccttgcacattggaatcacctgggtcccatccagagggtctggttacatgtagggtgtggcctgggcattgggaagtttaaagcttcccagctgattgtaatgtgcagtcaaagtcaattgagagcatctggtgcaagagctgcctcctctgggtccactttgtagctgggcatttcttttagtaatttcagttgttcattatcagactgatgtgcgcactctgcttttaatgggctggccatttatttgttgaggatctgccatatgccagtgtggtgtgaggcactttaa

SEQ ID NO: 389137 - DNA, 274 bp, Homo sapiens
aaggaaggaaaaggagaaaaggaaaagacaagacaagaaaaggaaggaaggaagaaaagtaaaagaaagaagaaagaaagaaggaaaaggaaaaaggagcaatttatgagcaaactagaaattgggtggcaaataaaaatgagagcatcttataagtgaaccagcaataagaggtcctttacacatcacaagtaaggagtgagccagagaaccagtggggtcatgaaataaaaaggatgaaaaggggctaggcgtggtggctcatgcctgtaat

SEQ ID NO: 389138 - DNA, 434 bp, Homo sapiens
tatgtgccaggcactgtgcaaggtactttggattcataacccatttattccccacaatataaggtgagtgctatatccccattttactgataagaacacggaggttcaaaggaattaagctcagaaagcagaattttaacccaactttatttgattccaaagcagaaattgaaattttaacccgtctatttgtttccaaaactcttaagcattatattatactatctcctcacatttaaaataattgctattaaacagtgagcgctgtgaaggaggcatataatctgaatgccaggaaaggagtcattaagttcttttgggagaggggaaaaccagggaaagcttccaggaagaggtgacacttgaactgagctttgaaagatgattaagaatttatcagaacatagcatataacctgacagagcagatagatg

SEQ ID NO: 389139 - DNA, 574 bp, Homo sapiens
gtgcgtggtttgagcaacgctgcattggtgtgggaggcctggggagctgcatctgctgctactgagctcattgcctaatgcagacacctgagcaggggaagcatcacggggtgaggcctggaggctcagcatttcctggcagcatcctcacaccaaagcctgctatctcctgaagggcagggatacattgaaagaaaccacaccttcctctctgtctgtgtaggtgattgtttagtggggctcaagtacctgctaaagagacgttgttattcatccagaatatttcatgaactgatgctggcattccagctaaaatatcgcatgtcaacatgtctgcaataatctatttttgaacatttgactaagatgaaaaattctagtgccttatattcaggttttttttggctttgcatgttgatataaaatactgtttgtgttaaaaacaaagtgcaagttagtggttagaatggaatctatagaaacgaaatttaatcatcaaaataatggtcaacttgctgttctgaaatcctttttcctaaaatttcccaataaaaattagaaataggaataatca

SEQ ID NO: 389140 - DNA, 126 bp, Homo sapiens
tgctattattgtgtagggtcactaggggaagtcagacaatgagcacataaactagtttcagatagcacatggatggaccaagagtggtgagagttggaatatctgtgaagcttttagggtaaagtc

SEQ ID NO: 389141 - DNA, 724 bp, Homo sapiens
agtgaaactccttctcacaaaaacaaaaaaacaaaaaaaccagataactcacctgttcttcaaatacatatcaggctagagaagtgtccaaaatgggtcatcaaagccaggagctagcagtgagtttttggaagttgatatagagaatggaaactgggattgggagatggaaatgagaagttggtctgattaagcaatggtctgcaccaatttcaatgcttagataatagtatcatatactagcagcgtgttggtgtcagcgtgttaaactaataaaaagccagaatgtaacagcctgcatagccctaatgcatttcaccagagagccatgtggaagccaaaatcctcacatgcagatctggcatgaggaagcttcctaagcgtctctcaggtagcttggtacaagttctgcccaacagaggtgcttcatacaccaggcagcaagcctacccaaatgagatcccctggttgggaaggtggacgtacttcatgaacaaagcaaaggtagatggttgtgtgcaggtcatctcacatgaggtgtctccctggttctttgtgaaaccctctctggacctcttctggttttgaaatagctcattcatggattcattctattaataaaagtcaaaagtaaacacttacataatgcttactaggtgtcagccatggtgctaagcacttcattcatattaactcattgtctccatgccacaatcctattacc

SEQ ID NO: 389142 - DNA, 663 bp, Homo sapiens
cttaagtgaaaattcaagccacctcaggacttagtatgtgaagcgagggaagtgactctgtatgtgcatgtgtttgggagcgtgtgtgcatgtgtatacgtgtgtctgtgtgcatgttgtgtgtgcatgtttcaggcactccggaggttccagaccattaaggaatctgggtctctaactcaatcagtctgatcttgggatttcgatggctccctgatctcctcgggagattttccccagagcaaaattcccaggacctgctcctgctccctgccctcgccaggcccttccctctccctccctgagggctggagtgaggggatgaagctgcagtgcccccgccccttttcccgcagctggctggggccaaactgggtttgtccaagaatctggccacagagcataaacccagaaactcgtggctagtgtggagttcttgctgtccatgtctctttcccgaatccctttgagccacagagggggaaggtttttaaaacagttactcctgagtgcaggaaccaccttctcttgccaggctgtactcctcatttagtttaaactaaatcaagaataacttcctggggaacacgatgccagccagtgatcctgctcaacttggtccccagccccagcccccgctggccccagcacccgctgagcccc

SEQ ID NO: 389143 - DNA, 726 bp, Homo sapiens
gatcaaaactccgtctcaaaaaataaataaataaataaataaaataaaaaggttaaagtgggtatcactatgataaagaaataaaataaaacccacgtctggctctaaggtaataagactggtgttttgttttgtttcacaaactaattctgaggacatgtcaggaaaaggaagtgtttcagtcagtgtgtaaactctgtacacagccttccttggtgccgaattcagaggacagtgctcactgggatgcagaaaaagcctgcaagtctgtaggaatactttacaggcaaaaacattttacccaagggcatttaaaaaaaatctttaatcaagttctctagatgttagtgataaaacagaaatgggtcttccttactgagacctgaatacaaaacttattctaatacaatttcttttattggcatacctttcagattttgctaaacaatataaattttcataattactctgggtaagcattatctctaacaaatgaaaaagattactgacactaagttaaatgacttttcccaaatccttttggctagaatatggcaaaccaaggactaaaccacctcaggtcttccctttatccattgttctatgttcccacaaagctttagaacagtggttaatcacttacagtggtaagttaactagggtgcttataaaatactgaatcacaaaattgcttgatcttgaaaatgtgaacttcattagagggtg

SEQ ID NO: 389144 - DNA, 371 bp, Homo sapiens
ggttttgtggtttgttttctcaaacccaggcagtttgccaaacctcagcaaacagcgcaaacctatcttgttaccctgtagtcacttctcatccttgtcagtatgtgtggagcatttcacgcaattgtgatcattaaactcatactggtttctgttctgcgtttttcagttaacatcaaatattcttcctctgtttttttcttgttagtcatttttcttgtgttggatatttgggttcccacgtttttcactataaattatgctgctttgtattgctttatcatgtctcttatgattggctgaaattttactgtgttatagaggagagagaatgtgtagatacaggaaggcttgaataatatagagccatc

SEQ ID NO: 389145 - DNA, 719 bp, Homo sapiens
ccaagcaaaggtctggctgctgctggagaaaggataaattctctgttgtttcaaggctcctacacaaatacaaagcgcgatgctgttgctactggaagagaagtgaaaaaaaactgcttatgttcaagaccacctggacaagacttcttaactatgaaaggcagttttgttgctgtgtaggaaaagacaaaaatactgagaataggctctctccacattctctgagactcagagttaaagagactaatagaagtctcaatccccgagacaacctgatagaagcagaagcataccaattcccaggagttaatgctgtttactttagtctccgttgttcttttgcatacaatacctaaatctaattttaaaaatcacaagagacatgaataagcatgaaaaaaagaactcatcatcaagggagaaagcagtcaacagaaccagactcagaaatgaaacatattttgaaactatttgactaggacttttaaataattataatgaatatgttcattaatctatggaaaataagaacggtgtggaacagatgaagaattttagcagtaagatagaaactataaaggaaatcctgtgaaatgacagattaagaaaacatgatatgaaagttgaaaaattttttcacatgcttatttgcagactaaaggcattacagaaagttaactgtgaattagaatatattttgattaaagttttcccaaata

SEQ ID NO: 389146 - DNA, 384 bp, Homo sapiens
ctgaatgtaactgatttgatttattcctttcacttaaactgtgtaatgcctcagtttcatgtgtctacagaggacgctcacccttggcaccacctggaaagtgtaacagcagggcattgaggttctggccaaggagccatcagcaatcccattaccaatgcttaaagtgagtctcataaggcagatttggctccaagcaaaaaccacagctctattttcataaactaatttcacttgtttgccccagttaatattaataagcccagggctatatgcttctacttaccagagcacaaagataatagaataatagagtgttagatctgaaatggaccttggagatcttctagaccaacttctccatttgatagatgaggaaacagg

SEQ ID NO: 389147 - DNA, 107 bp, Homo sapiens
gcctcaattcactgaaaatgtatttcattttctaaactattgttgccatatcttgctagaactaaacataacatcctgcttacattctaaatgagaaacaataacag

SEQ ID NO: 389148 - DNA, 1407 bp, Homo sapiens
cttatgttccctttctttatatagtttcctaaaattctgttcaagtattttctagttaattatgtaacagaatgttagcatctctccatatcttgaaacttgaattttgagaatgcattgaattatgctttcagtgttaaagtaaaaggtttcaattatccttctagtgaagtctgttgtggaataccatttcccatggaactgaggccatttccacaactttgcacagaactgcagtcttgttcttcccttggatcatgacaaataagtctcacacagtgccgtaatacttgtgggattcttttgtaatctttgtaatcttaataagggcattatgagaagacgactccatgtttttttaatacttcaaacacattgggatgtaacaatgaatgtcaactgtaggaatggtggtttcgttttaaggaataagcatgttggggaaagatgatgaaaatgtactactgaaagttatacacttccataggcaaatgggattatgtgttgaagcatagtcctcatgcttaataaactgactgaaatcgtagaaattacacctaggaactgagctaggccaaattgccatttttgtttagagagttttggaggtagtagtgaggggacagagccttaaaactacttccaaacagtattttggaattgaagacttggtaactagtgaagaacatcaaagttgggtatttcaatgtgccaagtttgggtgaactaggttcggtttgcctctttcataacaatgtaaacacaatggtgtagttaattaaattctgggtggataggagcaggactgattactatgtcttgcccttcgccctttgtttttttcagaaccaaataacagaaatgtgtatgtgtgtactgtatctgcctttccaccacatttttatgacactgtattccactgcctgcttttttaccttctttccctaggatttgtcctacagcttagtattgtggttgacagcgatactagggctgacagcacagaagtcacaagagaagagtggaagggcaagaattcaaagcatttgttcatacaatgtggcaacctcttttgcatagttgcgtaggatcctgtttgtaatgctatcataaatattctgtagttttttttttttctctcccaactggagctatgacactttttattggattcagtcttgtctcttgtctagaaagaactttatcttgttgacgcatgagctgtttaaaaattatcctattaaatgttggttaatagttgtgcagtttttcatttcagatggaaaggcaatgcaaattttgcctttgttttctgtcaccttccaacccctgagcacttctagtcagatacagattcatcagtgtatgcaacatcctttgtaatttaaaataaaaaaagatgaaaag

SEQ ID NO: 389149 - DNA, 488 bp, Homo sapiens
  misc_feature (26)..(26): n is a, c, g, or t
aaggtgtaatcagcctcattggaccnctggatttgtcctacagcttagtattgtggttgacagcgatactagggctgacagcacagaagtcacaagagaagagtggaagggcaagaattcaaagcatttgttcatacaatgtggcaacctcttttgcatagttgcgtaggatcctgtttgtaatgctatcataaatattctgtagttttttttttttctctcccaactggagctatgacactttttattggattcagtcttgtctcttgtctagaaagaactttatcttgttgacgcatgagctgtttaaaaattatcctattaaatgttggttaatagttgtgcagtttttcatttcagatggaaaggcaatgcaaattttgcctttgttttctgtcaccttccaacccctgagcacttctagtcagatacagattcatcagtgtatgcaacatcctttgtaatttaaaataaaaaaagatgaaaag

SEQ ID NO: 389150 - DNA, 1101 bp, Homo sapiens
tctgctttgttcgttcgtttggtgtgtgtctcgtgtctgtgcgtgggtgctgtctgtgtctgtcgcttcgttggctctacgtttaggtcgttgatgtcggtctgcggtgtctgggcttcgcttgacgtgctcttctttgtgtctttagttgcgtcgttcctcttagtcgctgtgcctctctggttgtctgctcgttcgtgatcttcctctccccgttatttttatatcaagtggggacgccgcgtgaagtattggtactgaattacgtcgcgtagcgacatcgttctgtctgttcccagcataatgtcttgtgtgggttgttgccacccctaccactcgcctcatcgttttgtttgttgtcttccttggtccggttcttcatcttctctttgggttgggtctgtccccttatgtgttccccccgctgccaacaggttggtgtgtgcttctctcgcaatatagttccctgcagctcgtgtttttgtttccttccacacctgcctgggtgtgttttaagcatgcgcgcgccccctccgtggtttgttgattagttgtcctcccttctttagtgtgttggtcgcgcctcgttcttcatataaaagtggggtgtggcgtgttgatttgtgtggcttccgctctccgtgagttgttttatatttgtgctgccgcgcccccccgtcttttttttgtttttttttttttttttttttttttttttttttttttttttttttttttttttttttttttttttttttttttgtttgtttttttttttttttttttttttttggtttttttttttttttttttttggtttttttttttttctctcccaactggagctatgacactttttattggattcagtcttgtctcttgtctagaaagaactttatcttgttgacgcatgagctgtttaaaaattatcctattaaatgttggttaatagttgtgcagtttttcatttcagatggaaaggcaatgcaaattttgcctttgttttctgtcaccttccaacccctgagcacttctagtcagatacagattcatcagtgtatgcaacatcctttgtaatttaaaataaaaaaagatgaaaag

SEQ ID NO: 389151 - DNA, 1353 bp, Homo sapiens
cttatgttccctttctttatatagtttcctaaaattctgttcaagtattttctagttaattatgtaacagaatgttagcatctctccatatcttgaaacttgaattttgagaatgcattgaattatgctttcagtgttaaagtaaaaggtttcaattatccttctagtgaagtctgttgtggaataccatttcccatggaactgaggccatttccacaactttgcacagaactgcagtcttgttcttcccttggatcatgacaaataagtctcacacagtgccgtaatacttgtgggattcttttgtaatctttgtaatcttaataagggcattatgagaagacgactccatgtttttttaatacttcaaacacattgggatgtaacaatgaatgtcaactgtaggaatggtggtttcgttttaaggaataagcatgttggggaaagatgatgaaaatgtactactgaaagttatacacttccataggcaaatgggattatgtgttgaagcatagtcctcatgcttaataaactgactgaaatcgtagaaattacacctaggaactgagctaggccaaattgccatttttgtttagagagttttggaggtagtagtgaggggacagagccttaatcaaagttgggtatttcaatgtgccaagtttgggtgaactaggttcggtttgcctctttcataacaatgtaaacacaatggtgtagttaattaaattctgggtggataggagcaggactgattactatgtcttgcccttcgccctttgtttttttcagaaccaaataacagaaatgtgtatgtgtgtactgtatctgcctttccaccacatttttatgacactgtattccactgcctgcttttttaccttctttccctaggatttgtcctacagcttagtattgtggttgacagcgatactagggctgacagcacagaagtcacaagagaagagtggaagggcaagaattcaaagcatttgttcatacaatgtggcaacctcttttgcatagttgcgtaggatcctgtttgtaatgctatcataaatattctgtagttttttttttttctctcccaactggagctatgacactttttattggattcagtcttgtctcttgtctagaaagaactttatcttgttgacgcatgagctgtttaaaaattatcctattaaatgttggttaatagttgtgcagtttttcatttcagatggaaaggcaatgcaaattttgcctttgttttctgtcaccttccaacccctgagcacttctagtcagatacagattcatcagtgtatgcaacatcctttgtaatttaaaataaaaaaagatgaaaag

SEQ ID NO: 389152 - DNA, 405 bp, Homo sapiens
aatgcctgtgggaggtgcagcccacgctgggccacctggccagctcagggatcctgctggagatcgaggattgtctggtcggcctcttacaactctcagaacatcatccctgggagcagccctgaagagaccaagggtcagtggcggggctgctgagtggctgcctccctgacctggccagcatttcctgggcacactgcagtgtgtccacgtccctgggtgtgtaggtggctgcagagccttgtcagagcatctgggccttcagggatctgcttcctgcccactaccctcctcttgcctgcctgcaaatctcagctccatccctcatgggctgtgtgacctagagtgaataatgtgacctctctgtgccttggtttcttgatttgtacagcctgattaatcata

SEQ ID NO: 389153 - DNA, 843 bp, Homo sapiens
ggccggggtcgcggccgtggatggggccggggccaagaccgcggagttcgcggaggcaaggcccaggataaggagcggatgcccgtcaccaagctggacggcctggccaaggacatgaagatcaagtccctagaggagatttatctcttctcgctgcccatcaaggaatctgagatcattgactttttcctgggggcctctctcaaggacgaggttttgaagattatgcctgtgcggaaggagacccgcgccggccagcgcaccaggttcaaggcgtttgttgccatcagggactacaatggctacgctggtcgggttgaagtgctccaaggaggtggccgccgccatccgcggggccatcatcctgaccaagctctccattgtcaccgtgcgcagaggctactgggggaacaagatcggcaagctccacaccgtcccttgcaaggtgacaggccgctgcggctctgtgctggtgcccttcatccccgcgcccaggggcactggcatcgtctcagctcctgtgcccaagaagctgctcatgatagctggtatctacgactgctacacctcagccaggggctgcactgccaccctgggcaacttcgccaacgccaccttggatgctgtctctaacatctacagctacctgatcccctgaaggacttctggaaggagactgtattcaccaagtctccctatcaggaattcactgaccacctcgccaagacccacaccagagtctccgtgcagaggacccaggctccagctgtgactacaacatagggtttttatgcaagaaaaataaagtgaattaaagcctattactgtcaaaaaaaaaaaaaa

SEQ ID NO: 389154 - DNA, 492 bp, Homo sapiens
aaccagctgctttactatggggctaaatctggattgtgtatgtttctttttcatcccaatttctactctttttccagtaactggaagattccctgggggtggggagaattcgatttttatctctagccctctttgggccattattctcatttatgaaccaagcccttttgtgaaaggagttggcagtaggagaattgaagtacatctgatcttagtgttgattctatgataaattttttctccctacgatattcctgagattgagattctgatgtttctattttacagataaaactctgcaaagacaatgtctagcacttatatctccagtaactcctgtcaaggtttattgttgcttgttcatcattgcagtcctgactacaagtgtgattgcactttctattgttttgtcaggtaagttacttgttctccaaactgtacaatattctccatatgtttttgttgtcaataaatatttattaagctccatta

SEQ ID NO: 389155 - DNA, 1879 bp, Homo sapiens
agcttaactggtacatctggactctgatgagtgagaagtccaagcaaatagaaaagccacagccaaacgataaaactctgcaaagacaatgtctagcacttatatctccagtaactcctgtcaaggtttattgttgcttgttcatcattgcagtcctgactacaagtgtgattgcactttctattgttttgtcagaatttcctgaaaagatacaaaggcccttctgaccattggattggccttagaagagaatcatcccatcgcatttggaaatggacagacaacatggaatataataacatttttcacacatttacaaaacaatttgggaggaggctggaaatcatcttgactgaagaccaccaatggcagcagttcatttgggcttgctatcagaggaagtggagaatgtgccttcctgaatgacaatggagtcaacagtggcagaatctacatgaacagaaaatggatttgtagcaagccaaacaattatgtctacagttgccagttatgtccccactgggatactacctagtagagctgtgagaagagggccaccatcctccagactccagaatggtggaatcatcagcagcttccaccatgcccctggaaaaactgcaagtaacagacctgcacatgtatcccctacatctaaaataaaagttggaaaaaatggaactttgatgttaagatgcactgatacaaaacttaaattttggtctcctacattaaaacaatatgagtctcttaaaatattgatttgttcttagtaagattacaagaggctttgatttttaattctgcaatgtttccttaacagccattctgaattacaaactaattcctatttctgccacattccttcctgagaactgtctagtcctggtttgggatttatcttaaaggtctagaaaggcaacattttacttcagcaaaacttgattctatattgttgttttttcttaatgtgtcaaaattgttttgttactaggatttcctatgttgttattaaatgtattcccctgatcaaggtcactggcctagaaaacaaagattctgtgttttaccaagataattcccagtgcttcatggtgtctttattaggctttgactgcttagggaaactgagccttaaaagggtaaaagtttttccatccatgtaactttctgaggtctttaggttgtcactctgattaaatgagtagtattcttagcagtgacttattatctgttgaaggaagtattttaagctttttgacatctttggcaggtttctctagaatccaaatcctaaattaagccttttggcctaaaattgactgggatttttccaggtggaccccctagatatgctcctccaaaggcttgtctttcttgtagagttattaaatgattaggcttatttggcaaatactgctagaagcattgtcaaataagaaatggtgttttacctttctttaagctgtgtttgtgtaagttcatcatttatagaaatgtgaaattttatgagattcctaagatactgacatgctgagatacctgtaataattgcaatttttatgttggatgattgtatgccacagaagcacttaaatttcctggttaattggtaacgttaatcagatctttacctatggctgttctgggtttttgtcattcacagttattattttaatttcttctttggaagcgttcgcaatcagctatagtccaaaattgctaattaagatcaagcaaaacaaaattaattacgtaaaattaatttataaggatgtttttatgacgtaaatgttttattttccagagccaaggaaattttctgtcacaagctatctaccgtttgcaataatttgataaataatcctttgtgaacaaa

SEQ ID NO: 389156 - DNA, 2467 bp, Homo sapiens
ggtgggcgcgagagagcctagaagcccatgtagccgcgaatcccgcagccccagtacacctccctccgtgcctccccgccttttctgcagagctccgccctggagtgaaggaggagccgtcacctggagctccgaaaaaagcagaagaaggcgctttttatttagccagtgtgaccccgccagggccttctcggttgggtgagcactctctctgaccaggccatgaaaagatcagagtttgcagaactttgggggacctgagaggggagtgccccctggacgggccacggctgtctgtggcttaagggcttttggaagggcggagagagggaaacggcgtcctagtggcctgcttcagggccacccacgggccctcccccaacctctctctgatccaacttgtttttccagcctagttggaaacttgtggatgctgtgacctcaagaagacttggcattttatttggaagatagacatctatttgcaactgtcctgagcccctattttcctcccacctttcttggggaaacttgtttttaagggatgccactgtttttgtaacatgttgctcctagctcttagcattcatggtactgttgtaaccgtccagtgggttcactttgtctgctagatagagccgatttatcaagacggggattacaatggagaaagagtaattcacgcagagccggctttgcagataaaactctgcaaagacaatgtctagcacttatatctccagtaactcctgtcaaggtttattgttgcttgttcatcattgcagtcctgactacaagtgtgattgcactttctattgttttgtcagaagccagccttgctcagtttgcaactatggaggaactgaatttcctgaaaagatacaaaggcccttctgaccattggattggccttagaagagaatcatcccatcgcatttggaaatggacagacaacatggaatataataacatgcttgctatcagaggaagtggagaatgtgccttcctgaatgacaatggagtcaacagtggcagaatctacatgaacagaaaatggatttgtagcaagccaaacaattatgtctacagttgccagttatgtccccactgggatactacctagtagagctgtgagaagagggccaccatcctccagactccagaatggtggaatcatcagcagcttccaccatgcccctggaaaaactgcaagtaacagacctgcacatgtatcccctacatctaaaataaaagttggaaaaaatggaactttgatgttaagatgcactgatacaaaacttaaattttggtctcctacattaaaacaatatgagtctcttaaaatattgatttgttcttagtaagattacaagaggctttgatttttaattctgcaatgtttccttaacagccattctgaattacaaactaattcctatttctgccacattccttcctgagaactgtctagtcctggtttgggatttatcttaaaggtctagaaaggcaacattttacttcagcaaaacttgattctatattgttgttttttcttaatgtgtcaaaattgttttgttactaggatttcctatgttgttattaaatgtattcccctgatcaaggtcactggcctagaaaacaaagattctgtgttttaccaagataattcccagtgcttcatggtgtctttattaggctttgactgcttagggaaactgagccttaaaagggtaaaagtttttccatccatgtaactttctgaggtctttaggttgtcactctgattaaatgagtagtattcttagcagtgacttattatctgttgaaggaagtattttaagctttttgacatctttggcaggtttctctagaatccaaatcctaaattaagccttttggcctaaaattgactgggatttttccaggtggaccccctagatatgctcctccaaaggcttgtctttcttgtagagttattaaatgattaggcttatttggcaaatactgctagaagcattgtcaaataagaaatggtgttttacctttctttaagctgtgtttgtgtaagttcatcatttatagaaatgtgaaattttatgagattcctaagatactgacatgctgagatacctgtaataattgcaatttttatgttggatgattgtatgccacagaagcacttaaatttcctggttaattggtaacgttaatcagatctttacctatggctgttctgggtttttgtcattcacagttattattttaatttcttctttggaagcgttcgcaatcagctatagtccaaaattgctaattaagatcaagcaaaacaaaattaattacgtaaaattaatttataaggatgtttttatgacgtaaatgttttattttccagagccaaggaaattttctgtcacaagctatctaccgtttgcaataatttgataaataatcctttgtgaacaaa

SEQ ID NO: 389157 - DNA, 2511 bp, Homo sapiens
ggtgggcgcgagagagcctagaagcccatgtagccgcgaatcccgcagccccagtacacctccctccgtgcctccccgccttttctgcagagctccgccctggagtgaaggaggagccgtcacctggagctccgaaaaaagcagaagaaggcgctttttatttagccagtgtgaccccgccagggccttctcggttgggtgagcactctctctgaccaggccatgaaaagatcagagtttgcagaactttgggggacctgagaggggagtgccccctggacgggccacggctgtctgtggcttaagggcttttggaagggcggagagagggaaacggcgtcctagtggcctgcttcagggccacccacgggccctcccccaacctctctctgatccaacttgtttttccagcctagttggaaacttgtggatgctgtgacctcaagaagacttggcattttatttggaagatagacatctatttgcaactgtcctgagcccctattttcctcccacctttcttggggaaacttgtttttaagggatgccactgtttttgtaacatgttgctcctagctcttagcattcatggtactgttgtaaccgtccagtgggttcactttgtctgctagatagagccgatttatcaagacggggattacaatggagaaagagtaattcacgcagagccggctttgcagataaaactctgcaaagacaatgtctagcacttatatctccagtaactcctgtcaaggtttattgttgcttgttcatcattgcagtcctgactacaagtgtgattgcactttctattgttttgtcagaatttcctgaaaagatacaaaggcccttctgaccattggattggccttagaagagaatcatcccatcgcatttggaaatggacagacaacatggaatataataacatttttcacacatttacaaaacaatttgggaggaggctggaaatcatcttgactgaagaccaccaatggcagcagttcatttgggcttgctatcagaggaagtggagaatgtgccttcctgaatgacaatggagtcaacagtggcagaatctacatgaacagaaaatggatttgtagcaagccaaacaattatgtctacagttgccagttatgtccccactgggatactacctagtagagctgtgagaagagggccaccatcctccagactccagaatggtggaatcatcagcagcttccaccatgcccctggaaaaactgcaagtaacagacctgcacatgtatcccctacatctaaaataaaagttggaaaaaatggaactttgatgttaagatgcactgatacaaaacttaaattttggtctcctacattaaaacaatatgagtctcttaaaatattgatttgttcttagtaagattacaagaggctttgatttttaattctgcaatgtttccttaacagccattctgaattacaaactaattcctatttctgccacattccttcctgagaactgtctagtcctggtttgggatttatcttaaaggtctagaaaggcaacattttacttcagcaaaacttgattctatattgttgttttttcttaatgtgtcaaaattgttttgttactaggatttcctatgttgttattaaatgtattcccctgatcaaggtcactggcctagaaaacaaagattctgtgttttaccaagataattcccagtgcttcatggtgtctttattaggctttgactgcttagggaaactgagccttaaaagggtaaaagtttttccatccatgtaactttctgaggtctttaggttgtcactctgattaaatgagtagtattcttagcagtgacttattatctgttgaaggaagtattttaagctttttgacatctttggcaggtttctctagaatccaaatcctaaattaagccttttggcctaaaattgactgggatttttccaggtggaccccctagatatgctcctccaaaggcttgtctttcttgtagagttattaaatgattaggcttatttggcaaatactgctagaagcattgtcaaataagaaatggtgttttacctttctttaagctgtgtttgtgtaagttcatcatttatagaaatgtgaaattttatgagattcctaagatactgacatgctgagatacctgtaataattgcaatttttatgttggatgattgtatgccacagaagcacttaaatttcctggttaattggtaacgttaatcagatctttacctatggctgttctgggtttttgtcattcacagttattattttaatttcttctttggaagcgttcgcaatcagctatagtccaaaattgctaattaagatcaagcaaaacaaaattaattacgtaaaattaatttataaggatgtttttatgacgtaaatgttttattttccagagccaaggaaattttctgtcacaagctatctaccgtttgcaataatttgataaataatcctttgtgaacaaa

SEQ ID NO: 389158 - DNA, 1915 bp, Homo sapiens
gtatcattgggggctgttataccaggacacatggaggtgaagaactaaagcaaaatcgtgtctacttcacagttttgcctaaggctgggcttaattcttaaaaagataaaactctgcaaagacaatgtctagcacttatatctccagtaactcctgtcaaggtttattgttgcttgttcatcattgcagtcctgactacaagtgtgattgcactttctattgttttgtcagaatttcctgaaaagatacaaaggcccttctgaccattggattggccttagaagagaatcatcccatcgcatttggaaatggacagacaacatggaatataataacatttttcacacatttacaaaacaatttgggaggaggctggaaatcatcttgactgaagaccaccaatggcagcagttcatttgggcttgctatcagaggaagtggagaatgtgccttcctgaatgacaatggagtcaacagtggcagaatctacatgaacagaaaatggatttgtagcaagccaaacaattatgtctacagttgccagttatgtccccactgggatactacctagtagagctgtgagaagagggccaccatcctccagactccagaatggtggaatcatcagcagcttccaccatgcccctggaaaaactgcaagtaacagacctgcacatgtatcccctacatctaaaataaaagttggaaaaaatggaactttgatgttaagatgcactgatacaaaacttaaattttggtctcctacattaaaacaatatgagtctcttaaaatattgatttgttcttagtaagattacaagaggctttgatttttaattctgcaatgtttccttaacagccattctgaattacaaactaattcctatttctgccacattccttcctgagaactgtctagtcctggtttgggatttatcttaaaggtctagaaaggcaacattttacttcagcaaaacttgattctatattgttgttttttcttaatgtgtcaaaattgttttgttactaggatttcctatgttgttattaaatgtattcccctgatcaaggtcactggcctagaaaacaaagattctgtgttttaccaagataattcccagtgcttcatggtgtctttattaggctttgactgcttagggaaactgagccttaaaagggtaaaagtttttccatccatgtaactttctgaggtctttaggttgtcactctgattaaatgagtagtattcttagcagtgacttattatctgttgaaggaagtattttaagctttttgacatctttggcaggtttctctagaatccaaatcctaaattaagccttttggcctaaaattgactgggatttttccaggtggaccccctagatatgctcctccaaaggcttgtctttcttgtagagttattaaatgattaggcttatttggcaaatactgctagaagcattgtcaaataagaaatggtgttttacctttctttaagctgtgtttgtgtaagttcatcatttatagaaatgtgaaattttatgagattcctaagatactgacatgctgagatacctgtaataattgcaatttttatgttggatgattgtatgccacagaagcacttaaatttcctggttaattggtaacgttaatcagatctttacctatggctgttctgggtttttgtcattcacagttattattttaatttcttctttggaagcgttcgcaatcagctatagtccaaaattgctaattaagatcaagcaaaacaaaattaattacgtaaaattaatttataaggatgtttttatgacgtaaatgttttattttccagagccaaggaaattttctgtcacaagctatctaccgtttgcaataatttgataaataatcctttgtgaacaaa

SEQ ID NO: 389159 - DNA, 1357 bp, Homo sapiens
ggtgggcgcgagagagcctagaagcccatgtagccgcgaatcccgcagccccagtacacctccctccgtgcctccccgccttttctgcagagctccgccctggagtgaaggaggagccgtcacctggagctccgaaaaaagcagaagaaggcgctttttatttagccagtgtgaccccgccagggccttctcggttgggtgagcactctctctgaccaggccatgaaaagatcagagtttgcagaactttgggggacctgagaggggagtgccccctggacgggccacggctgtctgtggcttaagggcttttggaagggcggagagagggaaacggcgtcctagtggcctgcttcagggccacccacgggccctcccccaacctctctctgatccaacttgtttttccagcctagttggaaacttgtggatgctgtgacctcaagaagacttggcattttatttggaagatagacatctatttgcaactgtcctgagcccctattttcctcccacctttcttggggaaacttgtttttaagggatgccactgtttttgtaacatgttgctcctagctcttagcattcatggtactgttgtaaccgtccagtgggttcactttgtctgctagatagagccgatttatcaagacggggattacaatggagaaagagtaattcacgcagagccggctttgcagataaaactctgcaaagacaatgtctagcacttatatctccagtaactcctgtcaaggtttattgttgcttgttcatcattgcagtcctgactacaagtgtgattgcactttctattgttttgtcagaatttcctgaaaagatacaaaggcccttctgaccattggattggccttagaagagaatcatcccatcgcatttggaaatggacagacaacatggaatataataacatgtatgttttgagacttctcatcttttgctgtgtttatgtatggttatgtgtgtgagttgtgtttatgagataagaaatgtagtatcatggaaaacttactgcaatatgaggtaagaaatctaaaccctttttatgctcttcagttggttagctgtgtctttgggaaagctttacctgtgatttcagttgaagtctttaatgtgacagtgacatttctcacaattttacactttcatccactgatttaaaactgctgaaatccctacttatagctgatgtgcaacaaaggttctacaatcataggaagccactgaggagctgatatccacaaggctgttaagcccactcttgcaggtgttgcatccatttacaataggaaagcatccagggaactcatgggaatctctccctcctaaagcttta

SEQ ID NO: 389160 - DNA, 905 bp, Homo sapiens
ggtgggcgcgagagagcctagaagcccatgtagccgcgaatcccgcagccccagtacacctccctccgtgcctccccgccttttctgcagagctccgccctggagtgaaggaggagccgtcacctggagctccgaaaaaagcagaagaaggcgctttttatttagccagtgtgaccccgccagggccttctcggttgggtgagcactctctctgaccaggccatgaaaagatcagagtttgcagaactttgggggacctgagaggggagtgccccctggacgggccacggctgtctgtggcttaagggcttttggaagggcggagagagggaaacggcgtcctagtggcctgcttcagggccacccacgggccctcccccaacctctctctgatccaacttgtttttccagcctagttggaaacttgtggatgctgtgacctcaagaagacttggcattttatttggaagatagacatctatttgcaactgtcctgagcccctattttcctcccacctttcttggggaaacttgtttttaagggatgccactgtttttgtaacatgttgctcctagctcttagcattcatggtactgttgtaaccgtccagtgggttcactttgtctgctagatagagccgatttatcaagacggggattacaatggagaaagagtaattcacgcagagccggctttgcagataaaactctgcaaagacaatgtctagcacttatatctccagtaactcctgtcaaggtttattgttgcttgttcatcattgcagtcctgactacaagtgtgattgcactttctattgttttgtcaggtaagttacttgttctccaaactgtacaatattctccatatgtttttgttgtcaataaatatttattaagctccatta

SEQ ID NO: 389161 - DNA, 358 bp, Homo sapiens
ctctctctgaccaggccatgaaaagaaaaatctgtgcgatgcctccccacatgtcacgggactctgacttgcctttgtcgtcagagtttgcagaactttgggggacctgagaggggagtgccccctggacgggccacggctgtctgtggcttaagggcttttggaagggcggagagagggaaacggcgtcctagtggcctgcttcagggccacccacgggccctcccccaacctctctctgatccaacttgtttttccagcctagttggaaacttgtggatgctgtgacctcaagaagacttggcattttatttggaagatagacatctatttgcaactgtcctgagcccctattttc

SEQ ID NO: 389162 - DNA, 2008 bp, Homo sapiens
ggtgggcgcgagagagcctagaagcccatgtagccgcgaatcccgcagccccagtacacctccctccgtgcctccccgccttttctgcagagctccgccctggagtgaaggaggagccgtcacctggagctccgaaaaaagcagaagaaggcgctttttatttagccagtgtgaccccgccagggccttctcggttggataaaactctgcaaagacaatgtctagcacttatatctccagtaactcctgtcaaggtttattgttgcttgttcatcattgcagtcctgactacaagtgtgattgcactttctattgttttgtcagaatttcctgaaaagatacaaaggcccttctgaccattggattggccttagaagagaatcatcccatcgcatttggaaatggacagacaacatggaatataataacatttttcacacatttacaaaacaatttgggaggaggctggaaatcatcttgactgaagaccaccaatggcagcagttcatttgggcttgctatcagaggaagtggagaatgtgccttcctgaatgacaatggagtcaacagtggcagaatctacatgaacagaaaatggatttgtagcaagccaaacaattatgtctacagttgccagttatgtccccactgggatactacctagtagagctgtgagaagagggccaccatcctccagactccagaatggtggaatcatcagcagcttccaccatgcccctggaaaaactgcaagtaacagacctgcacatgtatcccctacatctaaaataaaagttggaaaaaatggaactttgatgttaagatgcactgatacaaaacttaaattttggtctcctacattaaaacaatatgagtctcttaaaatattgatttgttcttagtaagattacaagaggctttgatttttaattctgcaatgtttccttaacagccattctgaattacaaactaattcctatttctgccacattccttcctgagaactgtctagtcctggtttgggatttatcttaaaggtctagaaaggcaacattttacttcagcaaaacttgattctatattgttgttttttcttaatgtgtcaaaattgttttgttactaggatttcctatgttgttattaaatgtattcccctgatcaaggtcactggcctagaaaacaaagattctgtgttttaccaagataattcccagtgcttcatggtgtctttattaggctttgactgcttagggaaactgagccttaaaagggtaaaagtttttccatccatgtaactttctgaggtctttaggttgtcactctgattaaatgagtagtattcttagcagtgacttattatctgttgaaggaagtattttaagctttttgacatctttggcaggtttctctagaatccaaatcctaaattaagccttttggcctaaaattgactgggatttttccaggtggaccccctagatatgctcctccaaaggcttgtctttcttgtagagttattaaatgattaggcttatttggcaaatactgctagaagcattgtcaaataagaaatggtgttttacctttctttaagctgtgtttgtgtaagttcatcatttatagaaatgtgaaattttatgagattcctaagatactgacatgctgagatacctgtaataattgcaatttttatgttggatgattgtatgccacagaagcacttaaatttcctggttaattggtaacgttaatcagatctttacctatggctgttctgggtttttgtcattcacagttattattttaatttcttctttggaagcgttcgcaatcagctatagtccaaaattgctaattaagatcaagcaaaacaaaattaattacgtaaaattaatttataaggatgtttttatgacgtaaatgttttattttccagagccaaggaaattttctgtcacaagctatctaccgtttgcaataatttgataaataatcctttgtgaacaaa

SEQ ID NO: 389163 - DNA, 603 bp, Homo sapiens
atttccttccattttagatatataatctgtgtgtagtagaatatatggtgtatatataggtgcttactaaatgggtgtggaatttctggctttgaattttaggattttggactactttaagggcactgagatgacaagaatcatctgccggacttttgtcctccaggtggagttctgtatgccagtcttcagttactctcctcagccctttaataccactacagtgtttgagcacctctacttggtataaggaaatatggcctaattgttacagagaagatataacccctactcttccatatcaaaaaatcacaaaagaggcagggaaaatttagcatggaaagctaccatagagttgtagtgataaattagctttccctctcaacctcagcctttcaagaaggaaaggctttctttcctactgtcttttgatacatttctttcctactctgtttgatacatctgtgttctccctttgattaaagaggagctgttcaacttgaacctggggttgagtactcagatctgcctatattcctaaaatagcaaagatccttacccagaaagaaatgacattagacctacaaaaattagccgggcgta

SEQ ID NO: 389164 - DNA, 359 bp, Homo sapiens
tactacactctataattatgttactgatctggttactgtcacctgatataattatttaatgtgcctggcttagtgtatgtagttgtgcagtaaatattcattgaatgaataaacgttaaaggttatgaaactgtgacgtaaaaatcttatgaataaaaaatggaagatgggaaaagtcagaaacagcttcattacatgtgtaaaacacaaaccaattatgtccaaagaaaagcaaatattatttccacagaattaataatttaatattatgtgaagtcggggtcattgaatacttgtaaattggcaattgattctcgatatattcctttaaagttataatcttcttgaagtttaaggga

SEQ ID NO: 389165 - DNA, 1445 bp, Homo sapiens
gcaattgtttcatatattttgtcttattttgcaattgtttcaggagggaggataaatatggtccctgttcctctatcttgaccagaagcatctaagaaggcagtgaagcaacatgtgtacagttcttagggaaacaaattttgacctaaaaatattaaacctagtcaaaatattattctagtacaaaggcagcacatgggtatttttgaacataaaagagttctagaaatacaggacccatgaatcattcttgaagaaaagttactcagtaaggaaatctagctaagcaagcaacatgtacaaataaaagattattataattggaccaaagttaagtttaaatccattcacatgtatataattaagatatataggaattataattacagaaaagaatgttacaaaccttcacaaagtaaaaatatttttatatcagatagattcttctgtttcaatccataaaaccagggtttggatcattttaaaaaaacaaacaaaaataatttattggaatcattagggaggacctgatagaataaaatgacaagctgaccaaataggccttagaagggagaggtgcctgggcagttacaaggacctaggtagcaggggtgacttggccacagtcattttctttacttgatttaaggaggttaaattacagtgagagagttgcacttatttagtttgcataccgtactcaactcttagctagcatagggcaggttccttagttgaaaaatttccacaaaacatgatgtaaagtggaaagatcagttcccccaaagaatatcagttaccaaagtaggatgaaaggatgttgggtagatcaaaacaacaaatgtccattacagcaattaacaaaagttagggaatggggaagtctgagtgctaatatggatttcaaaacaactttaaaaatggcttcaaacattttatgctttttgtaatttagtcattttaatattagataaatcttcctgtaactgaaagttcttgagttaaagaaaaatattcggtagttcagctcttccttcaattttattagttgctttttcttttgttcaagtgaaataaacataaaaataattttaaaatattatgtatcatatccttcgatttaacataattctatctagctgttcttatattttctctgatatatttttaaaagctttctggaatattattaaccttgaatatttctagttgatgagtttatgagtgatttattgcttccttttctctttcagtattgctagaattaattttattgactttgcccctttgcataaagaccttgaaggtcacatgctgaaatcgccctctactaaaacaaactcatagaaataatggggaagatatttcaaaacattgccatatgcatagccatcctcacaaccaagaaaagcgcctctccatgaactaaaacctatgagtcattg

SEQ ID NO: 389166 - DNA, 1094 bp, Homo sapiens
gcaattgtttcatatattttgtcttattttgcaattgtttcaggagggaggataaatatggtccctgttcctctatcttgaccagaagcatctaagaaggcagtgaagcaacatgtgtacagttcttagggaaacaaattttgacctaaaaatattaaacctagtcaaaatattattctagtacaaaggcagcacatgggtatttttgaacataaaagagttctagaaatacaggacccatgaatcattcttgaagaaaagttactcagtaaggaaatctagctaagcaagcaacatgtacaaataaaagattattataattggaccaaagttaagtttaaatccattcacatgtatataattaagatatataggaattataattacagaaaagaatgttacaaaccttcacaaagtaaaaatatttttatatcagatagattcttctgtttcaatccataaaaccagggtttggatcattttaaaaaaacaaacaaaaataatttattggaatcattagggaggacctgatagaataaaatgacaagctgaccaaataggccttagaagggagaggtgcctgggcagttacaaggacctaggtagcaggggtgacttggccacagtcattttctttacttgatttaaggaggttaaattacagtgagagagttgcacttatttagtttgcataccgtactcaactcttagctagcatagggcaggttccttagttgaaaaatttccacaaaacatgatgtaaagtggaaagatcagttcccccaaagaatatcagttaccaaagtaggatgaaaggatgttgggtagatcaaaacaacaaatgtccattacagcaattaacaaaagttagggaatggggaagtctgagtgctaatatggatttcaaaacaactttaaaaatggcttcaaacattttatgctttttgtaatttagtcattttaatattagataaatcttcctgtaactgaaagttcttgagttaaagaaaaatattcggtagttcagctcttccttcaattttattagttgctttttcttttgttcaagtgaaataaacataaaaataatttta

SEQ ID NO: 389167 - DNA, 927 bp, Homo sapiens
gttaatatggccagtttgaagggtggtggcggaggtattgagcaggcagctcagggaaatgccagggagacccttgagcacagaaactcctgattgtccccagggactctccgtggacacaggagggattttccaggatttcacatgaattcaatgaagggggctgtgtcttattcctggatgctttgcctccttcatggaattcagtggatttaatggaagttcctaggcaacaataaagagtagaaaccaggttaacagcgagggcctcatctcacaccagatcatatcaggctacacaaaagtagatggaagacaccacccaggcctccagctatacactggagaagaagccaaactagtctacttcatctaagaaagttgtcaaagagagcccttctatactatcttaaggtaaaaagaaagactctacccagctgccctgattaagcattagaaagataagtgttctgatcattaggcgaaagacaatggggaaaaatgtagaaaagaaatatgacatgagccagatgaagaacccatcctgaaaggatatataactcaggggacaaaagacaactcaccataagttgggcgcagtggatcacgcctgtaatctcagcattttggtaggccaaggcaggtggatcacctgaggtcaggagttcaagtccagcctggccaacgtggtgaaatcctgtctctactaaaaatacaaaaattagctgggtgtggtggtgcatgcctgtaataccagctactcagaaggctgaggcaagagaattgcttgaatcaaggaggcagaggttacagtgagccaagatcaggccattgtacttcagcctgggcgacaaagtgagaccctgtctcaaaaaacaaacaaagcctccccatagatgtctcctgccatagaagaatttaagaagt

SEQ ID NO: 389168 - DNA, 711 bp, Homo sapiens
gttaatatggccagtttgaagggtggtggcggaggtattgagcaggcagctcagggaaatgccagggagacccttgagcacagaaactcctgattgtccccagggactctccgtggacacaggagggattttccaggatttcacatgaattcaatgaagggggctgtgtcttattcctggatgctttgcctccttcatggaattcagtggatttaatggaagttcctaggcaacaataaagagtagaaaccaggttaacagcgagggcctcatctcacaccagatcatatcaggctacacaaaagtagatggaagacaccacccaggcctccagctatacactggagaagaagccaaactagtctacttcatctaagaaagttgtcaaagagagcccttctatactatcttaaggtaaaaagaaagactctacccagctgccctgattaagcattagaaagataagtgttctgatcattaggcgaaagacaatggggaagtctgagtgctaatatggatttcaaaacaactttaaaaatggcttcaaacattttatgctttttgtaatttagtcattttaatattagataaatcttcctgtaactgaaagttcttgagttaaagaaaaatattcggtagttcagctcttccttcaattttattagttgctttttcttttgttcaagtgaaataaacataaaaataatttta

SEQ ID NO: 389169 - DNA, 667 bp, Homo sapiens
tcccaggctgatctcctgacctcaaatgatcctccctcctcagcctcccaaggtgttgggattacaggcgtgagcctagctcattttattttctattctttgaaaaaaggcgatgggtttctatctctagtgttaagggtccctatcagctctgagatgcttttggtttggtttttttgttttgtcttgttttaatttttggtagttctcgatggttctaaagggtagttgattcattttagttagataaaatgggctgctgaaataaaatagggcactaaaagaggaaatattgttacctaggaaaatgttttgtctatttgctttatttattttatttgatacagtatctatttgggcctctaaaactcaactctgattcttttttgtaataattattttaaaggagtttaaaggcaccagctttttgggggagttcagggagtaaaaggaatctcttcaaagatacaggcaaaaataaaaccttgaagtaaaacttaataaatatatatgtttggattcatttgttttatggtaccattttgaggggaaaaaaatgtttccagcttcgttatgtagtctactgacttgttgggtataaccataaacctgtttataatatcctgactaaggctttttagagttactatgtttccaggagtaaata

SEQ ID NO: 389170 - DNA, 246 bp, Homo sapiens
gggagggaggctgcttatgtatggaggcagtcaggcaggtaaacaggacagtgggagccaggtttctctgaggagttagacacagaaagaagaaaacaagaacgacctctgtccactgggagcacctgggaacagtgacaccccaactgcagtgagcacccctagacccagacctttgctgctaaaagtattattctccactaaaaggagtgagggctgattccggggctaggcagggaaaggaca

SEQ ID NO: 389171 - DNA, 584 bp, Homo sapiens
atttccttccatttttaaaaaactgaaagcatttaacgtaagactgtgaagtacaagtttgaacatacatcattggctttatttataaaatatagtataaatattatttaaactttaaattctatacccaaactattcatcaagtatgagggaaaaataaacacattgttaaacatgaaagtcctcaaaaaatggcagattgaaacatacagcatttatcaggcaccctgccaaaacctttctaaaatggcagtaaaaaaggtgttttgtttgtttggttgtttgttttgagacagagtcttgctctgttgcccaggctggaatgcagtggtgtgattctagctcactgtagcccagaattcctcggttcaagtgatcctcttgcctaagtcttccaagtagctagggctacaggcacacaccaccatgtctaatttttaaaaatttttgtagaaatggggtctcactatgttgcccagaccggttagtttttaaaagacataaatgcacagataaataggtagggccaagccaagccctggagttcaaggccagcctaggcaacatagtaagaccctgtgtca

SEQ ID NO: 389172 - DNA, 440 bp, Homo sapiens
gttgaatcttggctcagacattgaacagttatgagattttggacaaataaatgtctttgactctgtgtttttgttttccatctgaaattgaggattacttatctattacctaggctcgtgggtattaattggaagcatttatatgtaaagccatgaaatattgacaaagtaataaaccttatggaccatgattttcatttagtgattaaatgtctgtagctaagttattaatgtttttggacatcagccataggaaaagttaacaagattggtttaagctcaccactctcagtttctattcagtaagttagtagttgatactctgtttaggatcatcgtttttgaaatataaataaagtagttttgtaactcatgaattcatggaatatgattctcggaaagcaggtttttcagcccttaatcattagaaaaggttctac

SEQ ID NO: 389173 - DNA, 718 bp, Homo sapiens
ttttttaatgggccatgggaccaagctagaacataccaattatactatattcaaactttgattctcaagtcaaaatctgttacagaaatactgttgctgtgggtgcaagcaacctaataaatactttcaacttcatttcacaaaaagtgacctagaatgctgatttagaaaaaatataagcttaaaaatgacgctatctgcttgtatgtgagagagagagagatggagagagagacagacgatgggcggaggggaggaaagagctaggtagaatgataaatgaaaatctaaaaaggcgggcttcatttcactggtattaatttggtaaattatccataatttattagagcttgtaaacattgtggcaaaattttttgcccctgtcagtaatgaattgcctacatcattaattttgtcaaaggatcaagaaacaacattgctgagctcaaagaaactcctagatgaatgaatatagttgggttgaagtgctggtgtggttagttgaattcagcagttgaatccacatgaccgtttctttcctcatggtcagcctgacctcaactgccaagggtggcagggtgcgtcccatcccccagtggggaggaggctgtgtagtcaacactgcattcggttccttacgtttccctgtgacactgtcctggcctgtatatatttatatattcacttacttcaggcatgtctaaagtggtaaatgaaa

SEQ ID NO: 389174 - DNA, 169 bp, Homo sapiens
cactttgaaataagaaagtaaattaaaatgctgcatttcaaaagctattaaaatactcaataatattttcataaggtatttcttgatcacctatattgcagcttccctcgggttacattctaagtcctatacaacttcagggaagtatgttaccaacagtgcctctcaa

SEQ ID NO: 389175 - DNA, 1061 bp, Homo sapiens
cctttaagtagtcatgtaattcattatagcagctgaacatttctaagtgcaacattataggaaaccagtaaagctgatttctgatttatctgcagcaaaagaatttaatattccaacttcagcaaaaggcaattaaaaacaaacttaaatcacattgtgtgcttttaatacgtatgtttttttccatgctgtctgatgtattttagttcttagtcatttacttccattagtttccaaattggttgagggaattaaattggtagccaagttacctatacaagattttcctactgtgtatgtgaaccactctttctgggaaaatcctcccgttggcacttttcttgaaggcatgcactttttccacacttagtgatttggggactgaagcctgcatttagcctgtatttagtcagaggtgacaaatggctaaattttttttttccagtttagagattgagaaatgattcagaattgaaactaaagtgaatttggacttactgtatttctttgcaattacttttaaacaattgctgtctgttactattaggcatattttggacctatgggttccattttgggccgatatttggtgttatgttgttaaatttcttgcctggcttagatggttcattgttgaaactaaactggaactaggtttgatcagagggccaatggaaatgcacgttgtggcccatttggggaggacaaaatttgacatatttttactttaagaattcttaggaaaatttggataacgtgagaatatatttccaaagggttaagtaattttcgagggaaaatcagaaagcttgtaattcctactgaaaatattagcctgctgaaatattagcctatttcctactgaaaatataacattagcaggccgggcacagtggagttcacgcctggctaatttttgtatttttagtagagatggggtttcaccatgttggccaggctggtcttgaactcctgacctcaaatgatctgcctacctacgcctcccaaagtgctgggattacaggcgtgaaccactgtgcctggcttgacttttttattta

SEQ ID NO: 389176 - DNA, 345 bp, Homo sapiens
catccttattggtagaaataattcagttggattctgaggagcagttgaaagagagatctcaggctgggcatggtggctcacgcctgtaattgcagcactttgggaagctgaggcaggtggatcaactgaagtcaggagttcacgactagcctggccaatatgatgaaaccctgtctctactaaaaatacaaaaattagccgggtgtgatggtgcatgcctgtaatcccagctactcgggaggctgaggcaggagaattgcttgaacccccgaggtggaggttgcagtgagttgagatcacaccattgcgctccagcctgggcaacaagagcaaaactcggtctca

SEQ ID NO: 389177 - DNA, 750 bp, Homo sapiens
ctctgaatgtttcttgacctagagtggacttaatacttcccagatttgatgagggaggtgttttcttttctgtttgaatcttttatgttttattactcgtgagtgactttgtcagcaatcctaacttagattatgaagtcctttgatcttggagtacatttaaaatatcttgttgaaattgttccctctctattcatgttattctacgagctgcattaaatttcagtgttgttggagaatattattttatatgctttatttaatctttcttttaatacaattcattcagacccgattttttatcagtatcttaatattgcagtgtccctctgctgtcttaaaattttttttttctctctccatagtctgaaatgtaatgacatctaatgttagcttctggcacgatgctagtcactttttgctagcacccttctgtgcaatgctaatctgacattctgaattttaagctgtatatctctataaatcctgtcttttcacacagatcagtagccaagccttttatctgagccttatattacaaaaaggatgcaaaatcagaagatgtcaatggagtaatcattttaagaaataagatacaaaattaaatttggttcaaatgtaactggtgatcaaaggacctttctgcataaattattttctaagttatttgtgtctgtttttactccttaggttaagattctactcagtcattgatttaattttgcatgtcatctagcatatttaatctac

SEQ ID NO: 389178 - DNA, 614 bp, Homo sapiens
ctctctgacctgccccctaaaatacttccacagtcatcattgcataccacaagtcccccagcaagattattttaaaaagaagatgctcgccaagacaagcaatcaccagaatgcacagaaaaatatgaggacctttggtttgttcctccacttggtaaaactcagaaagataatggcctatgttggcaacggtatgtgaagggaaggaggcgctttgggcactgctgaaggcagcacaaactggtgaggaatgtgcaacagacaatttggcaatatttatccaaattgattatgtgttctcctttggacccagagttcctatacttaacacctgttttacagaaatggttttgtatgcccccaaagagatttgttcaaggacactcatgatagcaatgcatgtcagaggaaaagaagaaaaaacaaaagacatatcctaagtatgctctttatttcacaccaggatttgatcaaatggtccataactttacctgccatttattttccccccagaacttcaactcaccttcctttctgtgctgccatctctagaccataagttgtccattttctctgtgtctagacccaagctgctgagttctactaaaaaaaaa

SEQ ID NO: 389179 - DNA, 331 bp, Homo sapiens
gataaatccaaggactgaaacaaaacagtactaaggatctgcgaactatcccgttatgaagaaatatgcatttaaaataaaattcaaacacatagacactgaagatatttggtgaaaaagactgagaggtctttgacctcttggaactcacagtcaagtgtggggtgtcaaatcaaacacgaggaaacaagtgaaagtgaccattttagatagtaagaaaatacgtcaaaaagaagtttatgtgatacagattgccaggcgagggctaggttaggcctccagcaaaagtctctctgaggaattggtatttggtagagttgaataatcatga

SEQ ID NO: 389180 - DNA, 410 bp, Homo sapiens
cttcaggcctttgcaggtgcttttccctctgcctgggtcactcttcccttcgcttcctgtggctcatagtcttttcctccaagtcttaactcccataacctctcctccaggaagccctccctgacctccaggctgagtcaaggccccctctcctggggtccctccctccaactctgccaatctgggctcatcattgtctggggataggtttgtctccctcattgggttgtgagctgggtgaaagctcggccaaaaccatcccggtcactgccttgtccccagcatagcacgtggtacccaataggtggttattaaatatttgttcaagccaggcacagtggctcatgcctgtaatcccagcactttgggaggctgaggcaggagaatcacttgaggccagtttgaggcca

SEQ ID NO: 389181 - DNA, 327 bp, Homo sapiens
aaaaaaatctacattgttttgagtgtttggttattaatagtttatggatataactgctgcacagtagtaactccttcatctactggaaggaaggtcaatttttcagtcattagaaataggtagctaaatgagatgcttcttatttttgcttggaggtgccaggtttatttgccaactttccacagttagaaagcactttggatcaccactgtcagatatttagatttctttttgagtctggaggattgtatttcttatcaaaacaaatatccaagtttatgctttaaaaatatttaagtttttattaattgcagaatatgagaataa

SEQ ID NO: 389182 - DNA, 945 bp, Homo sapiens
atttctccagagaagtatacattggtcactaagcccatgaaaagaggctcaatattaacagccatgagggaaacgtaaatcacacccacaaggagatgccacctcacaccgagtaggaaggctgtcatcataatcacagtgaggacatggagagactggatccttcaccccttccaggggcagcgcgaagagagatggagtcggggtggagtgtgggcgagagtgtggtctgcagggctgtgatggtgaatattaggtgtccagtgtggatggtcaccataccatggactgccagcggggctagaggagagcaggcgggagagggtgaggtgactctgcgggtggagctctctggcttctctttgcgttccctgagagttcttgcttccttcctccttggacatcagactccgggttctttggccttcgggctctgggacttgcaccagcagtttccgactttcggggtctctgggacatttggcaggggctgaaggctgccctgtgggcttttctggttttgaggctttctgacttgcactggcctctgctggcttgtctcctccccagcttgcagacggtctaccattggactttgccttgaaatcgtgtgcaccaattttccctaataaattcccgttcatatataacaaaaaaaaaaaaaaaaaaaaacaaaaaaaaaagaagaaaaaagacacgaagaaacaaaaaaacaggggggcggggccaaaaagaagtcccccgggggggggacccacattggagacacacaccggtgtatggggagcaaacgggggcccacacagggagaggagtctcaacaaagccatgacgaagcgggccgcgcctaacacacggcgagtgcggcagaacacgcagacgggggcaacactcgagaggagagcaccaaaccagggggggggcaaaatggtgggaacgccaccc

SEQ ID NO: 389183 - DNA, 239 bp, Homo sapiens
attaggccaggggggtggagctctcacaatgggattcctgctcctttgcccatttcctgccatgtgaggacacaggaaggtgactgtctgtaacccagaaaaaggtccttgccagtcaccaaccaggctggcacccagatctcagacttccagccttcagaagtgtgagagataaatttctactgtttgtaagccacccagtctacgataatttgttacagccacctgaatggaccaca

SEQ ID NO: 389184 - DNA, 362 bp, Homo sapiens
tcagtagagatggagtttcaccaggccaggctgatctcgaactcctgacctcaggtgatccacccgcctcagcctcccaaagtgataggattatgattacaggcgtgagccactgcgccctgcctgggctgtggtctttaactggctgagagccttcagatgagaacactctgagcctcagtctccttcaatggaggcactggacagcaggaagtcagagaagactttcagtgctaactgctcagtttttatcaaagcaactgtgaattgtagaaaggggaaaattagctctgaagtatttaagaggaaaatggggaattttcttggaattgattgaacatgttttaagacatcacaaggat

SEQ ID NO: 389185 - DNA, 724 bp, Homo sapiens
gtgagctgatagatgtaaccgtgttccaatgaaactttatttacaaaaacaaggagtgggtcagatttggcctgtgggtcatagcttgctgactcttgttttatttggtgaatggtttctgagagttgagtaacaactggggagtagagtccatggaccaggataaactttcatctctccccataatgggaatgtgtgagtaggcaggcgtgcatacctgcaacgcagcggcaaagctatggacttcctgtgttaagttcaatgtgtaagcatactcttgagagtaaccacgtgaactacgtaggtatccattgccaattaacatttggcaatgttaatgccaacaattaacatgaacataaaatggtctaattgtaggaaatctgaaaaagagaagacaaacaaagaaactgagacagaaagtggaaatgaaaactccggctacaattcagatgaacaaaagaccacagacaccgcttctctccctcccaaatcctgtgaatccagtgatcctgaacaaagaaacagtagctgtggccctcctcaccagcgggctgatcaacgtccacccaggccagcaagtcatccacaggcttcttttaatctggccagtcctgagaaggtcagtaatacaactgtagtatagcaaagccttccccaagctccactgagcacttggctgacaattcaaaacacggcgatggcatccttcctttccatccta

SEQ ID NO: 389186 - DNA, 289 bp, Homo sapiens
gttcctctccgtaccttaattttatcttaacagatgagtgaagctctcttttcaagtttgcattttacagtgatctcaacccattaaattgacttttttcctcctctgttgccagcgggctgatcaacgtccacccaggccagcaagtcatccacaggcttcttttaatctggccagtcctgagaaggtcagtaatacaactgtagtatagcaaagccttccccaagctccactgagcacttggctgacaattcaaaacacggcgatggcatccttcctttccatccta

SEQ ID NO: 389187 - DNA, 228 bp, Homo sapiens
atccagctaatttttcatatttttggtagaaatggggtttcaccatcttggccaaactggtctcaaaatcctgacctcaagtgatccaccttcctcagcctccccgagtgctggaattagaggcgtgagccaccgcgcccagctgaaagaagatttagttgagagctaaggtgcacataaggggacaacaagttagaggtgttcatacctaaagagctataatgtcct

SEQ ID NO: 389188 - DNA, 609 bp, Homo sapiens
  misc_feature (607)..(608): n is a, c, g, or t
gtctcactgtttcccaggctggagtgcagtggtgtgatcatagctcactgtagtctcaaactcttgggctcaagcagtcgtcctccctcagccttccaagtagctgggattataagtgcaagccacaacaccaggctgataggttttttttaatggaattttttcagatgtaatttacaaccatacagtttacctgctttgggtttacaactcaagatttttgtaaattcacagttgtgtggccatcaccacagtccaattttagaaaattttcaacgcccgagagaaattcctcatgctcatatgcagtcactataaaagtttttattaatgattgatgcatgtaattttcagtaataaaatcaagtattaataatacattttaatatgactcttttctagccaaagcatgtttcataccaaaagtagttaatttctcactcatttaaaaaatggctgggtgcagcagctcatgcctgtaatcccaaagtgctgggattataggtgtgagccactgtgccctgctgaaagatcttatttttataatattgatgatactctgtagcacataaactgaaatatattgtaatacactggatgaaaaaanna

SEQ ID NO: 389189 - DNA, 487 bp, Homo sapiens
ttcaagttcaacaccaccgtctagcacagtctttttttttgagacgtagtctcactgtcacccaggctggagtgcagtggtgcaatcttggctcaccgaaacctcctcctgggttcaagcgattctcctgcctcagcctcccaagtagctgggattacaggcgagtgccaccatgcctggctaatttttgtattttaatagagacggggtttttgccacgttggccaagctgttctcaaacttctgagctcaagtgatcagcccggcttggcctcccaaagtgctgggattacagatgtgagcgcctgcgcctggcccgcatggtctttattgtagcagcatctctgccctatcactgtcgcaggcaggctggtggctggcggggtggtctttagcaggctgctggctgagcccacatggaccagcagatgcccttctctgagcccttaccaagcacaccaagggtgtgccccctgacacacatgcg

SEQ ID NO: 389190 - DNA, 777 bp, Homo sapiens
tctcagtgcctctttcctgggccagatgtgcagccaccgcctgttctggggtggcacggaggaggaggaggaaaggatactgaggtttagcacatttaagtttggaaactgttcgatgccatccctgacagttcaccctaggatctgggggtggagagtgatgacagaagcgggcaaataatctgtgagtctttcagccgttgctgtgtgccccaccgtacacatacccttttctaatgtgtgccaaacagtgaaatctaatgataatagataaggattgtaggaagaaagcaatctagaaccgattatttcttttctttcttcagaaataaccgttaggtgaggaatgtgatttgaggtgcaccaagaggggtcctcagtttctaaacactgccccccagacccccaatacacacataccctgcctctacctccacccaaagagaggactcaatactgaggtcagaactcctctacgtgggactatagcaaagaagaacgcaggagaggggacggtggctggggacacagcagatgggcactgccaggcaggactgctgtgggcattgccagggagagccaggatgcaaaaatggcagtgagggggccctggtaagggcttctagggctttgctgatctccaggctcatgcgagggctgactagcttgggcagacagaccttttttcttttttccctccaacagaaacaaaaggataaaatcattggcatcactgctggacatggtggctcacgcctgtaatccctgcactttggg

SEQ ID NO: 389191 - DNA, 281 bp, Homo sapiens
acattatcacaatagaggcagaaaaagcatttgacaaaattcaacaccctttcatgataactcccaacaaaataggtatagaaggaatgaatgttcctcaacacaataaaggccatgtgtgacatgccaataactaacatcatactcattagtgaaaagttggaggcttttcctttaagatgaggaacaaagtgaaggatatattagcccaatttgctcattctacattgtatacatgtatgaagcatcacattgtaccctataaatatacacaatggtca

SEQ ID NO: 389192 - DNA, 469 bp, Homo sapiens
ctactatggagctcacattctcctgtcacttcttagagacttctggcttcctgtcaggcatataacaagcttgaaatttgtcactcggttctaacagtaagtaaaaagttgaacaaactcaaaagtcaacaactcattaaaatccctcagagatggctgggcacagtggctcatgcctataatcccaggactttgggaggccgaggcgggcacaaggtcagaagatggagaccatcctggctaacatgttgaaactccgtctctactaaaaatacaaaaaattagctgggcgtggtggcggatgcctgtagtcccagctacttggtaggctgagccaggagaatgccgtgagcccaggaggtggagcttgcagtgagctgagatcatgccactgcactccagcctgggtgaaagagagagactctgtctcagaaaaaaaaatgctgttagagaaatgaagaatgctttt

SEQ ID NO: 389193 - DNA, 264 bp, Homo sapiens
caccaattcatgtattcatgtgacagaataagatttcagagttgtgtatgccagcgccaaatacaagaaacagataagggatagatatttctactgtatgcctaccttatttatgcctactttatccaaatcaacagaaatgagggcatagttgtttgtattataaacagatctgccatggggtttcttgaaatcatgagcccccttgtggtttctttttattattattatacatttttattttaaaatagtgtaggactcaca

SEQ ID NO: 389194 - DNA, 416 bp, Homo sapiens
ggagttttaccaaagatctctaaaattcttctgaaagaactgcaggatgtaattaagacaaaggaaaattatcccagaaggaatacctgagatgtaggatggaatagtaaacagatagaatggcacagtaaagccaaacaaacatgatataacgtaataattgtgtttaatttgtggaattaaaggcaaaaaactgcaatgacatgagttagtccatgttgaagaagtccaccaggcagttgtgagaacatgggagtgggccgataaggcagttatgagggctccattgtcagcaaacaagtcaagtgtaaactaagaacaaagtcacttagattgagaatacatgatgaggattagggctacctttggtgaatatatggtatactggaggctaactggaggctgcctttatgcaa

SEQ ID NO: 389195 - DNA, 1177 bp, Homo sapiens
  misc_feature (1025)..(1025): n is a, c, g, or t
  misc_feature (1029)..(1029): n is a, c, g, or t
  misc_feature (1031)..(1031): n is a, c, g, or t
  misc_feature (1036)..(1036): n is a, c, g, or t
  misc_feature (1038)..(1038): n is a, c, g, or t
  misc_feature (1042)..(1042): n is a, c, g, or t
  misc_feature (1045)..(1045): n is a, c, g, or t
  misc_feature (1053)..(1053): n is a, c, g, or t
  misc_feature (1062)..(1062): n is a, c, g, or t
  misc_feature (1067)..(1067): n is a, c, g, or t
  misc_feature (1071)..(1071): n is a, c, g, or t
  misc_feature (1073)..(1073): n is a, c, g, or t
  misc_feature (1079)..(1079): n is a, c, g, or t
  misc_feature (1083)..(1083): n is a, c, g, or t
  misc_feature (1085)..(1085): n is a, c, g, or t
  misc_feature (1093)..(1093): n is a, c, g, or t
  misc_feature (1095)..(1095): n is a, c, g, or t
  misc_feature (1177)..(1177): n is a, c, g, or t
agggcggggtttgcgttggcacccgctgcccgggcgcgacgcgctgcggctcagcgacgcggcttctagaaccgggtgattgaactaaaccttcgccgcaccgagtttgcagtacggccgtcacccgcaccgctgcctgcttgcggttggagaaatcaaggccctaccgggcctccgtagtcacctctctatagtgggcgtggccgaggccggggtgaccctgccggagcctccgctgccagcgacatgttcaaggtaattcagaggtccgtggggccagccagcctgagcttgctcaccttcaaagtctatgcagcaccaaaaaaggactcacctcccaaaaattccgtgaaggttgatgagctttcactctactcagttcctgagggtcaatcgaagtatgtggaggaggcaaggagccagcttgaagaaagcatctcacagctccgacactattgcgagccatacacaacctggtgtcaggaaacgtactcccaaactaagcccaagatgcaaagtttggttcaatgggggttagacagctatgactatctccaaaatgcacctcctggattttttccgagacttggtgttattggttttgctggccttattggactccttttggctagaggttcaaaaataaagaagctagtgtatccgcctggtttcatgggattagctgcctccctctattatccacaacaagccatcgtgtttgcccaggtcagtggggagagattatatgactggggtttacgaggatatatagtcatagaagatttgtggaaggagaactttcaaaagccaggaaatgtgaagaattcacctggaactaagtagaaaactccatgctctgccatcttaatcaggaaaaactagaccagacctctgttatcttctgtgaaatcatcctacaagcaaactaacctggaatcccttcacctagagataatgtacaagccttagaactcctcattctcatgttgctatttatgtacctaattaaccagtaaaaaaaaaangggngnctaananccgnggncagtagcncccgtttgnaaggnccangnggtaanaagngngggtaacngnggaaggcggttgagactctggggggcccacgacgcgaaaattgtcctggtggtaatattaaatgccgagatacagccctccn

SEQ ID NO: 389196 - DNA, 620 bp, Homo sapiens
agggcggggtttgcgttggcacccgctgcccgggcgcgacgcgctgcggctcagcgacgcggcttctagaaccgggtgattgaactaaaccttcgccgcaccgagtttgcagtacggccgtcacccgcaccgctgcctgcttgcggttggagaaatcaaggccctaccgggcctccgtagtcacctctctatagtgggcgtggccgaggccggggtgaccctgccggagcctccgctgccagcgacatgttcaaggtaattcagaggtccgtggggccagccagcctgagcttgctcaccttcaaagtctatgcagcaccaaaaaaggactcacctcccaaaaattccgtgaaggttgatgagctttcactctactcagttcctgagggtcaatcgaagtatgtggaggaggcaaggagccagcttgaagaaagcatcttcaacacggcattcccggaccaaaccttttaatttggggcccgggaaatggtccccaaattttaaacccaaaccaaaaaacccccttgtggggttggttccaggaaaacgttactcccaaatctaagcccaagatgcaaaagtttggttcaatgggggtagacagctatgatatctcaaaa

SEQ ID NO: 389197 - DNA, 1214 bp, Homo sapiens
  misc_feature (1062)..(1062): n is a, c, g, or t
  misc_feature (1066)..(1066): n is a, c, g, or t
  misc_feature (1068)..(1068): n is a, c, g, or t
  misc_feature (1073)..(1073): n is a, c, g, or t
  misc_feature (1075)..(1075): n is a, c, g, or t
  misc_feature (1079)..(1079): n is a, c, g, or t
  misc_feature (1082)..(1082): n is a, c, g, or t
  misc_feature (1090)..(1090): n is a, c, g, or t
  misc_feature (1099)..(1099): n is a, c, g, or t
  misc_feature (1104)..(1104): n is a, c, g, or t
  misc_feature (1108)..(1108): n is a, c, g, or t
  misc_feature (1110)..(1110): n is a, c, g, or t
  misc_feature (1116)..(1116): n is a, c, g, or t
  misc_feature (1120)..(1120): n is a, c, g, or t
  misc_feature (1122)..(1122): n is a, c, g, or t
  misc_feature (1130)..(1130): n is a, c, g, or t
  misc_feature (1132)..(1132): n is a, c, g, or t
  misc_feature (1214)..(1214): n is a, c, g, or t
agggcggggtttgcgttggcacccgctgcccgggcgcgacgcgctgcggctcagcgacgcggcttctagaaccgggtgattgaactaaaccttcgccgcaccgagtttgcagtacggccgtcacccgcaccgctgcctgcttgcggttggagaaatcaaggccctaccgggcctccgtagtcacctctctatagtgggcgtggccgaggccggggtgaccctgccggagcctccgctgccagcgacatgttcaaggtaattcagaggtccgtggggccagccagcctgagcttgctcaccttcaaagtctatgcagcaccaaaaaaggactcacctcccaaaaattccgtgaaggttgatgagctttcactctactcagttcctgagggtcaatcgaagtatgtggaggaggcaaggagccagcttgaagaaagcatctcacagctccgacactattgcgagccatacacaacctggtgtcaggaaacgtactcccaaactaagcccaagatgcaaagtttggttcaatgggggttagacagctatgactatctccaaaatgcacctcctggattttttccgagacttggtgttattggttttgctggccttattggactccttttggctagaggttcaaaaataaagaagctagtgtatccgcctggtttcatgggattagctgcctccctctattatccacaacaagccatcgtgtttgcccaggtcagtggggagagattatatgactggggtttacgaggatatatagtcatagaagatttgtggaaggagaactttcaaaagttataggtaaacattggaaactccatagaataaatcagtatttctacagaaaaatggcatagaagtcagtattgaatgtattaaattggctttcttcttcaggaaaaactagaccagacctctgttatcttctgtgaaatcatcctacaagcaaactaacctggaatcccttcacctagagataatgtacaagccttagaactcctcattctcatgttgctatttatgtacctaattaaccagtaaaaaaaaaangggngnctaananccgnggncagtagcncccgtttgnaaggnccangnggtaanaagngngggtaacngnggaaggcggttgagactctggggggcccacgacgcgaaaattgtcctggtggtaatattaaatgccgagatacagccctccn

SEQ ID NO: 389198 - DNA, 1352 bp, Homo sapiens
atgcttttgaaacaaggggaatttcccttgtccctcttacagggcatgtgatgggagtgtggcccacttcttaggtgccccactgctcaaaacccctagggaaagcaggcagatgggcaggtcgtggggagtgtgggctccaaccccatggcagcgtctaggggtggatgtttacagcttctgcagccccagtgggcgtgtgttacgtgtgctcttttagttttgctgtcagtaggcagcttgtgttcatcagctcagttagaccctctgccttattgcaaggacagagggctttctgtatcctagggttcttgcctgagtataccagaaaaaccggatcacacgtgggcttggaggatgagtgcaaggttttattgaatggtggaagtagcactcagcagatggaaacggagccagaaggggtatggagtgggaaggtggttttcccctggagtcaggccgcttagcagccaggctctcctctgaccgccctcagccaaactccgcgttgtcctgccgttctgctgttggtggcctgccggagtctgtcactgtgttcttctgctggtaattcagaggtccgtggggccagccagcctgagcttgctcaccttcaaagtctatgcagcaccaaaaaaggactcacctcccaaaaattccgtgaaggttgatgagctttcactctactcagttcctgagggtcaatcgaagtatgtggaggaggcaaggagccagcttgaagaaagcatctcacagctccgacactattgcgagccatacacaacctggtgtcaggaaacgtactcccaaactaagcccaagatgcaaagtttggttcaatgggggttagacagctatgactatctccaaaatgcacctcctggattttttccgagacttggtgttattggttttgctggccttattggactccttttggctagaggttcaaaaataaagaagctagtgtatccgcctggtttcatgggattagctgcctccctctattatccacaacaagccatcgtgtttgcccaggtcagtggggagagattatatgactggggtttacgaggatatatagtcatagaagatttgtggaaggagaactttcaaaagccaggaaatgtgaagaattcacctggaactaagtagaaaactccatgctctgccatcttaatcaggaaaaactagaccagacctctgttatcttctgtgaaatcatcctacaagcaaactaacctggaatcccttcacctagagataatgtacaagccttagaactcctcattctcatgttgctatttatgtacctaattaaaacccaagttaaaaaaaaaaatccgaaaaaa

SEQ ID NO: 389199 - DNA, 889 bp, Homo sapiens
agggcggggtttgcgttggcacccgctgcccgggcgcgacgcgctgcggctcagcgacgcggcttctagaaccgggtgattgaactaaaccttcgccgcaccgagtttgcagtacggccgtcacccgcaccgctgcctgcttgcggttggagaaatcaaggccctaccgggcctccgtagtcacctctctatagtgggcgtggccgaggccggggtgaccctgccggagcctccgctgccagcgacatgttcaaggtaattcagaggtccgtggggccagccagcctgagcttgctcaccttcaaagtctatgcagcaccaaaaaaggactcacctcccaaaaattccgtgaaggttgatgagctttcactctactcagttcctgagggtcaatcgaagtatgtggaggaggcaaggagccagcttgaagaaagcatctcacagctccgacactattgcgagccatacacaacctggtgtcaggttcaaaaataaagaagctagtgtatccgcctggtttcatgggattagctgcctccctctattatccacaacaagccatcgtgtttgcccaggtcagtggggagagattatatgactggggtttacgaggatatatagtcatagaagatttgtggaaggagaactttcaaaagccaggaaatgtgaagaattcacctggaactaagtagaaaactccatgctctgccatcttaatcaggaaaaactagaccagacctctgttatcttctgtgaaatcatcctacaagcaaactaacctggaatcccttcacctagagataatgtacaagccttagaactcctcattctcatgttgctatttatgtacctaattaaaacccaagttaaaaaaaaaaatccgaaaaaa

SEQ ID NO: 389200 - DNA, 1142 bp, Homo sapiens
agggcggggtttgcgttggcacccgctgcccgggcgcgacgcgctgcggctcagcgacgcggcttctagaaccgggtgattgaactaaaccttcgccgcaccgagtttgcagtacggccgtcacccgcaccgctgcctgcttgcggttggagaaatcaaggccctaccgggcctccgtagtcacctctctatagtgggcgtggccgaggccggggtgaccctgccggagcctccgctgccagcgacatgttcaaggtaattcagaggtccgtggggccagccagcctgagcttgctcaccttcaaagtctatgcagcaccaaaaaaggactcacctcccaaaaattccgtgaaggttgatgagctttcactctactcagttcctgagggtcaatcgaagtatgtggaggaggcaaggagccagcttgaagaaagcatctcacagctccgacactattgcgagccatacacaacctggtgtcaggaaacgtactcccaaactaagcccaagatgcaaagtttggttcaatgggggttagacagctatgactatctccaaaatgcacctcctggattttttccgagacttggtgttattggttttgctggccttattggactccttttggctagaggttcaaaaataaagaagctagtgtatccgcctggtttcatgggattagctgcctccctctattatccacaacaagccatcgtgtttgcccaggtcagtggggagagattatatgactggggtttacgaggatatatagtcatagaagatttgtggaaggagaactttcaaaagccaggaaatgtgaagaattcacctggaactaagtagaaaactccatgctctgccatcttaatcagttataggtaaacattggaaactccatagaataaatcagtatttctacagaaaaatggcatagaagtcagtattgaatgtattaaattggctttcttcttcaggaaaaactagaccagacctctgttatcttctgtgaaatcatcctacaagcaaactaacctggaatcccttcacctagagataatgtacaagccttagaactcctcattctcatgttgctatttatgtacctaattaaaacccaagttaaaaaaaaaaatccgaaaaaa

SEQ ID NO: 389201 - DNA, 985 bp, Homo sapiens
agggcggggtttgcgttggcacccgctgcccgggcgcgacgcgctgcggctcagcgacgcggcttctagaaccgggtgattgaactaaaccttcgccgcaccgagtttgcagtacggccgtcacccgcaccgctgcctgcttgcggttggagaaatcaaggccctaccgggcctccgtagtcacctctctatagtgggcgtggccgaggccggggtgaccctgccggagcctccgctgccagcgacatgttcaaggtaattcagaggtccgtggggccagccagcctgagcttgctcaccttcaaagtctatgcagcaccaaaaaaggactcacctcccaaaaattccgtgaaggttgatgagctttcactctactcagttcctgagggtcaatcgaagtatgtggaggaggcaaggagccagcttgaagaaagcatctcacagctccgacactattgcgagccatacacaacctggtgtcagacagctatgactatctccaaaatgcacctcctggattttttccgagacttggtgttattggttttgctggccttattggactccttttggctagaggttcaaaaataaagaagctagtgtatccgcctggtttcatgggattagctgcctccctctattatccacaacaagccatcgtgtttgcccaggtcagtggggagagattatatgactggggtttacgaggatatatagtcatagaagatttgtggaaggagaactttcaaaagccaggaaatgtgaagaattcacctggaactaagtagaaaactccatgctctgccatcttaatcaggaaaaactagaccagacctctgttatcttctgtgaaatcatcctacaagcaaactaacctggaatcccttcacctagagataatgtacaagccttagaactcctcattctcatgttgctatttatgtacctaattaaaacccaagttaaaaaaaaaaatccgaaaaaa

SEQ ID NO: 389202 - DNA, 1040 bp, Homo sapiens
agggcggggtttgcgttggcacccgctgcccgggcgcgacgcgctgcggctcagcgacgcggcttctagaaccgggtgattgaactaaaccttcgccgcaccgagtttgcagtacggccgtcacccgcaccgctgcctgcttgcggttggagaaatcaaggccctaccgggcctccgtagtcacctctctatagtgggcgtggccgaggccggggtgaccctgccggagcctccgctgccagcgacatgttcaaggtaattcagaggtccgtggggccagccagcctgagcttgctcaccttcaaagtctatgcagcaccaaaaaaggactcacctcccaaaaattccgtgaaggttgatgagctttcactctactcagttcctgagggtcaatcgaagtatgtggaggaggcaaggagccagcttgaagaaagcatctcacagctccgacactattgcgagccatacacaacctggtgtcaggaaacgtactcccaaactaagcccaagatgcaaagtttggttcaatgggggttagacagctatgactatctccaaaatgcacctcctggattttttccgagacttggtgttattggttttgctggccttattggactccttttggctagaggttcaaaaataaagaagctagtgtatccgcctggtttcatgggattagctgcctccctctattatccacaacaagccatcgtgtttgcccaggtcagtggggagagattatatgactggggtttacgaggatatatagtcatagaagatttgtggaaggagaactttcaaaagccaggaaatgtgaagaattcacctggaactaagtagaaaactccatgctctgccatcttaatcaggaaaaactagaccagacctctgttatcttctgtgaaatcatcctacaagcaaactaacctggaatcccttcacctagagataatgtacaagccttagaactcctcattctcatgttgctatttatgtacctaattaaaacccaagttaaaaaaaaaaatccgaaaaaa

SEQ ID NO: 389203 - DNA, 1454 bp, Homo sapiens
atgcttttgaaacaaggggaatttcccttgtccctcttacagggcatgtgatgggagtgtggcccacttcttaggtgccccactgctcaaaacccctagggaaagcaggcagatgggcaggtcgtggggagtgtgggctccaaccccatggcagcgtctaggggtggatgtttacagcttctgcagccccagtgggcgtgtgttacgtgtgctcttttagttttgctgtcagtaggcagcttgtgttcatcagctcagttagaccctctgccttattgcaaggacagagggctttctgtatcctagggttcttgcctgagtataccagaaaaaccggatcacacgtgggcttggaggatgagtgcaaggttttattgaatggtggaagtagcactcagcagatggaaacggagccagaaggggtatggagtgggaaggtggttttcccctggagtcaggccgcttagcagccaggctctcctctgaccgccctcagccaaactccgcgttgtcctgccgttctgctgttggtggcctgccggagtctgtcactgtgttcttctgctggtaattcagaggtccgtggggccagccagcctgagcttgctcaccttcaaagtctatgcagcaccaaaaaaggactcacctcccaaaaattccgtgaaggttgatgagctttcactctactcagttcctgagggtcaatcgaagtatgtggaggaggcaaggagccagcttgaagaaagcatctcacagctccgacactattgcgagccatacacaacctggtgtcaggaaacgtactcccaaactaagcccaagatgcaaagtttggttcaatgggggttagacagctatgactatctccaaaatgcacctcctggattttttccgagacttggtgttattggttttgctggccttattggactccttttggctagaggttcaaaaataaagaagctagtgtatccgcctggtttcatgggattagctgcctccctctattatccacaacaagccatcgtgtttgcccaggtcagtggggagagattatatgactggggtttacgaggatatatagtcatagaagatttgtggaaggagaactttcaaaagccaggaaatgtgaagaattcacctggaactaagtagaaaactccatgctctgccatcttaatcagttataggtaaacattggaaactccatagaataaatcagtatttctacagaaaaatggcatagaagtcagtattgaatgtattaaattggctttcttcttcaggaaaaactagaccagacctctgttatcttctgtgaaatcatcctacaagcaaactaacctggaatcccttcacctagagataatgtacaagccttagaactcctcattctcatgttgctatttatgtacctaattaaaacccaagttaaaaaaaaaaatccgaaaaaa

SEQ ID NO: 389204 - DNA, 1197 bp, Homo sapiens
gtctgttcatctgtgcttttatcagctgctgctttgggatagtatttggcctcttaaagcctggattggaatcataccaacctaaatcatcttggcattgacaacaaaacagagttccccttgatatggcaacagggcttcttcagagattcaggatttcacagctcccacccctctgaaactgccttagcaaagattataatagtgtgaaaattatgacagtgaaagaaatctgacctaactggctccatcttgcttttaacctccaagcttccctcgttctttcctcaaagtaggctgaactaactttggaaggaacttatagtttaactgtttaacaacgttgatatcagcccctccccaaaatgaactccctcctggcttgggaagcacagcacctttgtaaaacaaaaaaattagccacaagattagaagttatggcttaagagtcaggcagccagaggccacaagattactaacctccccaattgctcctatagataacatgactgttgtaaaacataagattggtattcaaggtattttttagactctgcattctgatggatcagctggcaccaccaacaccaataaactggttcatctgtcttgtggcccccatctaggaacagacttggcataagaggagagcttcaactccctgtggtttcatccctgacccaaccaatcagcatttcccatttcctagccccctctgcctgccaaactatctttctaaaaccctagcctctgaacttttggggaggctgattcaagtaataataaaactctggtctcctgtttagccagctctatgtgtatgaaactcttcgttgcaattcccctgtcttgataaatcgactctatctgcacagcaggcaagatgaacctgttgggtagttatgcctctgcgtgaccactgatgataagatttggcactcactgaaaggcagtcatcttcaccactctccgactggctcagctattgttaacttctgttgattcctgttggtggcattcctgaaaaaaaatttgtatgctggcatttggaaaattgagaaaatgtgagtggaaggtagagcaaaaacaggtagagaaagaacaattttacttcttaggggtcttgtgttctccaggatattgttgccaatgtgggaactatcagaacagtcctcggatttgattaaaaaaaaaaaa

SEQ ID NO: 389205 - DNA, 331 bp, Homo sapiens
gacagggtttcgccatgttggccaggctggtcttgattgaactcctagcctcaaaccatctaccctcctctgcctctcaaagtgctgggattacagatgtgagcccctgtgcctggcctgttctgtttttaataatactaaattagcaaaacaatttttggatgttatatatttccattttaaagtaaaaataggctgggtgcagtggctcacgcctgtaatcccaacactttgggaggccgaggtgggcagatcacgagaggtcaggagtttgagaccaaactggccaacacggtgaaaccccatctctactgaaaatgtggtgtgtgcg

SEQ ID NO: 389206 - DNA, 523 bp, Homo sapiens
gatcacgtgcattgtgcataagtattatggtttcttacaaagtatgaaaaggtaagggcaatccttgtttaattaaattcaaaatgagtgagcagaacatatgtaaccagaaggacaaatccacccttccctttggtcaagcacatctgtgtgaagagacaacctgaacaggctaagtgtgagcaacaaggctgtttattcactcgcgtgcaagtgagctaagtatgaaaagggagtcagcagagggtggtgggattggagatggttttataggttaggggtaggcaatggaaagttacagttaggggctggattttgcaggtaggggaagaatgtcacaaggtacattatcacaaggttacagagcacagtgtcatgtgtcatgaggttgattgatcagttagggtagagcctgttacaatggtagaatgccccaaggctggctaatcagctaagacaggtactagccgtttttcttcttttgtggttttcctgttgtcccagattttctggctgcaggaca

SEQ ID NO: 389207 - DNA, 245 bp, Homo sapiens
cacgtataggggagggggagggaaatacacagactaaactatctatagggggaggtacacatacatgccaggaggtgtatatggtggaggggaacacacaaccttggctacatattgttgggggtgctcacgctggaatatatatgggagatacgccacctcaggatatacaggcaggtcataacatgctgggatatacgtgggggacagtacacaccaggatatgttggacacacatactggga

SEQ ID NO: 389208 - DNA, 332 bp, Homo sapiens
cagtgtaccctgagatactcagttcattttagttcctctaaagttttgttattaaaaagttactgtaaatgcattgtgtccagagcattatagcatacttttaaaaattattcacttcttaagaattctactcatcccaccctcatcttttgaaaattaacactttacctacatgacttaaaatcatctgaagacttttaataagttgctgagtttcatgtttcaaaacctgttatctactactggagcaattaaaattaaccatacaacaggtaacaggtttaagtgactttgccttggttttaactaagcacaggttttaagtttgtaag

SEQ ID NO: 389209 - DNA, 649 bp, Homo sapiens
acgcaacatcgcggcccatgatcatgccccaattcccctcacctctaaggcagccttctccttgccgcctcccgccttccgagcgtgtgcaactccagttgtccccgggctcccttccagcctcaggaccccatctcacacccgcctctcgcttcccgcttcccgctcgcctgaaccccgccgcctctgctccctgtcttgttccctcagcgtggccccttcctccagccgcgggaagtgggagacgctagcgggagcttcctcctcccggcgctcggaggaaaaggaaagaccaagtagaaagggtcgccgctgcggcacgcgagggagctagtcgccgggctccgcgctcccgcttgcgtccctccagccccctgggcctcgtccggggccggatcttctcgggcaccgcctggtgcgaggagtcaggactgcgacctcaccgacctcctcccatccccagcctgggattgggtgggatatctgggatctctgagcttgggtgtcaaaaaaatattgggggtggcatttatagtcactatcgtccctagcttgagggaggcgacggctgccttccgctcgccgccccccggttttcccggctccgaccctatcctctaacccgtttcctgcttcagctgaccacatt

SEQ ID NO: 389210 - DNA, 872 bp, Homo sapiens
gagaacagtgagtgttctaggcctgtgtagcctaagcgtgcagtgtggatagtctacagtagagtacagtgagtgttctaggccttcacattcacctgccactcgctcattcacggagagcaacttgtagtcctgcaagctccattcatggtcagtgctctacataggtataccatttttatctttcataactttcttttccttcatgagataaagtcatagtctgtcacccaggatggaatgcagtgatgtgatcttggctcactgtagcctcgaactcctgggctcaagcaattctcttgcctcagcctgctgagtagctatgattacagatgtttgccaacatgctgggttaattttttaagtttttctagagttgaggtcttgctatgttgcccagtctggtctcaaactcccggcctcaagcaattcccccaccttggcctcccaaagcattggaatcataggcatgagccaccatgcccaaccttatactgtatttttattgtacctcttctatgtttagataagtgtagatacataaatacctaccattgtattacaactgcctatagtattcagtacaagaacatactgtacaggtttgtagcctaggagcaataggcaatatcatgtagcccaggtgtgtagtagactgtctcatctaggtttgcgttagtgtgtctatgatgttgacacaaggacaaaatcacctaacaatgaatttcttggcaggtgtctctgttaagaagacatgactccagtactctcaggtgtaagctcttttccagtgatgacaccggcactccctacccccatccctctggaaaaagaatgatctaaaatgttatgatttaaagcaaaaggatatg

SEQ ID NO: 389211 - DNA, 423 bp, Homo sapiens
acgatcccttcgaatcgacggttctcagttcgggctgttcgatcttttctcctgatggcactgagatgcacatttctgacaacaccgcagaagtgacaattgtgcccttctcagtgcatcatatgggaaggtacatggtatcagtatgtcttattagtggtgatgttaacttgatcactgggttaaggtggtttctgtcaggcttattcactataatgactgtttttccctttgtaattgtatctgagtatattttgtataactgtgagtcttggagccatagtaatgtttctcatgccccccaaaataattaaagtcaaccaggatatgaggagagttcaaaatgaaatacaaacagtaacaaatgaacttaactgtatttcagatgcataatacaaccacattgaaggaggtgggcaagaa

SEQ ID NO: 389212 - DNA, 233 bp, Homo sapiens
atgccactgctatctcccacaaccctgagaccaagaagacccgtgtgaagctgccctctggctccaagaaggttgtctcctcagccaacagagctgtggttggtgtggtggctggaggtggccgaactgacaaacccatcttgaaggcttgccaagcctaccacaaatataaggcaaagaggaactggtggccacgagtatgggatgtggccatgaaccctatggagcatcct

SEQ ID NO: 389213 - DNA, 2827 bp, Homo sapiens
gaattccggggtggtctgagctggagccacgctttctgttggagggggcagctgaaggagaacagcaagacatatccggcggccctacggactcggagagctggagggaccccggagatctcaaagggacaggaaaggcagcagcagccaccctctctcccagtcaagtggtcaccagcaggactgaaggggacagcccctttgcagtggctcggcgaggagacccctgcaccctagggtcagtgcaggagcccagccgctgagccatgccgggtccccgggcggcctgcagcgagcccaacccctgcacccaggtagtcatgaacagccacagctacaatggcagcgtggggcggccgctgggcagcgggccgggcgccctgggacgagaccctccggaccctgaggccggccaccccccacaacccccgcacagcccgggcctccaggtggtagtggccaagagtgagccagcccggccctcacccggcagcccccgggggcagccccaggaccaggacgatgacgaggatgatgaggaagatgaggccggcaggcagagagcctcggggaaaccctcaaatgtgggccaccgcctgggccaccggcgggcgctcttcgagaagcggaagcgcctcagcgactatgccctcattttcggcatgtttggcatcgtcgtcatggtgacggagaccgagctgtcctggggggtgtacaccaaggagtctctgtactcattcgcactcaaatgcctcatcagcctctccacggccatcctgctgggtctcgttgtcctctaccatgcccgggagatccagctgttcatggtggacaacggggctgatgactggcgcatcgccatgacctgcgagcgcgtgttcctcatctcgctagagctggcagtgtgcgccattcacccggtgcccggccactaccgcttcacgtggacggcgcggctggccttcacgtacgcgccctcggtggccgaggccgacgtggacgtgctgctgtccatccccatgttcctgcgcctctacctgctgggccgggtgatgctactgcacagcaaaatcttcacggacgcctcgagccgcagcatcggggccctcaacaagatcaccttcaacacgcgcttcgtcatgaagacactcatgaccatctgccccggcaccgtgctgctggtcttcagcatctcctcctggatcatcgcagcctggaccgtgcgcgtctgcgagaggtaccacgacaagcaggaagtgaccagcaacttcctgggggccatgtggctgatttccatcaccttcctctccattggctacggcgacatggtgccccacacctactgcgggaagggtgtgtgcctgctcactggcatcatgggagctggctgtaccgcgctcgtggtggctgtggtggctcggaagctggagctcaccaaggctgagaagcacgtgcacaacttcatgatggacactcagctcaccaagcgggtaaaaaacgccgctgctaacgttctcagggagacgtggctcatctacaaacataccaggctggtgaagaagccagaccaagcccgggttcggaaacaccagcgtaagttcctccaagccatccatcaggctcagaagctccggagtgtgaagatcgagcaagggaagctgaacgaccaggctaacacgcttaccgacctagccaagacccagaccgtcatgtacgaccttgtatcggagctgcacgctcagcacgaggagctggaggcccgcctggccaccctggaaagccgcttggatgcgctgggtgcctctctacaggccctgcctggcctcatcgcccaagccatacgcccacccccgcctcccctgcctcccaggcccggccccggcccccaagaccaggcagcccggagctccccctgccggtggacgcccgtggccccctcggactgcgggtgacggccctgcccgccaccagacccctaaatcttggccatcgtgtggccgccacctccgggaagccttgtacagtggcgcctcttggagttcaagaagccgacgctgagtcaggctgagtggactgaggcctgccccgcccagactgcccaggcagagggcagggctggaccatgggtgagggcaggggagcccggagcttcctctggtcacctggtcccccgactctccccaggcccccggtgggcatggagcagcccggggaggggtccgtgctggttctgaataaagcaggacccgcctagtggctgcctgtgtgcatggctggaaggcactggtgatgtcccaggaggtagacctccagccctgggtaccaagatgaatgtgggaatcagaaaaacctgttcccatcaccggcctagcctagaatcctagcctagaagccctctctccctctgggctggagctcagtgagggacaactctctagggacacctgtaccagccccacctggcgctgagatccctcagacagcatggcccagccctggccagaagcatcgctccccttcaaccaaccgcgttgatggacacccactgtgtgccaggccccagcggggcccatgggggaggtgacctgggtgaggaaggtcatttgggtttttgtgagatttgtattgagcacctgctgtctacagagaatgtgatgatgtcaattaccacactgattcctcatcagaacttgaccatggtgggatgggggggaaactgaggcccagagaggtgaatctacctacctgggaccacactgcgaggaaggatggtgcattcaaactggaaatcccctaggccaaagtaaagaaccggactggctgggca

SEQ ID NO: 389214 - DNA, 370 bp, Homo sapiens
aaaaatccgagcctgtggggtttcaggccaggctgacgtcactctctgggggcgcggtggggctgggcagggagcgcggcgcgtgtctgacacccatggctggttccctcccgccctccacagctgttcatggtggacaacggggctgatgactggcgcatcgccatgacctgcgagcgcgtgttcctcatctcgctagagctggcagtgtgcgccattcacccggtgcccggccactaccgcttcacgtggacggcgcggctggccttcacgtacgcgccctcggtggccgaggccgacgtggacgtgctgctgtccatccccatgttcctgcgcctctacctgctgggccgggtgatgctactgcaca

SEQ ID NO: 389215 - DNA, 349 bp, Homo sapiens
tggagatctgaacaaaatagctacctgggcatccaatccctctactgtgaaatgcatgattctccagaccttttccaacacgcatagagctttctgatcgttttagtgcctactcttaagtatgaattgaatcaaaggttgaccagacaattgaagaaattctccatcaaatgagactcaaagaatcagaacaaagtgtaattctgaaggaaaagaggtaagataaacagcagaagaaacgtttacaagactataattaatatattctgatataaccataaaacataaaaggatgctatcaaatagaagattgaccagagaacacaaaagaatatgagcaattgtaaat

SEQ ID NO: 389216 - DNA, 414 bp, Homo sapiens
gaaaagcttaggaccagtgacttcactgaagaattcttgcagccatttaaagaactaacaaaaatccttctcaaactcttgcaaaaaatttagaacaaacctccaaattcatttcagaagtccagcattaccctgataccaaaatcaggcagatactttaagaaacgaaaactacaaaccaatatccctgatgaatgtcgatgcaaaaatcttcagcaaaacactagcatgcttaattcaacaacacattaagagttacaccaattacttttagaatgcaagaagatggttcaatatatgaaaatcaaattaagacatcacattaacaaaataatggacaaaaaccacataggccaggggcagtggcttcatgcctgtaattccagtactttgggagcccgaggtgggcagatc

SEQ ID NO: 389217 - DNA, 300 bp, Homo sapiens
tctctttaaaaaatagtcaatttcatgagagttattgaggattaaatgggataatccataggaggtgcttagaagagcttttggcaaataatcagtccccattaaatgttagctgcccagctgggcgtggtggtgtatgcctgtaaacagcagtttgagaggccaaggtgggaggattacttaagcccaggagtttgagaccagcctgtgtgagattgtctttataaaaaaattttttaaaaattaggtgggcatggtggcatgcatctgtagtcctagctacttgggaggctgaggtgg

SEQ ID NO: 389218 - DNA, 230 bp, Homo sapiens
ccaactgcatttgtgagacagcaaaaagctatggtccagtctccttccattgtatcatctcatcaatgtatttctcccactacccttgtgtgaaatacaaacttttttggcttattgtgattatgcaaggtgtatgccaacttttttttttctccacatctttcagctttctgatgggtaaaaattttccttattttgctttagaaaaattctcattggcatagatctaa

SEQ ID NO: 389219 - DNA, 429 bp, Homo sapiens
cttttcctgcttctcctctagctcctccacttcttcctcctccctcttacccttcctctccttcttctcagaccttttcgtccaagaaagtcttaccaggaggctcaatgtgaacaagagattaaaaacagagctgctctgctggaggtggggtggggagcctgaagacttcttcatctgcctctcaccacatcccccctcctggcacctgaagaattctgcagagaccagtttccaagggctgtgtgggcagagtgtgcatgttcaggcatgcatgcctgtttgcagatggtatggagaaaaaggtgattgtattgttcataaaaatgtaacttgctcaagtatacgccccctttctttctaaattacttgctttgatattctgggttccctagaacttagattgaaatgtcatccaacaactatttg

SEQ ID NO: 389220 - DNA, 285 bp, Homo sapiens
gatagagaaaggagttcaagatggtggcccctttggtcaacaatgaggccaacctgacaatgagactaacctgctgagtttccaggttagaaaaattaggctgttaagtaagttaggtgagggctagattgtaaaggtttataataaaccatgctgatgactttacctttttgtgatttagaacagtgtagtgtagcagtatgaactgatatggtgaaaaagatgggtgacaagaagacttgattggaagactataccaattaattgggtgtttttgtttttgag

SEQ ID NO: 389221 - DNA, 310 bp, Homo sapiens
tcatgcctgtaatcccaacactttgggaggccgaggcgggcagatcacctgaggtcaggagttcgagatcaaccgggccaatatggtgaaaccgtgtctctactaaaaatacaaaaattagctggacgtggtggcatacccctgtaatcccagctactcaggaggctgggtcaggagaatcgcttgaacccagggggcagaataagaccctgtctcaaaaacaaacaaaaaaatttaactattctagaaaaactcaatgctaataaatagctgaactacagtttatctttcataagcaagagacagacac

SEQ ID NO: 389222 - DNA, 719 bp, Homo sapiens
ctcttgaacccgggaggcagaggttgcaatgagccaagatcgcgctactgcacttcagcctggtgacagagcaagacttcatctcaaaaacaaaacaaaaaacaaaacaaaacaaaattagccgggtgacgcatgcgtgtaatcccagcaacttgagaagctgaggcaggagaatagcttgaacccgggaggtggaggttgtagttagccgagatctaaaaaaattttaaaaaaaaagagtggatttggagctacgagacaacagctgaatagctatactctgacataagaatttaatttcttgaaatttattcaatggaaataattacgaatgtttgtaagtgatgttctccacagcattatttataaagcagtgcagtgaaaataataaaaacaactggccgggctcagtgactcacgcctgtaatcccagcactttgggaggctgaggcaggaggatcacctgaggtcaggagttggaggcttagtctggccaaaatggtgaaaccccgtctctactaaaaatacaaaaaaatttagctgggcgtagtggtgcacacctatagtcccagcttctctggagtctaaggcagatgaatcacttgaatcagggaggcagaggttgcagtgagccaagatcgtgccattgcactccagcctgggctacaagagcaaatctccatctcaaaaaaaaaaaaaaggaatgtagggaaggacat

SEQ ID NO: 389223 - DNA, 350 bp, Homo sapiens
tttcattttcttttttaggtaacaaaagacattttggctacttaaaaatgggaaggtatttactttttttaaaagtaaagaggccaggagtggtggcttatgcctataatcgcagtaccttgggaagctgaggtgggaggatggcttgagatcagcctgggcaacacagtgagacccccatctctacaaaaaataaaattagctgggtgtggtggcacacgcctgtagtccagctgcttgggaggctgaggtgagtattctattgctggagcctgggaggttgaggctgcattttgctgtgatcttgacactgcactccagtctggatgacaaagcaaaacctcctctga

SEQ ID NO: 389224 - DNA, 468 bp, Homo sapiens
aaatcaggggggcttgcagccatgtaaggatggcttttgcatgctaataaagggcaaagatgtggctagaatggggcgagccatgctgtcacctgggacatgctaaaaaactcattaatctaacgggtgcgatggctcacacctgtaatcccagcactttgggagcctgaggtgggcggatgacttgaggtcaagagttcgaaaccagcttggccaacatggtgaaaccgtctctactaaaaaaaaaagaaaaaaaaaaatcagctggtcatggtggcgggtgcctgtaatcccagctactcaggtggctgaggcaggagaatcgcttgaaactgggaggcggagattttagtgagcctagattgcaccactgcactcctgcctgggctacagagtgagactccatctcaaaaaaaaaaaaaaaatttccttgattggcattggtttacaatttcaaaataatttcgc

SEQ ID NO: 389225 - DNA, 1150 bp, Homo sapiens
gtggggcttctcggcccgaggcagaggaacagggaagatggcggctgtggtggagaatgtagtgaagctccttggggagcagtactacaaagatgccatggagcagtgccacaattacaatgctcgcctctgtgctgagcgcagcgtgcgcctgcctttcttggactcacagaccggagtagcccagagcaattgttacatctggatggaaaagcgacaccggggtccaggattggcctccggacagctgtactcctaccctgcccggcgctggcggaaaaagcggcgagcccatccccctgaggatccacgactttccttcccatctattaagccagacacagaccagaccctgaagaaggaggggctgatctctcaggatggcagtagtttagaggctctgttgcgcactgaccccctggagaagcgaggtgccccggatccccgagttgatgatgacagcctgggcgagtttcctgtgaccaacagtcgagcgcgaaagcggatcctagaaccagatgacttcctggatgacctcgatgatgaagactatgaagaagatactcccaagcgtcggggaaaggggaaatccaagggtaagggtgtgggcagtgcccgtaagaagctggatgcttccatcctggaggaccgggataagccctatgcctgtgacatttgtggaaaacgttacaagaaccgaccaggcctcagttaccactatgcccactcccacttggctgaggaggagggcgaggacaaggaagactctcaaccacccactcctgtttcccagaggtctgaggagcagaaatccaaaaagggtcctgatggattggccttgcccaacaactactgtgacttctgcctgggggactcaaagattaacaagaagacgggacaacccgaggagctggtgtcctgttctgactgtggccgctcagggcatccatcttgcctccaatttacccccgtgatgatggcggcagtgaagacataccgctggcagtgcatcgagtgcaaatgttgcaatatctgcggcacctccgagaatgacgaccagttgctcttctgtgatgactgcgatcgtggctaccacatgtactgtctcaccccgtccatgtctgagccccctgaaggtaagttgcccaga

SEQ ID NO: 389226 - DNA, 1522 bp, Homo sapiens
ctaagaaggaagcaaggggatgaaagtgctggtgaaagattaaagaatctctctgattatagctagataagaaaataggctaaggaagttgtgataaactggtcaagccaggcgcggtggcccacacctgtaatcctagcactttgggaggctggggtgggtggatcatgaggtcaggtcaggagtttgagaccagcctggccaacatagtgaaactccgtctctactaaaaatacaaaaaattagctgggtgtggtggcgtgcgcctgtaatcccagctaccagggaggctgaggcaggagaatctcttgaacccgggaggcagaggttgcagtgaggcaagattgcgccattgcactccagcctgggcaacgagcaaaaccctgtctcaaaaaaaggaacagggaagatggcggctgtggtggagaatgtagtgaagctccttggggagcagtactacaaagatgccatggagcagtgccacaattacaatgctcgcctctgtgctgagcgcagcgtgcgcctgcctttcttggactcacagaccggagtagcccagagcaattgttacatctggatggaaaagcgacaccggggtccaggattggcctccggacagctgtactcctaccctgcccggcgctggcggaaaaagcggcgagcccatccccctgaggatccacgactttccttcccatctattaagccagacacagaccagaccctgaagaaggaggggctgatctctcaggatggcagtagtttagaggctctgttgcgcactgaccccctggagaagcgaggtgccccggatccccgagttgatgatgacagcctgggcgagtttcctgtgaccaacagtcgagcgcgaaagcggatcctagaaccagatgacttcctggatgacctcgatgatgaagactatgaagaagatactcccaagcgtcggggaaaggggaaatccaagggtaagggtgtgggcagtgcccgtaagaagctggatgcttccatcctggaggaccgggataagccctatgcctgtgacatttgtggaaaacgttacaagaaccgaccaggcctcagttaccactatgcccactcccacttggctgaggaggagggcgaggacaaggaagactctcaaccacccactcctgtttcccagaggtctgaggagcagaaatccaaaaagggtcctgatggattggccttgcccaacaactactgtgacttctgcctgggggactcaaagattaacaagaagacgggacaacccgaggagctggtgtcctgttctgactgtggccgctcagggcatccatcttgcctccaatttacccccgtgatgatggcggcagtgaagacataccgctggcagtgcatcgagtgcaaatgttgcaatatctgcggcacctccgagaatgacgaccagttgctcttctgtgatgactgcgatcgtggctaccacatgtactgtctcaccccgtccatgtctgagccccctgaaggtaagttgcccaga

SEQ ID NO: 389227 - DNA, 1181 bp, Homo sapiens
ggcggtacggtcggaattttgggatagataggggccgtgcgtgcgcgcaatgtatctcgaacgctcctatggtgtagcattgaagttcaatatgatgtcatggcatgcagctgtgcaccagtttggacgttcgcctctgtcgcctgaagggcacgttctgacgccatgagcattcacttgcgactcatcggaacgcgtcacgtagacctagcatccacattgttaccatctgtgatggataaagcgacactcggggtccaggattggcctccggacagctgtactcctaccctgcccggcgctggcggaaaaagcggcgagcccatccccctgaggatccacgactttccttcccatctattaagccagacacagaccagaccctgaagaaggaggggctgatctctcaggatggcagtagtttagaggctctgttgcgcactgaccccctggagaagcgaggtgccccggatccccgagttgatgatgacagcctgggcgagtttcctgtgaccaacagtcgagcgcgaaagcggatcctagaaccagatgacttcctggatgacctcgatgatgaagactatgaagaagatactcccaagcgtcggggaaaggggaaatccaagggtaagggtgtgggcagtgcccgtaagaagctggatgcttccatcctggaggaccgggataagccctatgcctgtgacatttgtggaaaacgttacaagaaccgaccaggcctcagttaccactatgcccactcccacttggctgaggaggagggcgaggacaaggaagactctcaaccacccactcctgtttcccagaggtctgaggagcagaaatccaaaaagggtcctgatggattggccttgcccaacaactactgtgacttctgcctgggggactcaaagattaacaagaagacgggacaacccgaggagctggtgtcctgttctgactgtggccgctcagggcatccatcttgcctccaatttacccccgtgatgatggcggcagtgaagacataccgctggcagtgcatcgagtgcaaatgttgcaatatctgcggcacctccgagaatgacgaccagttgctcttctgtgatgactgcgatcgtggctaccacatgtactgtctcaccccgtccatgtctgagccccctgaaggtaagttgcccaga

SEQ ID NO: 389228 - DNA, 1170 bp, Homo sapiens
  misc_feature (12)..(12): n is a, c, g, or t
  misc_feature (15)..(15): n is a, c, g, or t
  misc_feature (22)..(23): n is a, c, g, or t
taacgttggtcnccncgggtannggatatcgcgaccaggcgctcgggaacagggaagatggcggctgtggtggagaatgtagtgaagctccttggggagcagtactacaaagatgccatggagcagtgccacaattacaatgctcgcctctgtgctgagcgcagcgtgcgcctgcctttcttggactcacagaccggagtagcccagagcaattgttacatctggatggaaaagcgacaccggggtccaggattggcctccggacagctgtactcctaccctgcccggcgctggcggaaaaagcggcgagcccatccccctgaggatccacgactttccttcccatctattaagccagacacagaccagaccctgaagaaggaggggctgatctctcaggatggcagtagtttagaggctctgttgcgcactgaccccctggagaagcgaggtgccccggatccccgagttgatgatgacagcctgggcgagtttcctgtgaccaacagtcgagcgcgaaagcggatcctagaaccagatgacttcctggatgacctcgatgatgaagactatgaagaagatactcccaagcgtcggggaaaggggaaatccaagggtaagggtgtgggcagtgcccgtaagaagctggatgcttccatcctggaggaccgggataagccctatgcctgtgacatttgtggaaaacgttacaagaaccgaccaggcctcagttaccactatgcccactcccacttggctgaggaggagggcgaggacaaggaagactctcaaccacccactcctgtttcccagaggtctgaggagcagaaatccaaaaagggtcctgatggattggccttgcccaacaactactgtgacttctgcctgggggactcaaagattaacaagaagacgggacaacccgaggagctggtgtcctgttctgactgtggccgctcagggcatccatcttgcctccaatttacccccgtgatgatggcggcagtgaagacataccgctggcagtgcatcgagtgcaaatgttgcaatatctgcggcacctccgagaatgacgaccagttgctcttctgtgatgactgcgatcgtggctaccacatgtactgtctcaccccgtccatgtctgagccccctgaaggtaagttgcccaga

SEQ ID NO: 389229 - DNA, 1564 bp, Homo sapiens
ctaagaaggaagcaaggggatgaaagtgctggtgaaagattaaagaatctctctgattatagctagataagaaaataggctaaggaagttgtgataaactggtcaagccaggcgcggtggcccacacctgtaatcctagcactttgggaggctggggtgggtggatcatgaggtcaggtcaggagtttgagaccagcctggccaacatagtgaaactccgtctctactaaaaatacaaaaaattagctgggtgtggtggcgtgcgcctgtaatcccagctaccagggaggctgaggcaggagaatctcttgaacccgggaggcagaggttgcagtgaggcaagattgcgccattgcactccagcctgggcaacgagcaaaaccctgtctcaaaaaaaggaacagggaagatggcggctgtggtggagaatgtagtgaagctccttggggagcagtactacaaagatgccatggagcagtgccacaattacaatgctcgcctctgtgctgagcgcagcgtgcgcctgcctttcttggactcacagaccggagtagcccagagcaattgttacatctggatggaaaagcgacaccggggtccaggattggcctccggacagctgtactcctaccctgcccggcgctggcggaaaaagcggcgagcccatccccctgaggatccacgactttccttcccatctattaagccagacacagaccagaccctgaagaaggaggggctgatctctcaggatggcagtagtttagaggctctgttgcgcactgaccccctggagaagcgaggtgccccggatccccgagttgatgatgacagcctgggcgagtttcctgtgaccaacagtcgagcgcgaaagcggatcctagaaccagatgacttcctggatgacctcgatgatgaagactatgaagaagatactcccaagcgtcggggaaaggggaaatccaagggtaagggtgtgggcagtgcccgtaagaagctggatgcttccatcctggaggaccgggataagccctatgcctgtgacaatagtttcaaacaaaagcatacctcgaaagcgccccagagagtttgtggaaaacgttacaagaaccgaccaggcctcagttaccactatgcccactcccacttggctgaggaggagggcgaggacaaggaagactctcaaccacccactcctgtttcccagaggtctgaggagcagaaatccaaaaagggtcctgatggattggccttgcccaacaactactgtgacttctgcctgggggactcaaagattaacaagaagacgggacaacccgaggagctggtgtcctgttctgactgtggccgctcagggcatccatcttgcctccaatttacccccgtgatgatggcggcagtgaagacataccgctggcagtgcatcgagtgcaaatgttgcaatatctgcggcacctccgagaatgacgaccagttgctcttctgtgatgactgcgatcgtggctaccacatgtactgtctcaccccgtccatgtctgagccccctgaaggtaagttgcccaga

SEQ ID NO: 389230 - DNA, 613 bp, Homo sapiens
aaagaataaaataaggatgtgtctgttataagataaaaagaagcttagttcttgaagtcccaaaggaggccagagcaagtcttagtctaggctcaaatatcctaaagcaatgattctcaaactttaacctgcatcagaatctcctggagggcttgttaaaacacaggctgctggactctgtctccataatttctaattcagtaggtctgggatgaggccccatgaatttgcatttccaccaagttcccagctcatgccataggtccaaggatcatacttccagaatcactgccttaagctctagaatgctatttcagctaccaaatatgaacacttacaatataccacactctatgctgagtgtactgagatgggtgagactcagttcatgcccttgaggagctcatagtctaggtggggaaacaaacatacacacacatgaatatatttatttgttgagaacagataagtaaacacagcatcggtgttctttctctggacctcagtttccctcctcatatcccaggcctctactagtgccattcattctactcactgtttcagcaggagagctgttcccagattatagttgataaggaaccttgagggatat

SEQ ID NO: 389231 - DNA, 857 bp, Homo sapiens
catgattatagctgaagaatctagatatttatgcttttaattgatggacatccactctatctcaaacaaagcaaacaaaatgaataaaagctgactctgtctcaaacaaagcaaacaaaatgaataaaagctgaccagaaagtgacactgggatctgatctaactgaggaccatcaaggtcaccctgaagtaacctatatcctctggcatcaagaacatcctcaattcctgaggggcctcagggcttcagaataatccaaggattactggtctagagccagggtagaattctcataggtgaaggactgcaccatttgaagaggtctttttctcacaccattaagtaccatgccaagttacttttttccctcttacttttcccatgctttcacgttatcaacacatggcagaggtacaaaagtgacttaagtcttaatgttcaattcagcagttctgaaaaacagattgcctaggacttgctatgtgaccttgactagtcctcaactgatccattaacttaataaatgtcttttatcatcactagggaaagggtaattagtcatcatgaaacactttattacaaagtactacgtaaatgctaaagaataaaacttagaagagaaagattaataagaaacacggtggggcacatttactggtaaatggaaacttaaaacagggtcttcccacattcctggcagagcctgcttcttttagctaatgcaatataagtctaaaatcatcagcacttggcctgacaataatacacattagtaatattcctcctgggaagaagagaggaaaagggatagttattcatggtaggtggccacatggacatctcagttactagttag

SEQ ID NO: 389232 - DNA, 422 bp, Homo sapiens
ttcagtccataacaggcatgctgcatttcccccggttaggtgcttttttccctggatgggtaatcccctacgcgtgcagcagggatgatcttctctgactagctcattcatgatactcaactgttagacatattttcttgacacggagagtttcttagatttcgttcgcaggcctttgctttgaaatctctctcgtctggtttctgtggtttctgtcttgtcagctcatcccttcaatctctctctctacttagcccctctacaagggcagcgtgttcagcatttgatttagcttcttccagatgctgcctcttgagcaggtcctttccctctgtgctctgcagcctgaggataactcgtacagccctaggctgtgtctaccactggcttggttgaggaccttgacagtcaagagagctggg

SEQ ID NO: 389233 - DNA, 363 bp, Homo sapiens
taggtcagttaaaccatttctaatatgtggcagataacaatctgtgctcagatttacagataagctattctgggattatttcgaaaggtaatgctcttttgggtggaggacttcaagattaatttgtgtactaattaacaagttaaagatcataccagaacagtgatctttaagcacggacctgtagtggtcaagaaagtaacacaggcatttccagtattaatgccagatattttggtttatactccttgaaagactgcctgaatttcaggctgtgtagaactgactcatcctggaatctaggcctacatattgcatatcaggaggtgcaatatgaaaataaagtcaaagcaagggcccagg

SEQ ID NO: 389234 - DNA, 354 bp, Homo sapiens
ctacagttctggtattcatatttgtttcagtcagctaatgttggactctgttagcacagctgtttggaatttaaacttttcaagaattctttcatccttattattcattcctgttttattcttggatatcctaagtgcatacccagactaatgataatatcaacacttgttcagtatggttggtcatttttaaaaataaacaggcaatttatgggtgacccacacaaagaacagctgctgccatcactcacgccctctccattgttgatggcctctgcaactgacattgtcccaagcagctgctgacagagctgccagtacctgtttccacgtccaacctttattctattcgtt

SEQ ID NO: 389235 - DNA, 482 bp, Homo sapiens
agtttaagaaaacttgtatctactaccatggcttgacagcttcccaatattaacatcttctgatgagatcagtggtaattttaatgtgatgttttacattttgggttaaacgtatcaacatttgaaatatctacataactcggtgaaacaatttctctgatatatatataacaaagtcatgtatgggtaaaagatccattcaaattgtaatatatactaatggcttttaagtaacatggtccaacaagtcctctgaaatggtttcagatcggaaataacatttaagaaatttccacatgtcaagtttgggagtataaaggaaaatatccacaactttctgaaaaacattacaaaaaaatcctcattttccaactacaaatttgtataaggccagataattttcatatagtttgaccaaaataaatattgcaaaagactaaatgcataaatggatataagtatccatctgtcttctattaggc

SEQ ID NO: 389236 - DNA, 981 bp, Homo sapiens
gcgcggcagcccgcgcagccggtgactgggggactgggtttggagtaggacctgcggcgtgctcgagactccgacttcggtcttgcggcgcgctcgcgcccgcgggccatgccccactgactctaagtgggcactgccccggctccgggagggcgagaccgagcgccggccatgggaagcttccagctggaagactttgcggcgggctggatcggaggtgcagccagtgtcatcgtcggccaccctctggacacagtcaagactcgcctgcaggctggcgttggctacggaaacaccctcagctgcatccgcgtggtgtacaggagggagagtatgttcggcttcttcaagggcatgtccttccccctcgccagcattgccgtctacaactccgtggtgtttggggtcttcagtaacacgcagcggttcctcagccagcaccgctgcggggagccagaggccagtcctccccgcacgctgtcagacctgctcctggccagcatggtggccggcgtggtctctgtcgggctgggagggcccgtggacctcatcaagatccggttgcagatgcagacacaaccgtttcgggacgccaacctcggtttgaagtccagggcagtggctcctgcggagcagccagcataccaggggccagtgcactgcattacaaccattgtgaggaatgagggcctggcggggctataccggggggccagtgccatgctgctgagggatgtcccaggctattgcctctacttcatcccctacgtgttcctgagtgagtggatcacacctgaggcctgcacaggccccagcccctgtgccgtgtggctggcgggcggcatggcaggtgttttccagaggcatcactgtgaacgcggtgcgggggttccccatgagtgcggccatgttccttgggtacgagctgtcgctgcaggctatccgcggggaccacgcagtgacgagcccataagcgccagg

SEQ ID NO: 389237 - DNA, 723 bp, Homo sapiens
gcgcggcagcccgcgcagccggtgactgggggactgggtttggagtaggacctgcggcgtgctcgagactccgacttcggtcttgcggcgcgctcgcgcccgcgggccatgccccactgactctaagtgggcactgccccggctccgggagggcgagaccgagcgccggccatgggaagcttccagctggaagactttgcggcgggctggatcggaggtgcagccagtgtcatcgtcggccaccctctggacacagtcaagactcgcctgcaggctggcgttggctacggaaacaccctcagctgcatccgcgtggtgtacaggagggagagtatgttcggcttcttcaagggcatgtccttccccctcgccagcattgccgtctacaactccgtggtgtttggggtcttcagtaacacgcagcggttcctcagccagcaccgctgcggggagccagaggccagtcctccccgcacgctgtcagacctgctcctggccagcatggtggccggcgtggtctctgtcgggctgggagggcccgtggacctcatcaagatccggttgcagatgcagacacaaccgtttcgggacggtgttttccagaggcatcactgtgaacgcggtgcgggggttccccatgagtgcggccatgttccttgggtacgagctgtcgctgcaggctatccgcggggaccacgcagtgacgagcccataagcgccagg

SEQ ID NO: 389238 - DNA, 1201 bp, Homo sapiens
gcgcggcagcccgcgcagccggtgactgggggactgggtttggagtaggacctgcggcgtgctcgagactccgacttcggtcttgcggcgcgctcgcgcccgcgggccatgccccactgactctaagtgggcactgccccggctccgggagggcgagaccgagcgccggccatgggaagcttccagctggaagactttgcggcgggctggatcggaggtgcagccagtgtcatcgtcggccaccctctggacacagtcaagactcgcctgcaggctggcgttggctacggaaacaccctcagctgcatccgcgtggtgtacaggagggagagtatgttcggcttcttcaagggcatgtccttccccctcgccagcattgccgtctacaactccgtggtgtttggggtcttcagtaacacgcagcggttcctcagccagcaccgctgcggggagccagaggccagtcctccccgcacgctgtcagacctgctcctggccagcatggtggccggcgtggtctctgtcgggctgggagggcccgtggacctcatcaagatccggttgcagatgcagacacaaccgtttcgggacggaggtgaacacaggatgactacagtgttccctgggcctcatctctgcatgtgaagccctgagagctgcagatgtttggcctttggacctccaagtggacatcaattagcaagcgtgggctaggatggtgcagacactgacgtggcccttctgatgcctgggatgcctcatgagtcactgattcaagccctccaaggttctgatccccaatgcccactctgctaggctggcatcaaagagctttcccaagaaaatgtttggtcccagctgagaaagtcctgaccatgagcaccagggagccagaaaccacccagagaaacgttgcttcactcctctgtctgaggatggggaggggccagtgagctctgggctcagccactccctccagtctcaagtaacacgtccccgtgcctccagtctcctctcagcaccgaccaggtttttccccgctcctgcacccgtggatcctgaggacagcggtagcgccttcctcaccgcacgctgagtccagtgcgtgctcctcactgtgcacttattagtgtctgttgagtgattaaatcacatcctcaggtctgcagcaaataaatgaaagtttctttattttttatta

SEQ ID NO: 389239 - DNA, 721 bp, Homo sapiens
actgccaagacatcagtgaaaagtctgtatgaagtggatccaaattattagcctgcctaccactccttgtgcgtctcatcaattgaacccatccctagaccaagggccctttaggtgaagaaccagcccagaagggaaagagaaaagagtagaaccaatggacctccagatgggagcggcggtcagtgagtagtttagagccaggtacatgttagcaccctggatacgtgcacatgccctgatctttgcttcccatctgtgaacttcaacacccacgtggctttttcttatatcctttaaatacatatctgacttagtatcacctcataaaagataaagaatcatagtgaagcagaaacaagccacagaccagtgtacactcaaactgaaatcctctttttcccaccctctccctcaagaaaacatccctgccgacttgagcagtatgatggccatagcgaagcagagtggcccccagggatcccactctgtcctcgcacacgcgcacacacgaagagcaaatgaagcggatccaaggagtgatgacaagcgctgcacaggaatgtttgccaaaactcttctgggggatccgagtgctctaccaaggacatgagtatgccctgaatttctgcagctaaggccatatagtctggtgaccaagcatttggttcctagcttcagtctttggttcaaatccctgcttggcaacttactaccacac

SEQ ID NO: 389240 - DNA, 436 bp, Homo sapiens
ctcctttgagcctagggccacactgttcattgtcactttaggcaagtgcctgtttggctttaaaggtaagcctgccagctgtgagaagccttggtaactgatggactcatttcctggtccttaaagatgcagcctcttaagggctccttgatggatgccatctctcctagcccccagccctggtgccactggtgggcaggttcccattctttggggctgggagggacagcttgcctgtttctggtcacaaattacagtcttctctcctgtaccattctgtggcttcagccatgggggcagtacccttcattagtgtagatagtcattccctggtagggtggagggtaagagatagggtctggaactgtttgggacttttggggatgtcctgtgcctcccagattcctcgattctgggaggagaggctgccgcattc

SEQ ID NO: 389241 - DNA, 657 bp, Homo sapiens
ggagggctttgggcccaggccctggccagccctgcctcagaggttccagggactggctgtccactggatgggtgtgcaaggctccagctagtgtcaggccagagaattttgcagggacaggaaggctgtgaaggtgcaggtggcgtgggcggagtcagacctaaccttgagtgacacctgctagttggtgccactcaacttccgaggctcagcaccctcatgtgggaaatgggactcccacactggcctcaccgggtaactcaggggactcaggaagtactgcatgtgagagcagtcccaggcccccgatagtggcaatttatgattgtggcttcacttttaggctagggcctttttgcagcctgatgtgaggcccaggaagagataaaggggaaaagacaggccagagcctcatcggatggcagagctggggcaggaagagctcagggagccttggggccatcccccttgttttacagacaaggaccctggataaaatgtttaccaagaatcacacaaattgtaagtggtagggccaggacacagacagggagtgtggttccaaaggcctatgctttccagtcaactatgctgcgtgcacagcctcccacccaccgccaacccagctgccctctgctcactcgctcaacagatgtt

SEQ ID NO: 389242 - DNA, 215 bp, Homo sapiens
tctcctgtttttcttaggatttttttataaggggacagccacataatgtgtttttaatatttgttgtaaatatttattaagaatcctgtttacttgcctccataactctaagttgttcctctttaatttttccttattttagttgctaaggcaactgttttgactactgtgacagttttcctgcccaagaaagttactttgagtgaccacccact

SEQ ID NO: 389243 - DNA, 515 bp, Homo sapiens
ttccacagtgcctatgtgccacattttcttaatccagtctatcattgacggacatttggattggttccaagtctttgctattgtgaatagtgctgcaataaacatacgtgtgcatgtgtctttatagcagcatgatttataatcctttgggtatatacccagtaatgggatggctggatcaaatggtatttctagttctagatccttgaagaatcaccatgctgtcttccacaatggttaaactaatttacagtcccaccaacagtgtaaaagtgttcctatttcaccacatcctctctagtacctgttgtttcctgactttttgatgatcgccattctaactggtgtgagatggtacctcattgtggttttgatttgcatttctctgatggccagtgatgatgagcattttttcatgtgtctgttggctgcgtaaatgtagaagatacacattttttaaataaagttcactatggcattttccatattcttattagaaaataaaaatggtgctg

SEQ ID NO: 389244 - DNA, 380 bp, Homo sapiens
catgaagcagagcattgtatgttcctcatggggtcttaggtagcttagaggggctggagttatatagcaacctgcattttagttcactttgtggctacatgaatttagatctaagaaatgaacagaaactattttggtaatgctttagaccaacagcaaggaattattttacgtttagaacaataaaaattagaaaaagagtaaagtagcaattgagggattaggaaaattgctccagcaaataatagcttaatacagctccccaatattagaattacatcaagtatttatatttttgaaagcatgatgaaagtttttccccgctggccacatgtatttatgctttttaatttgaaagccaagacttgcttttcttaaaa

SEQ ID NO: 389245 - DNA, 740 bp, Homo sapiens
aaagtagtagtccaaaatgtctggaggatataagcagaagttggagatgaccctagaaagataagctggtacccaaaccatgaaaagccttatatgccattacactagatggcagcagggcccatgtctatcttgttcatcattgtacctctagtgcctagtataatgcctgacacataaccagtactcatttaatgaatatttagtatactatatatagcaggcagtgggaaggcaactgacatttttaagaagtggaaagacatgatgggaaccatgttttaaaaagataggtggggcagtatgaagaatggatgaggcgagacaagaagactttaaggaccagtaagagggctattgcactatcaaggaaaaacgggagatcccaacctaagaagctgcagaagaagtcaacagagggaatgatgaacacattacggagaaaaaatcaaacgtctctggttaccattgaaatggggggttgagtaggagtacggatgggaggagaggtaagggagaagtcacagaagagtacaaggtttccagcttctacaaccaggtaaaaggtgactctactcactgaaattagaaagcagacaaatggcagataaagcaggatgaggaacttggctttgcccaagttgattctgagtgacaaacatcagagaacaatgtctcaccgtctctttcagctgcactaccttctgccttaccacttccaatcaatgtacttgagagat

SEQ ID NO: 389246 - DNA, 707 bp, Homo sapiens
atagcatgatggcttttgttttacctgtttgtgtggacctgtaaaacgttttaagatgagagctataaaaggaaaagcaggatggtggtgccacatcacaaagcaattttaatctgctagataccttgagaggaaaccatagtccaagataaaggtaaaatcactagaaaaattgttttcctgatttttgtgtttttgctcttataccttttggttgaatctctccaataagatggaaaaacacttaatagtgctaaataccatattttcttcatctctccaaggtaaacttcagatagaatttcttttttttccctacacaaaactgtccttcatactacctcctttccctgatgttctaatctatacataggccacgttctactctctgatgtagacaagcaagagacttggcaccttgaaatttgaatagaaacccaaagagcccatgttgttgagctgctatttatgtcctgttcatttacatggtagttttgtgatattccttgttgctttcacagaaaggtttctcaggctatttcataccaacatgaacttatctggggggtttgccacgcttactggctcttgactccctctttttttaaaacttttattttaggtttagaagtacatgtgtaggattgttagatagataagctgcatgtcacaggggtttgcaacatgcacattatttggttacccag

SEQ ID NO: 389247 - DNA, 447 bp, Homo sapiens
gctgggattacaggcgtgagccactgcgcctggcacactcttgctttaaactcgaagagacaaattcataaaagctcaggagctgtcccagtgttaggtagctgttttgttgccacgctggagcacagttttgccatgctggagcacagtttagttagaaccattccagatacttgaaaactaggtgttgccgagaaataatctactttgctaattacagactagtttttttcagtcatcaggacaaaaggttctgggtcttgaaaaagccgttttgctagttgagtattactttggagtagagaggcgtccctcactgcagctgctgcacctggagcagtgtccaaccagtcacacccagagcccctggtccaagccgatattctgtgcatctgccttctgcagcaaccttgagattgtggtggatgcccccctagtggcttcttc

SEQ ID NO: 389248 - DNA, 261 bp, Homo sapiens
cagaaaaagcgaaaacaataaccagaggttagtaagaggtagaataaaccaggataacattacagaaatgaaaacgcaatctgcataaccatcactcagacagacaattgaaatgctctacaggttcaccagagacagcaaagatggggttggggagtagggcagagggggacgcgcagaccagggacagagccggcctcctcagagccaagtcagcagagcagggcaggggcgcatcagacttgacaaagcacaggcaac

SEQ ID NO: 389249 - DNA, 117 bp, Homo sapiens
  misc_feature (6)..(6): n is a, c, g, or t
accacngagcaggtccgtgccttggagggcgtcttccggcaccaccagtacctgggccctctggagcggaattggctggccagggagatgcagctctcagaggtccagataaaaacc

SEQ ID NO: 389250 - DNA, 394 bp, Homo sapiens
taagcccactgtggtttccttcaaaccctgcaggatttctttcatgccatgaatatgtagtttttggaatttctgtagtgaatttaactgtttattctgctttgtggatagcatactcgtgcctggggaacatgggtcttgagaaatgtgaagctggatggtggcaaaccattagtccttggcttctaggctgtggatacatggctgcctctgatttgggggatttcctgtatattgcctcatttctagttaaggattcaagttgacagacacttagttttaggttacatctatcattgaaatgtggggtaactgaaaagccaaccagaaaggagtgtgcttcctccccaggtgtggtttccctgggggcgagggatgaggctggtggcaaata

SEQ ID NO: 389251 - DNA, 715 bp, Homo sapiens
cagtcttttagtttttttacccatacccaatttaaccactttttgactggggatgggttgaggggagcaactagctttttttttaaagtatttctaatgcattcaacctagctttcaaataaaaccagaagtcttttacactcacagtttatggactgctgaatatttaactaaattacataattaccctaagtaaaacaaacaggttcaatgaccactgccactagccttttgtaagcatgcagctgatcatctgttgggacaaaagcataaggttggttagagaatagcctcctagccagtcttctaccatgtgataagtaagtatgcctatcggctagttttactaggtaaaaattggttaagaggtattgtatgtgcgaaacaccatgtaaattactctacttgcattatctcttttaatcttcacaacaaccctaatacataattatgttaatgtttgtgttttgcctttgagaaaacaaacataaagataagtgttttacataaagttacatagctaataaaaggaccaggatgggaacctcaggcattctaatatgtgctttaccatttcatcacaagtccaaggccataaaggttaatttgctacagagcactaagctccagtttggtccatgatcacaaactgtaccttggaatcttgacctgtcatcttcaaactaagtgctacggcaataaaatatgggatatt

SEQ ID NO: 389252 - DNA, 404 bp, Homo sapiens
gtgcaaccacaactcactgcagcctcgacctccaaggctcaagcagtcctctcacctcagcctcctgagtagctgggacaacaggcatgcaccaccacagctgtctaactttttattttttgtagaggcgagagtcttactatattgcccaacctgatcttaaacttctgggcttaagtgatcctcctgccttggcctcccagagtgatgggatttcaggtgggagctaccaatgtgaagttttaatatatgcaaaagtaaaatatatgctaaaatagcacaaaggtctggggggagaaatggaagtatactattatatactatgcctgaggtgacataatattacttgaagatagattgtgaaaagttaaagatgtacactataaacctaaagcaaccaataa

SEQ ID NO: 389253 - DNA, 641 bp, Homo sapiens
atggatttctttaatggaattctgctctagcaacttttatttgctaactcgaaactgctgggatattattcataaatttttttaaaagtcactttggaatccatcatctcaatgataatttctttgtatactttattagaggttacttttttttttttttgagattgagtcttgctcttttgccaggctggagtgtagtggcgcgatctcggctcactgcagcctctacctcccaggttcaagcgattcccctggctcagcctcccgagtagctgggactataggcgcctgccaccatgcccggctaattttttgtattttagtagagatggggtttccccattttggccaggatgatctcaatctcctgaccttgatcccctcacctctaattaaaagaatttggaatatggttgtttagaatatgcttattatgttttccaaatagcttgtttactttttttactttgatttaggtatgtaaagattggtctcagtgaaatataaactttacatgagagtataatatcctactatctgtagataaataagtaatttttttgagaattatttaacatgaatgtttttaaaaagaaaatagaaatttaatttattaagattaaatgttttcttattataat

SEQ ID NO: 389254 - DNA, 498 bp, Homo sapiens
cccagtttttaccctgtttataatttgcaaggagaagctaccagaacagaatgctttctggaatctgttgtcaaggagagagtaaattaagaggaattggacctcttcacataggagcgaaaagagcccaggggatatggaaaagcaggaagatgaaacaataggcatttctcagtgaccctgtggcctgtcctcttcagtccttgctggccccagatgtgataggtagcaaagacatgcaccctttgcatctgcccagctcagcctcacattctcccttatcaagattgaatgtgttctcagaatctcaggcctcactatttggaggaaccagaaatttttctgcagtggcccccaaatggctggccactgcggaaaacttctagcctcccttcctgaacagattgttgctatccatcattcatatagctggtcttctgtctcagttccctgtttatgctcctgtcctcaccagggtggagcaccaccctgaaccag

SEQ ID NO: 389255 - DNA, 614 bp, Homo sapiens
aggagaggagagaggctggggagtcagcccagtgttggggctcacacaagggggagtccaggggagtcaggagcaccacaaacaaggctccagaaggacagacggtgggagcactgccagcctgggtggggagataaaggggtggcaggggaggtggccaggaaagaatctacatggcaaggacttcccggccccaggcctgggctatgcctccatggtgatcgtcttctactgcaacacctactacatcatggtgctggcctggggcttctattacctggtcaagtcctttaccaccacgctgccctgggccacatgtggccacacctggaacactcccgactgtgtggagatcttccgccatgaagactgtgccagtgccagcctggccaacctcacttgtgaccagcttgctgaccgccggtcccctgtcatcgagttctgggagaacaaagtcttgaggctgtctgggggactggaggtgccaggggccctcaactgggaggtgaccctttgtctgctggcctgctgggtgctggtctacttctgtgtctgaaagggggtcaaatccatgggaaaggtaccactagaggcatgcaggggggagggtggct

SEQ ID NO: 389256 - DNA, 827 bp, Homo sapiens
gataagaattaaccaaccaagtatatgctgtcttcaagagactcacttaatacataaggactcacataaacttaaggtaaagtggtggaaaagatatttcatgcgaatggacaccaaaagcaggcaggagtcgctattcttatatcagataaaacaaactttaaggcaaaagcagtttaaaaagacaaagaggaatattatataatgataaaagaactcatccaacaggaaaatatcacaattctaaatacagatgtacctaacactggagctcacaaatttataaaaaaattactactagacctaagaaatgagatagacagcaacacaataatagtggggaacttcaatactccactgacagcactagacaggtcatcaagagagaaaaagtcaacaagaaaacaatggacttaaattacaccctacaacaaatggacttaacagatataaacagaacattctacccaacgactgcagaatatgcgttctattcaacagcacatgaaacattttccaagatagaccatgttataggctacaaaacaagtctcaacaaatttaagaaaatcgaaattatagcaagtactctcagacctcagtggaataaaattggaaatcaactccaaaaggcaccctcaaaaccaagcaaatacatggaaattaaataacctgctcctgaatgatcactgggtcaacaatgaaatcaagatgaaaattaaaaaattctttgagctgaatgataatagtgacacaacttatcaaaacctctgggatacagcaaggcagtgctaagaggaaagttcatagcatatttcatgcctaca

SEQ ID NO: 389257 - DNA, 156 bp, Homo sapiens
ggttactgtgagaactgacggagacacagcttgagaagaactgagcgtgctttccaggcgacagcggacgctgaggacggctagctcttgtgtagatgaaggcacccagcagctgctcaacctgcaacggctcagttctgagaaccatggacacag

SEQ ID NO: 389258 - DNA, 705 bp, Homo sapiens
tgctacagaatacacattcttctcacctgtacatgaacacttctccaggacagatcatatgttagcccacaaaacaagtcttaacaaatttaagaagactgaaactgtatcaaatatcttttctgaccacaatgatatataactagaaataaataacaggaggaactttggaaactttacaaagatgtggaaatcaagcaatatgctcctgaataatgggtcaatgaagaaattaaaaagaaaattttaaacatttattgagacaaacaaaaatggaaacgcaatatgtttttgctatggaatataccaaaaacaattctaagagggaagttgataacaataaacactacactgaaaaagaagaaagccctcaaataaacaacctaatattgcatcttagggaactagaaaaacaagaacaaactcaactaaatattagtaggaggaaggaaataataaagatcaagcagatagagagtagaaaaagcacaaagagacaataatttactttcataagtttgttaaaatttaaatctgataataccaagtgttggcagcagtgcagaggaagaaactcatatattcttggagagaagataaattattctatcaactctggaaatcaatttggcaacgtctaccaaatgtgaagaggaatgtactctatgggctagcaagtccagttccaggtatatgctgaaaata

SEQ ID NO: 389259 - DNA, 461 bp, Homo sapiens
ttggcactagagtatttccttgaagaacagtagaatgggtggggggttgaactgcaggagcacttccaacagctgtatctcctgggatcagtataccctctagcttctcactggaaacagtttggctgcacatttctagcagcttcttgtgtttgtgtcttctatcatgcctgcacctaggagcccgtgtagcaaatgaagcataaacctcctcaagtgttaatgggagggatggcactccctacatcttccctggattgctctagtgattaatccaggtctatagtttcccttgaaagagatttgaggcctcagtgagcaaaaatggaagggtcaaaacccaccatgccttttcccagctttctccagatatgtataaccttgtaatctctccctggaaggagactgggagacagacctctcttatgctatatgtgaggaactgtacttcacctgccttc

SEQ ID NO: 389260 - DNA, 277 bp, Homo sapiens
tgagatagagagttgcacgtcacccaggctggactgcagtggcacgatcatggttcactgcaacatggaggtcctgggctcaagcaattctctaacttcagcctcttgagtagctgggactacaggcatgtatcaccatgcccagctatttttttaaatgtaatttttagtagaaacaggatcttgctatgttacacagactaaaatttcagtaagtatgtgtatcccctgggggggtgctgtaatatttaaatgagtatgtgaatgcacatacata

SEQ ID NO: 389261 - DNA, 909 bp, Homo sapiens
ggctgcgagcgcccaactgctccgactgtcgcggtgagggccccaggacagaagcagacagacacggctcctgctgtcgattccgatccagccagaatgcctccaactcaggccgaaagtgttataaggagtattatacgagaaataggacaagaatgtgcagcccatggagagattgtttctgaaactctgattgcttttatggtgaaagctgttgtcctggatccaagtaatggctttaacatggatagaaccctcatgaaaagtgatgtgcagaatcttgttaagctttgtatgactcggctattggatactaaaaatccatccctggacactattaagatgcaagtctacttcgatatgaattatacgaatcgagtggaatttctcgaagaacatcaccgggtcctagagtctagattaggctctgttacccgagaaattacagataacagagcatgtgctaaagaagaattggaaagcctctaccggaagattatcagctatgtgttactccgctctggccttggatcccctacagacatcaagactgtcagagaggtaacagctgctctacagagtgtttttcctcaggcagagcttgggacatttctaactctttctaagaaggacaaagaacgccagctgaaagaactcaccatgattgttactggaattcgtttatttaacagagactgtggaaaaggaggagaaggcattgatgatttgccagctgttctccatgtagcaatcccaggcaccatgcagcatattgattaccagcttgagacttgcccggagccaaggtataccggtacacagcatccttgagaaggcaggcaaagaacccatcatgagggctgaacttcagccatatatgttaaaagaagcgctatataatatacgaca

SEQ ID NO: 389262 - DNA, 1032 bp, Homo sapiens
ggctgcgagcgcccaactgctccgactgtcgcggtgagggccccaggacagaagcagacagacacggctcctgctgtcgattccgatccagccagaatgcctccaactcaggccgaaagtgttataaggagtattatacgagaaataggacaagaatgtgcagcccatggagagattgtttctgaaactctgattgcttttatggtgaaagctgttgtcctggatccaagtaatggctttaacatggatagaaccctcatgaaaagtgatgtgcagaatcttgttaagctttgtatgactcggctattggatactaaaaatccatccctggacactattaagatgcaagtctacttcgatatgaattatacgaatcgagcttaagaaattacttgttttcctgaagtagaattgccatatccaatccagtttttctctagttcttacgtaagaagaattctaaaaattaaatatatagaacattgttatttggcaattttagtggaatttctcgaagaacatcaccgggtcctagagtctagattaggctctgttacccgagaaattacagataacagagcatgtgctaaagaagaattggaaagcctctaccggaagattatcagctatgtgttactccgctctggccttggatcccctacagacatcaagactgtcagagaggtaacagctgctctacagagtgtttttcctcaggcagagcttgggacatttctaactctttctaagaaggacaaagaacgccagctgaaagaactcaccatgattgttactggaattcgtttatttaacagagactgtggaaaaggaggagaaggcattgatgatttgccagctgttctccatgtagcaatcccaggcaccatgcagcatattgattaccagcttgagacttgcccggagccaaggtataccggtacacagcatccttgagaaggcaggcaaagaacccatcatgagggctgaacttcagccatatatgttaaaagaagcgctatataatatacgaca

SEQ ID NO: 389263 - DNA, 895 bp, Homo sapiens
ggctgcgagcgcccaactgctccgactgtcgcggtgagggccccaggacagaagcagacagacacggctcctgctgtcgattccgatccagccagaatgcctccaactcaggccgaaagtgttataaggagtattatacgagaaataggacaagaatgtgcagcccatggagagattgtttctgaaactctgattgcttttatggtgaaagctgttgtcctggatccaagtaatggctttaacatggatagaaccctcatgaaaagtgatgtgcagaatcttgttaagctttgtatgactcggctattggatactaaaaatccatccctggacactattaagatgcaagtctacttcgatatgaattatacgaatcgagtggaatttctcgaagaacatcaccgggtcctagagtctagattaggctctgttacccgagaaattacagataacagagcatgtgctaaagaagaattggaaagcctctaccggaagattatcagctatgtgttactccgctctggccttggatcccctacagacatcaagactgtcagagaggtaacagctgctctacagagtgtttttcctcaggcagagcttgggacatttctaactctttctaagaaggacaaagaacgccagctgaaagaactcaccatgattgttactggaattcgtttatttaacagagactgtggaaaaggaggagaaggcattgatgatttcagatataattactggtgctcaagaagtggaaatgatgacaaaacagttaggagcccatctggaacaactaaaaatgaccataaaatcaaagatagcggtcccaacatcacaagtctttcctatcttcattgcactttctactctgtggaccagcttgcaagacgaa

SEQ ID NO: 389264 - DNA, 851 bp, Homo sapiens
tgaacctggcttaatgtttttacaatagttcagagtacattaatgaggtacccgctatggatttgctggtggtcataatgagaaaggcagaaaaactgtgtaggcagtagtttattctagtaataaactgtgattaaatgataacttgtataggattcttaattgcttcataaccatcattctttcttaggtctcttcctactcactagaaagcaggtgcagcaaaagggagaaaatgaacatctttctcaagctgaaagagttaaagaccaagacagtactcctgcctgctgtgttcagacaggtggactagttaaattgagcacagaaagctggatagctgccctgcttttgatttgtacaggtggctgctgtggccacagggacaaagacaactccttggttggggttgagagtagaggcattgaaaaattgctgtatatttctgtaggtctttttgttacctttgcttttgaccttgtagttttgggacacccagagacacagcctgcctatagactgtaggactataatttccttgggatttaaaaacaaatccagctcagaagcaccacacagacattctttaaaagtttgtttgaggccaggcgcagtggctcacacctgtaatcccagcactttgggaggccaaggtgggcggatcacctgaggttgggagttcgagaccagcctgaccaacatggagaaaccccgtctctactaaaaatacaaaattggccgggcatggtggcacatgcctgtagtccagctacttgggaggcacaggttgcagtgagctgagattgtgccactgcactccagcctgggtaacgaagtaagactctgtctca

SEQ ID NO: 389265 - DNA, 719 bp, Homo sapiens
tcataaagtgatgaaagaaccacgttcctccccttcaagattcagagacttgctctatcacccaggctttgcagtggcacaatctctcctcaccacaacctcctcctcctgggttcaagctattccagtgcctcagctttccaaatagctgggattacagatgtgcaccatcacacctggctgtgtcaagagttatggtacaactgtctacccagaaatcggagtttctccttgacttctgtgtcaccccacacaacaaataagtttccaaagcccatcagttctggagaatatatatttccctttcctcttttcatgtctaccaccatctttgtatttttagtacagatgggtttttgccatgttggccaggttggtctcgaactcctggcctcaagtgatctgcccgccacagcctcctaaagtgctgggattacaggtggcatgagccactgcgcccggcctaaactcatctttacattaacaagcagctgttacctaaaacaactaatgaaatgtgaactctccccgctatcctctgcttcagtggctccctttcacggttcatggttgtcaccaggtgctctgtgcctggggatgtatatgtccagtttacccatctgaaatgcccttaaccccacacctaacactgtttttggactgttaatcccaaaaatgcaggactggctatcttgctccctaatgtctacatccacatg

SEQ ID NO: 389266 - DNA, 104 bp, Homo sapiens
ttgctggaaggattagggttctgaaaccacttttgcaaaacttatgacagtgagagaaatctaacatagcagactccatcttgcttctaacctcacaagcttat

SEQ ID NO: 389267 - DNA, 731 bp, Homo sapiens
ctttcttgcaaaaggccctggagggacaggaagcagctgtcagaccattttctattccagaccatgccagctgagccagacttaaggcaacaggtggtggtagaaggccagagaactagggggaaaggcctggtgcaaaggcaagatgacaggtgagaatggggcaggagcacaaggccccaggggtctcaccatagctctgcactgtatctccagcccttgttctttacactcataccctcccaaacgaggcctcatgagccacctgtaggctcagaatggcaatgaagggaggccacctccctcccacctgcaggtgggcagtatccttgcaaaccttctaccaggctggtcctgggctgggctctgctgccagcagctccagttggtacttgggttacattgtccctgctccaacgcatccttctagttaaatgataactgtaggccataatactcttgagtacatggttgacatttggccattttataggtccagcagatggctgtggattggccattggctctagttagaatgccagtcatttatccaggaaaatgtattttgtaggcccagacttccaatccataacttcttacttcaaacctgatccatgtgcagattgcaaacaacttgtcctgtcttggaatgttctattgtgattaaataaagcttgtttgggtgccccagctaaatgttagcatcttggggaagagacgaaaaaaaaaat

SEQ ID NO: 389268 - DNA, 386 bp, Homo sapiens
ccaaattcttgatgactcttttctgttccacaaattttaaatgcagtgctctgtagctttctactgaaggcctccccaaagctttacaaaatcagtcatcagtacatcagcactctcctctgttcttcagtgaaatacaaatctgcctaatggattgcttacggttctctgacagttctgatttgctaagaacatgatgtgtggaacctatggcatttctctgacctgtcagcctactgacctcattgtgtgggaaagggaagcagagttagctttgtgtaactggttctccctgaacccatgatggtttccagtgattacttccttttcagtaaacggatctgagccattttgacttaggacaagttaaagaagggcttggtgtt

SEQ ID NO: 389269 - DNA, 567 bp, Homo sapiens
cgggcatttgggatgaatttgtgacaatcagaattaaaatgcagctatcttacttgtaaaagaggtccctggtagctccaacagaggaagataatccaagcttttgctttgtcaagtgcgtaaaatacctttgttgaagtagagaaggcagcacatttaaaatggaattaatgacactgaattaaggaatttgtatggtagtatgtgacattatgttgtacaaatgaatttccttaaggcttcactttctgaaagttttgtttttactttattcattcattcattcagcaaaaaaatattgaatgctgagtgcgtgttttaggtcttgttagacccaggaaatacttgtgaggaaaatagaaagggttcctgccctcaacaagcctcagttagcagatgaggaagaccaacaaataagcaactacaatgaggtatttggtgttaattggtcatatgtatattggacgaataattcttcctctacagtctaaactaatgcttctcaaaccttaatgtgcttatagatcacctggggatcttgaaatacaaattctgattcaggaggcc

SEQ ID NO: 389270 - DNA, 869 bp, Homo sapiens
acaccatgtaagacgtatcttgcttcccctttgccttctgccatgattgtaagtttcctgaggcctctccagccacgcagaactgtcttgctctgccacccaggctggagtgcagtgacatgatcacggctcactgcagcctcaacctcccaggctcaagagatcctcccacctcagcctcccaagtagctgggactacaggcatgaaccatcatgtccggctaagttttgcattttttgtagacacagggttttgccacattgcccaggatggtctcgaactcctgggctcaagcaattcacccctgtaggcttcccaaagtgctgggatcacaagcatgaaccaccatgcctggctcattctatctttcttgaaaaaacatcccaaagaagaagttcaaactactcggataaattaatattagatctggtaaaagtaggtattaaaaatctctcaagaactctcatcagactgaacaagcaatttcagtgagcctacagaaatgtggaagggttatggttatggctctgtttacaaagaatctggacaaaagttgaaagcacgcaatttcagtatgaatttacatccttcgttagaagaataaccccttatatgaacacaaggaatttctcctcttgtcaaggattatcaccaatttttaaaatgtgattataactatgctaacaaacatatctacattttcttaccaaaagactggaatgaattctcctcccctctccaccaccaaatctatcttggtctttttgaatggtggaaatatgggtgattgttttcctttcagcttgtccacccttgccaaactttccttaatgattacaaaattccttttgaaacttaaaaaataaaa

SEQ ID NO: 389271 - DNA, 633 bp, Homo sapiens
gaacatgtgcaggggaactcccatttataaaagcataagatcttgtgagacttgctcaccactacgtgaacagttttggggaaactgctcccatgattcaattatctccactcagccctgcccttgacaagtaaggattactataattcaaggtgagatttaggtagagacacagccaaaccatatcagagactatagaggtaaacatacacatagggtcaattgattttggaaaagtgtgccaaagtaattcaatagggatcagatagacttcaacactgttgctggagtaattgtatacctttatgcaaaaaaacaaaacaataccagaacctcattacctagtgagtaccatacaaaattaacttagaagggattatagaatcaactgtaaaggctgaaactataaaatctttagaataaaactttgtgtgtcttttcacaaaggtgaaaaatctttgtgaccttgagttggtaaatggtccttggatataataataaataaaaaaattaattggtttcatcaaaataaaagtattttggcattcaaaatctatcatcaggaaaaagaaaaggcaagcctcagctaagggaacaatagtttctgatgatgtatctgataaagatgttaaa

SEQ ID NO: 389272 - DNA, 209 bp, Homo sapiens
ctggggaagagaggcaagccgacgtctagcaaatcctgcctcaggatgaaagtgtaggggaggtggcagcactcccggggaccgcccagccccgggctatgcagaagctaggcaggcctaatggccagtccaggcaggccctggcttgccctgctccaaagtatggagatagagtcccggtaagcaccaaatacttttttttttttttt

SEQ ID NO: 389273 - DNA, 552 bp, Homo sapiens
ggccctcactgctgaattgcttacagtttctgagctgtaaactaacatttgctttactatgtagttacagagaaatgtgcaacttgtttgtgaaacattcaaataaagcttatctgggatttttaacttgtgtgtttagtcttagaccatctttagtacagtctggtctaaacactgtgacagagcaaagggacctttttttccaatggtgcacagtgtcatgggtgcaactggctggtgccggtgttgtggatggtaaaagaatttaccggcagggcgtggtggctcacgcctgtaatcccagcactttgggaggccaaggcgggcagatcaccggaggtcaggagttcgtgaccagcctagccaaagtggtgaaaccccatctctaccaaaaatacaaaaattagctgggcacagtggcgcatgcctgtaatcccagctactcaggaagctaaggcgggagaatcgcttgaacctgggaggcggaggttgcagtgagccgagatagcgccgctgcactccagcctgggtaacagagtgagactctgtctc

SEQ ID NO: 389274 - DNA, 335 bp, Homo sapiens
cctgaagtgatccacctgctttggcctcccaaagtgctgggattacaggtgtgagccactgtccccggctttacttttggttttcatatctttctattcccttgcactataacgttgtattcgccaaggaatttcagaaatgaaaatgaggttagactagatgactcttaagacccatacccattttggggtctgtgaagtgttttgacagaataaaaagctgccctacatgtcttgctaccaaggaggttaaaatgttaactagtggattggagaagtgagttttatgtgacttttaaaaaatatattattgaattgaaaacagaatgtttggt

SEQ ID NO: 389275 - DNA, 490 bp, Homo sapiens
gattgtccattcagaaggacaatcgtctgtactttatggaggcaagatataagtcaagtgagaaaggaaggtaggaccaaaagatacacatagttgatctgtgaagtctggcggttaccggggagtaatgagttacataatgaacaggaaccagaactaaatctatcattagggaattatatctttttccataaagtacagacgattgtccattcagaaggacttttaaaaattcaagtttatggctgatttttggctgtggttaattgaagttccaagaaaaagagtaatataggaaggctgaattatttggagggttcctatgccattatttatcatcttagaaataatcatagagctgggcatggtgactcatgcctgtcatcccaccactttgggaggtagaagcaggaagatcgcttgagccaaggagtttgagaccagtgtgggcaacaaattgagaccctgtctgtacaaaaaaaaataatat

SEQ ID NO: 389276 - DNA, 2961 bp, Homo sapiens
gtacgtaaactaactgaaagtattaaggacatgcctgtctatacatgggtttcattgatggtatctgtatcatcttgacaaatcgtgaactgctgctgtatggctagactttgcctatttactctgttatgcaaacagtaatttttccctatgttatgaagagagacatattggcttgctttaatttacttatttatgaaattaaagcatgaataatatgtataatttgaattttttgtgactgatccttggcagtataaatgataaaagtaaatgtaatggaatcttttaattaggctaagatatgctatttcataacttatgtagaatgatttttatctatatactttgtccataaaattataattgtttatgtaattttattgtttcttatggaaacaattggaaaagtatatggaaaatgattatttcaaagaatatttatttaaagagggaagtgtagacttcttactgtaaaatatgtgattccaggcttaagaaattgattatattttaaaataattatttttttaaaaacgtaatttgtttttaaaagatgagtctccattcattggctaatccatacagcaaatatttgagtgtttgtgatatggcagtaaaaatgtgattactttgtatgtacattaaccaaaaccagtgaagtttgatggactgtgcatagagttttgcagcttttgagtagtgtgacagagtttgcctcttaaaattgttttgctaataagtcagaagtttaaaatgtgttatagtttgctaaaaaaaaatcaaattaactgcatataaaatggttcacttttatatagtcacatgtaatgggcctgaaaaagtttcttctttgattatgtagttactctagatacattcttttagggaagtgtatggtcaacatatatttactcagtatacagataaccacaaagttgttatttttaaccaaaatatacatttcataatgttggcactggagtattataagagatcatgaatgtttccttaattatcatggcaagattacctcacgttcagtatagtttagttttgtgtgtatcttacagtatgcatgttctgaaattatttgtgatcctgatatgtcacatataatagctttgttacctggagtatttgattaacctaaacagtttaagcattttgaattagttggagtttaaatggattacatttggtgtatattgtcttcattgaaaagatattgttggatatgccacatcagagttagcattgacttataaataaataccagaatttaccagagtacacttttctcttcagatgactcaattattaaataaaagaatatttcttatttctgggtcaatataaggtactgacttctgatgcataatcacttaagctatgtgagtttaaactggtatcttttcttagtggtacccattcaatgtaagctggtccatgggaatggacatgaagaggatttcacagtatgtagagcagaaggcacgtgaatgtgtttgctttggcttggagcttattaagttttgactacggttaaaataagtcaaatagtaagtggtaaaacacatttttgttagtattggaactttctggagaacataagggctatgagaatgcatatatatattttttaacatttcctatatatctaaggtaccaaagcactgagtctaatttacctattaagggagactctttaaaatcaactttataactaattcatactataagacagataatagctaaagttttggaataatttatattaaaagccgcaagtcttaaaaatccctggatatgacataaaaaggattttggcttcttttttgaagtatttaaaattaatcaccttagctctaccatatactagatctgtgaccgctacacaaattgtttatcatctttgggtctctattgccttctttataaaataagtgtaagttgttcagcctgcctcacagggctgttgtgaggaaataaaatgaaatggagtatgtgaaattgcttcagcaacagcaaagtgctacgtaaatgtaaagtgttgtttttagctaataatggatttaagtgtttggataattgtagatgcatttactttgataaagcgtgtgcttaaagtggtatcaccagtgatttctaacatgattttaaaaaaataaaaccccaattaaaatgttctttaatattcatttaatttgtgcatgacttgtggcctttttgtattttctcaagcctattactctagagctgtaaaagctcttgcacagcattgttgtgtcagtgtagaatagtggcataaataaatgaattaagctacatttccatgcaggcatttgcactttgaagttagggctgcccagtgccacatgcaaagagtgtatttggtctaaacagttctttccaaacaaccaaatggctgggcagcttgttgtcacggataaatgatataaaatgtaaccactgaacatttgacaactttgttgcattatcatttttaaaaaaagatgaagcatttcaaaatcttgttaacctggttatctcttggtatctctcctgacatatttgttttgctttaaattggattaaatggtttacaggttatctgaatctacagatttagtatgtctattatctggacatgattttgctatgcagttgtgataataaaaattctaattcctcaggtttggccttttaagttatggctgaagacctttaatgatacttatgatgcactcagtgccatacaatagtgttttaagaagcacatggcctcattttccttagaaacaagacaaagcctttttaaaatgtttttttttcactttaaaatagggtattcaaagtggagtaacgtgtattttgaaatgattttgtgttctatatagaatgtcccagttaagattttacagaagcacctggaatatctcattaaaaatttaaaaactc

SEQ ID NO: 389277 - DNA, 312 bp, Homo sapiens
tgcaatttttttgtgaatctataatttcaaaataagaagtataaaaatgaaaaagagaaatcttctcttgagtctcccatactagactagctgctgctctctgcttccttcttctgcttttttaatagaaaacttctcaaaatttatctacttgttgcctttaatacctctcctatgctatcttgcatctgctccaatcatagctctgattctttcaccagctcccaggaaactgccctgtcaagatcaccaatgacatctatgttcctgtctaggggtcagctattcatctccattgcacatctgtcactc

SEQ ID NO: 389278 - DNA, 133 bp, Homo sapiens
aggcacagacacgccaagggataccagcagcgtctgagacctgaagcagaaatgccagggatgaggatttggaagattaacacaattgaactcagcactgtggccttttttttctttctggggcttcggaaag

SEQ ID NO: 389279 - DNA, 269 bp, Homo sapiens
atatcttagtaggatgccaaatagtaattatcctattatcacctttttattacttcttaagtttagttttaagttttactacttaaaattgttagcataggttccttaaaatcagtatgttactacatgcttctccgtttctgaaagaattcttcttaagaaaaaaaattagttgaaaaatgtaatatgtctgtattaactaatcagataagatatcaaattttgtgagggatattttactcctaagattctaatgcaccatgttaagc

SEQ ID NO: 389280 - DNA, 565 bp, Homo sapiens
taacagagcctcaataacttagtcacaatcgtacaggcagttaatggtagaactgccattagagcccacaatatctgttttaatcttgtttgggttttctttctattatatgggagttaacaaatagtttcccaaaaattccaggtgactttgttttatagtccaatttttttcaaagacacattgaatattatacatttttattaaatatttaataccttttagttaggaatattttgaaacttgtttcagaatggaaatttttttttttcaagccaaagtaagtgataatgcttagaaaagggaaaggtaactaattacaccagacagggaaataatttgctttgtaatagttccaggccatcagaaagtacatagagtgagtcaggttacttctcaaagaacatctgctgaattgattattttcatagtgctttaaaaattaaaattttgattctgttaaaatttttctcagaaagttttgaatttgatattggtaaaaatggtatttcaaagttgctttgtctcgctaaaattgtaaatttttaccaatttgtaaatggag

SEQ ID NO: 389281 - DNA, 295 bp, Homo sapiens
ttaaggcagcagtgagctttaattgttccactgaactatagcttggacaacagagcaagacccagtctctaaaaaaagaggaaaatcacacttccagattccctcctcaacagtgtagttaggaaaccacttctccccaagtataaaacgtgaggttggccgggctcagtggctcacgcctgtaatcccagcattttgggaggccaaggcaggcagatcacgaggtcaggagaccaacaccatcctggccaacatggtgaaaccccgtctctactaaaatacaaaaaattagcca

SEQ ID NO: 389282 - DNA, 216 bp, Homo sapiens
ccctattaaatcattaagcattgcatgcaatacttttgctgtgaaaattattaacttcctggtatataaaattatttctagttatgtttaaatattttctctgggatattatcatcttagatctgtaaagtggtactaaaatagttaaaaattatttataagatatacacaaacagaaaaatataaaatcaaatgtatcttatacatagtacttgg

SEQ ID NO: 389283 - DNA, 464 bp, Homo sapiens
caatgaatcttctcttcatcgggctgaatgaaagattcaagaaccatcttcaaggtgcatggtgggaattatcaacctcagggatactcattttaactcaggcgtgtcctgctttgtaacattccattgttgggagagggcaggacaggtgtgttcttctgtgggcaggagtcatgtcactgtcctacatatgtaagagttgggaaggtgacgatttttgacacatccaggaactcttactctagttagaatttgtaccagatccaaggtgaaaaccccaataagcaactgaatttagagtttaaaaatgaatgactttatgctacatctgtggttatcaaattatataggttgttgagaagcagaacgctgtttgtagtaagaaatctttgtggaaccccagtgtgtgaagtaaattgtatgttattaaatttatttaaggttaaatttatggcatttactta

SEQ ID NO: 389284 - DNA, 645 bp, Homo sapiens
ggaagactaccttttttctggcagctatgtgttgttttgttcgaaagatggcaagtgtacaaccaaaccaatccacttgcttacagaaagaatgtttagtgtagttaagactaatttgacaacagataaaacagtctgtcagctattacaaagtaatcagctgaacactaatgctgttctgtctgctcacaagagataaagataccctctcatggaataaacaccttgcttagaattcatataacaaagaagtaaccttataactgctctctagtctgccttatttgtgtcatagagtaagatattccttgaaagcccattaagtggaatagactttctgaaaataagagttctttacctcagtcctcctctaatttggttgagaggaggtaatgaaaatggggacaggataaaaggtggcaactaaatttaaagcacagaagaaatgatttccttctagctatgagaatagtcaaattgagcttgccaggctgtctcattcctaacatgtaattcatgatttagccactaaatttctaaggagatcataagaaattaagaaaaacgtttaagtctagcctctgcgtggtagacaggtatggggagggagaatgcttttcccctcccagtaataaaaaaaaaaaa

SEQ ID NO: 389285 - DNA, 330 bp, Homo sapiens
ttgttgactaatattccattatattgatataccacaatttgtttatccattcatcagctgaagggcatttgagttccatccagtttggggctattattaataaatccactatgaacatttgcatcaaagtctttgtgtggatctaggtttccacttctcatgagtaaagctgggtcatatagtaagtgtatatttcactttaaaataagctgctaaacattttctgaagtgtctataccattttgtatttttactagcaatgtatatgagttacagttcctctttatcaccaacacttgcggtctctgtaatttttgtcattttaatcag

SEQ ID NO: 389286 - DNA, 290 bp, Homo sapiens
aaatttgatgagtcacaaccttggagttggttaagatgaacacacattttgaattttattaatcaagccgcaatattcttctgttcaaaatagcatcttgtagttatcaaaatgtatgaattttctttatatagttcctacagaatatttgtgatgaagctgctgatgaatacaaatatgatatgatattgatgatgtattgatggcagtgcctgcttttcatctttgctgcccatgagcaattgaaatgtagttgtgtgtgctcttttggagaacgattttaaatcagc

SEQ ID NO: 389287 - DNA, 130 bp, Homo sapiens
acccagggtggagttggggactggaaggttgatccacttctaggccacctcaggttgtttgcagaattcatctcattgtgggccgggcgcggtggctcacgcctgtaatcccagcactctgggagaccga

SEQ ID NO: 389288 - DNA, 618 bp, Homo sapiens
cgggccctgcgcggggaggctggtcccaatccttgcgtgggcttcgtcgtgggcccggctcgccgctgcggtcgcccgcctggcatggccaactgggtgttctgtaatcgctgcttccagccgccccacaggacgtcgtgcttcagcctcaccaactgcgggcacgtgtactgcgacgcctgcctcggcaaaggtaaaaagaatgaatgcttgatttgtaaagctccttgtcgtacagttttgctttcaaagcataccgacgcagatatccaggcattcttcatgagcatagacagtctgtgtaagaagtactccagggaaacctcccaggtgagctgtgaggggtgtggcttggttccgtgatgagccaggtgcactatcccgagaccatggagctatgaggggtgtgcttggttctgtgatgagccaggtgcactatcccgagaccatggagctgtgaggggtgtgcttggttctgtgatgagccaggtgcactatcccgagaccatggagctgtgggagttgtgcttggttctgtgatgagccaggtgcactatcctgagaccgtggagctgtggggggtgtgcttggttccgtgatgagccaggtgcgctatcc

SEQ ID NO: 389289 - DNA, 123 bp, Homo sapiens
gaagcaggtgacttataaagtaaaggaaggaactttgccagagtcttagaagagttactgtgctagcctgagcccttagtagctcctggcttccagcctgtgcatacacctgtgactggacaa

SEQ ID NO: 389290 - DNA, 411 bp, Homo sapiens
agggatttttcattagggagtgggatgtgttgatgtgataaagcttcttgaagtagaattttatggcaagcgtgatattgtaacttgcccatatttatgcagcttttaagtagtaaagctacgatttgaactgggtctgtttgtcttgaatgcagaggccccagggaatttaccaggtctggctctcattggttttggatagcagaaggttgaaccttaacatgtcagtcattttatttgctagattgattacattttgtctggaacatggtaatctcagactctagtcagtcttcagcttaggaaatattttcttgattattatttctattccactacttaagatttgttcttaaggataaaaattacttgtaaagataaatctccagtatttactatttttattatctt

SEQ ID NO: 389291 - DNA, 241 bp, Homo sapiens
ataattttaaagttggaagtcaatataacatgaaaggcaaatcatgccataaacccataggcatggcaaaactcctaagagctactatgacatttttcaacataaccagaggtataattgaagaagtgggtataatattcctcatcaccctttttgcagcagcctgttgtcaaaagtaatcatattttagtaggcatatttttctgaaatacgtttgtaataaatgcatacttatttttac

SEQ ID NO: 389292 - DNA, 632 bp, Homo sapiens
acagagcgagactccatctcagaaagaaaaaaagaaagaaagaaagaaagaaaaatgaggaagctactgatagtccagtatggtatactgtgatagattgaaaaaaaaagtggttatattttgcagcttctctcatcaagagagtctatttctcctctctttgaatcttgaattggccatatgacttgctttgggcaaatgttggtgccttcgcaaacctggcagaagagaggcttgcacatgggaggattacctgcttttttcttcacttgaaatcctgaggccatgatctgaagatcccccaaagctagcctgctagagagatcacatgaagaaaaagatccatgcatcccactttttccaaccaatccacctataccccagatgtgtgaggccatcctagaccatccagccccaaatgaatcagcttggactagaagaatttccaagccaactcacagaatcactaaaaataataaattattgttattctttttttattttttaagagacgagatctcagtctgggtgacagagcgagactccatctcagaaagaaaaaaagaaagaaagaaagaaagaaaaatgaggaagctactgatagtccagtatggtatactgtgatagattga

SEQ ID NO: 389293 - DNA, 325 bp, Homo sapiens
ccctttaattaactcagacctggatgacataaaatgaagtttctgaagaagttcaggtcaaaggttcctgaaacacaaggctcagtgtgtaccctggatgggaaaatgaactggtgttgacatatatgcatgcccaggaggaagactgggaacgacttaatgagttggggtatgcggagaaacaatgaaatattgaaaactgtctatataaaaatcactgttgggcatatgcattaaaaaacaatatgttattgcaaatttaacactaaaattattttcccaaacagaagatattgtctaaggaagaataaaatgctgaacccct

SEQ ID NO: 389294 - DNA, 130 bp, Homo sapiens
gcatcagaggcgctcggagcaggctgcgaagatgtggagggttggaccctactcccagcgtttcagactcagtagatctcaagttatgattttctctggcgcaggggctctttggcacacagaagatggg

SEQ ID NO: 389295 - DNA, 2247 bp, Homo sapiens
  misc_feature (228)..(228): n is a, c, g, or t
  misc_feature (1090)..(1090): n is a, c, g, or t
  misc_feature (1395)..(1395): n is a, c, g, or t
  misc_feature (1539)..(1539): n is a, c, g, or t
  misc_feature (1874)..(1874): n is a, c, g, or t
aacccgcccgcttctcctgcctaggctcttctttctgctcctgtcgccatggccccggcctcggcgctcaagcgaccctctcgctccgcccagacccctggatgcccagctgccgcacctcccgtggccccacgctgtggctacgtgttgtctgaagacgcctggggaaaccttcagggcctctgtactggcctgtcatgtggtcaaccagatctccttgattgcacngtcaaccccgctcctgtctgtcaggctcaggaaccacttacaagctatggcaggtgatgttccagcatcccacagggaggattatgctggtgagccacatggccaagcaggactatggcttcaacagctctggggcctgcatgttcctgcattagccctactccagcaatgaggctgaagttaccagagtgacatcatggtatctggtgcaagctatagcatccacctattcttggagcacacgtggtcagacactgattggcatgtgaccaagttgatggtggtcaaaacagaactcctttcatgcccacaagcttcagtattactatgttccctgccacttccgttgaagttttgcaggattgggatgatcctttggtgtgaacgaagccccaaagaggaccacgtggagagtgcctgactgttcctgtgatgtcttctagtacatgaacaggaatgaaacccactatgtcctccatgtgaactacatgctgagcgtgggtccagatgggaaaccattctcctaccctgcagaaatggtatatagtttcaaggatgtgggtaagtacaccaagtgaggtgctggtcctggactcatggatggtcttggtacccaacaagttacactggctctgtccaaacaacagctgtggaagcccctcccatgggaggggggtcccactggggctacacagaagtaactcctcacaagtggcttgtctgcatcctgggattggaaacccagtatagaagcagctgttggcagactcatgaagtaatacagagaatgggtggctgctcatacaatcagcagtaagacttcacttaaatcatgccaggaatgacatgaacaggactcaangtaccccatacagtcttccctcccaggtgccaccacccctgaaatattaaccttggtagacttctcctgtcaaggtcacagtaagggtagccagtggtatcaagaccttggtataaatcagacatggccttcttcccagcaaggtcattaggtacccaatgtagagatagcagggaaaggatataaaaacaggaaagttccaggtgagtcatcttttgccccttgactaggcctgcctataggtttgacagctccaggaagtaagaaaacaggtatattgtcttccttcctatagctctgctagntgtcatcctcttaaggtcactaggattctagtgttgaaggcttgctgccacacagatggcactgttctatcctcaaagcattttcagggtgccatctaatgggtctgaatcctggttccattgcaaactttaagcaaggaactnagcattatccaatccccattttctccaactactggccccctctaaggaggctgaagagtgaaagcatgttgaacaccaagatgctctccaaagatggagtccttctcttctgagccccacagctctgcaagatgggtaaaactcaaggtggcattaggctctgagaggagctccatcacacagctggcatagtatggagctggaccagagcccaaatcccctatctccccactgtcctaaccaaaagcttacacttcagaacccaaggccgtgaacacagacctcacacagctgtaacctgagaaactgccattgctgatctagtgccagaaccncttccccatccctggctttcctgctgacttcccacgagataagacttttctttaaaaagggggccttctcagccacacgcagtggatcacactgtaatctcagcactttgggaggccgaggcgggtggatcacttgaggccaggagttcgagatcagcctggccaacatggtgaaaccccatctctactaaaaataccaaaaaaaaaaaaaaaaaaaaaaaaaaagcagggcatggtggcatgtacctgtaatcacagctacccaggaggcacaagaattgcttgaacccaagatgcagaggttgcagtgagcctgtttgtacccctgcactccagcctgggtgacacagtgaaaccctgtctcaaaaaaaaa

SEQ ID NO: 389296 - DNA, 435 bp, Homo sapiens
ccagatgaacatttgagctgggcacgggatgatgttgccgtgtcacagtgagctgcaccttgctctgtcccccgcagagtagatgatgtggtgggccggcagggcaccccaaaccacgaccataaatagcctgggggaggagtggggtgagggaccttctgcaggaaagagacatggatgttgctgcgtcactaccacagagatgccctgacaccgagaagagcaatgtgtgcagaatcatcatctttggagtctaaaaaaagtctggtagcttttaggagtgtaaacaggcagacggacccctgagttcagtgcagcgagcgaagcaagtgcacacggacagacggaatccatgtgttcagtgcagcgagcgaagcgtgtgcacacggacagacggaatccatgtgttcagtgcagcgagcgaagcgtgtgcac

SEQ ID NO: 389297 - DNA, 1725 bp, Homo sapiens
cgggccctgcgggcgcggggctgaaggcggaaccacgacgggcagagagcacggagccgggaagcccctgggcgcccgtcggagggctatggagcagcggccgcggggctgcgcggcggtggcggcggcgctcctcctggtgctgctgggggcccgggcccagggcggcactcgtagccccaggtgtgactgtgccggtgacttccacaagaagattggtctgttttgttgcagaggctgcccagcggggcactacctgaaggccccttgcacggagccctgcggcaactccacctgccttgtgtgtccccaagacaccttcttggcctgggagaaccaccataattctgaatgtgcccgctgccaggcctgtgatgagcaggcctcccaggtggcgctggagaactgttcagcagtggccgacacccgctgtggctgtaagccaggctggtttgtggagtgccaggtcagccaatgtgtcagcagttcacccttctactgccaaccatgcctagactgcggggccctgcaccgccacacacggctactctgttcccgcagagatactgactgtgggacctgcctgcctggcttctatgaacatggcgatggctgcgtgtcctgccccacgagcaccctggggagctgtccagagcgctgtgccgctgtctgtggctggaggcagaagtaggtggtgtgctgggaatgcgagtgggagaactgggatggaccgaggggaggcgggtgaggaggggggcaaccacccaacacccaccagctgctttcagtgttctgggtccaggtgctcctggctggccttgtggtccccctcctgcttggggccaccctgacctacacataccgccactgctggcctcacaagcccctggttactgcagatgaagctgggatggaggctctgaccccaccaccggccacccatctgtcacccttggacagcgcccacacccttctagcacctcctgacagcagtgagaagatctgcaccgtccagttggtgggtaacagctggacccctggctaccccgagacccaggaggcgctctgcccgcaggtgacatggtcctgggaccagttgcccagcagagctcttggccccgctgctgcgcccacactctcgccagagtccccagccggctcgccagccatgatgctgcagccgggcccgcagctctacgacgtgatggacgcggtcccagcgcggcgctggaaggagttcgtgcgcacgctggggctgcgcgaggcagagatcgaagccgtggaggtggagatcggccgcttccgagaccagcagtacgagatgctcaagcgctggcgccagcagcagcccgcgggcctcggagccgtttacgcggccctggagcgcatggggctggacggctgcgtggaagacttgcgcagccgcctgcagcgcggcccgtgacacggcgcccacttgccacctaggcgctctggtggcccttgcagaagccctaagtacggttacttatgcgtgtagacattttatgtcacttattaagccgctggcacggccctgcgtagcagcaccagccggccccacccctgctcgcccctatcgctccagccaaggcgaagaagcacgaacgaatgtcgagagggggtgaagacatttctcaacttctcggccggagtttggctgagatcgcggtattaaatctgtgaaagaaaacaaaacaaaacaaa

SEQ ID NO: 389298 - DNA, 1643 bp, Homo sapiens
cgggccctgcgggcgcggggctgaaggcggaaccacgacgggcagagagcacggagccgggaagcccctgggcgcccgtcggagggctatggagcagcggccgcggggctgcgcggcggtggcggcggcgctcctcctggtgctgctgggggcccgggcccagggcggcactcgtagccccaggtgtgactgtgccggtgacttccacaagaagattggtctgttttgttgcagaggctgcccagcggggcactacctgaaggccccttgcacggagccctgcggcaactccacctgccttgtgtgtccccaagacaccttcttggcctgggagaaccaccataattctgaatgtgcccgctgccaggcctgtgatgagcaggcctcccaggtggcgctggagaactgttcagcagtggccgacacccgctgtggctgtaagccaggctggtttgtggagtgccaggtcagccaatgtgtcagcagttcacccttctactgccaaccatgcctagactgcggggccctgcaccgccacacacggctactctgttcccgcagagatactgactgtgggacctgcctgcctggcttctatgaacatggcgatggctgcgtgtcctgccccacgccacccccgtcccttgcaggagcaccctggggagctgtccagagcgctgtgccgctgtctgtggctggaggcagatgttctgggtccaggtgctcctggctggccttgtggtccccctcctgcttggggccaccctgacctacacataccgccactgctggcctcacaagcccctggttactgcagatgaagctgggatggaggctctgaccccaccaccggccacccatctgtcacccttggacagcgcccacacccttctagcacctcctgacagcagtgagaagatctgcaccgtccagttggtgggtaacagctggacccctggctaccccgagacccaggaggcgctctgcccgcaggtgacatggtcctgggaccagttgcccagcagagctcttggccccgctgctgcgcccacactctcgccagagtccccagccggctcgccagccatgatgctgcagccgggcccgcagctctacgacgtgatggacgcggtcccagcgcggcgctggaaggagttcgtgcgcacgctggggctgcgcgaggcagagatcgaagccgtggaggtggagatcggccgcttccgagaccagcagtacgagatgctcaagcgctggcgccagcagcagcccgcgggcctcggagccgtttacgcggccctggagcgcatggggctggacggctgcgtggaagacttgcgcagccgcctgcagcgcggcccgtgacacggcgcccacttgccacctaggcgctctggtggcccttgcagaagccctaagtacggttacttatgcgtgtagacattttatgtcacttattaagccgctggcacggccctgcgtagcagcaccagccggccccacccctgctcgcccctatcgctccagccaaggcgaagaagcacgaacgaatgtcgagagggggtgaagacatttctcaacttctcggccggagtttggctgagatcgcggtattaaatctgtgaaagaaaacaaaacaaaacaaa

SEQ ID NO: 389299 - DNA, 482 bp, Homo sapiens
cgggccctgcgggcgcggggctgaaggcggaaccacgacgggcagagagcacggagccgggaagcccctgggcgcccgtcggagggctatggagcagcggccgcggggctgcgcggcggtggcggcggtgagttgagacgcaggaggctaggggcagctttgagccctgtcccaagagcctcggtgaaggaaggggccccgggcgcgtctccactccaagcctcactgggggctgggttggccgccccttccgatctcgttaaaggctcctccagggcgtagcccttccactgagaggaaacccctcccaggagggtctgggggccccaggcagagcattatcagtgtccctcccccaacagaaagcatgggtgggggtgggggcgctgctggattcctgctctggtggaggggaaacttgtgaggggctggtaagcgccccctccgaagcctggtgtgtgcgcggggggaaggaagttagt

SEQ ID NO: 389300 - DNA, 290 bp, Homo sapiens
ccgtaccagttgcgggaacattcttgggtagagtgagaggcctggggagggaagggtctctaggatggagcagatgctgggcagtcttagggagcccctcctggcatgcaccccctcatccctcaggccacccccgtcccttgcaggagcaccctggggagctgtccagagcgctgtgccgctgtctgtggctggaggcagaccatttttatttacttatttattgtctcactctgtcgcccagctggagtgcagtagcgcgatgacggctcactgcagccttgaactcc

SEQ ID NO: 389301 - DNA, 1567 bp, Homo sapiens
cgggccctgcgggcgcggggctgaaggcggaaccacgacgggcagagagcacggagccgggaagcccctgggcgcccgtcggagggctatggagcagcggccgcggggctgcgcggcggtggcggcggcgctcctcctggtgctgctgggggcccgggcccagggcggcactcgtagccccaggtgtgactgtgccggtgacttccacaagaagattggtctgttttgttgcagaggctgcccagcggggcactacctgaaggccccttgcacggagccctgcggcaactccacctgccttgtgtgtccccaagacaccttcttggcctgggagaaccaccataattctgaatgtgcccgctgccaggcctgtgatgagcaggcctcccaggtggcgctggagaactgttcagcagtggccgacacccgctgtggctgtaagccaggctggtttgtggagtgccaggtcagccaatgtgtcagcagttcacccttctactgccaaccatgcctagactgcggggccctgcaccgccacacacggctactctgttcccgcagagatactgactgtgggacctgcctgcctggcttctatgaacatggcgatggctgcgtgtcctgccccactgttctgggtccaggtgctcctggctggccttgtggtccccctcctgcttggggccaccctgacctacacataccgccactgctggcctcacaagcccctggttactgcagatgaagctgggatggaggctctgaccccaccaccggccacccatctgtcacccttggacagcgcccacacccttctagcacctcctgacagcagtgagaagatctgcaccgtccagttggtgggtaacagctggacccctggctaccccgagacccaggaggcgctctgcccgcaggtgacatggtcctgggaccagttgcccagcagagctcttggccccgctgctgcgcccacactctcgccagagtccccagccggctcgccagccatgatgctgcagccgggcccgcagctctacgacgtgatggacgcggtcccagcgcggcgctggaaggagttcgtgcgcacgctggggctgcgcgaggcagagatcgaagccgtggaggtggagatcggccgcttccgagaccagcagtacgagatgctcaagcgctggcgccagcagcagcccgcgggcctcggagccgtttacgcggccctggagcgcatggggctggacggctgcgtggaagacttgcgcagccgcctgcagcgcggcccgtgacacggcgcccacttgccacctaggcgctctggtggcccttgcagaagccctaagtacggttacttatgcgtgtagacattttatgtcacttattaagccgctggcacggccctgcgtagcagcaccagccggccccacccctgctcgcccctatcgctccagccaaggcgaagaagcacgaacgaatgtcgagagggggtgaagacatttctcaacttctcggccggagtttggctgagatcgcggtattaaatctgtgaaagaaaacaaaacaaaacaaa

SEQ ID NO: 389302 - DNA, 1515 bp, Homo sapiens
cgggccctgcgggcgcggggctgaaggcggaaccacgacgggcagagagcacggagccgggaagcccctgggcgcccgtcggagggctatggagcagcggccgcggggctgcgcggcggtggcggcggcgctcctcctggtgctgctgggggcccgggcccagggcggcactcgtagccccaggtgtgactgtgccggtgacttccacaagaagattggtctgttttgttgcagaggctgcccagcggggcactacctgaaggccccttgcacggagccctgcggcaactccacctgccttgtgtgtccccaagacaccttcttggcctgggagaaccaccataattctgaatgtgcccgctgccaggcctgtgatgagcaggcctcccaggtggcgctggagaactgttcagcagtggccgacacccgctgtggctgtaagccaggctggtttgtggagtgccaggtcagccaatgtgtcagcagttcacccttctactgccaaccatgcctagactgcggggccctgcaccgccacacacggctactctgttcccgcagagatactgactgtgggacctgcctgcctggcttctatgaacatggcgatggctgcgtgtcctgccccacgagcaccctggggagctgtccagagcgctgtgccgctgtctgtggctggaggcagacagatgaagctgggatggaggctctgaccccaccaccggccacccatctgtcacccttggacagcgcccacacccttctagcacctcctgacagcagtgagaagatctgcaccgtccagttggtgggtaacagctggacccctggctaccccgagacccaggaggcgctctgcccgcaggtgacatggtcctgggaccagttgcccagcagagctcttggccccgctgctgcgcccacactctcgccagagtccccagccggctcgccagccatgatgctgcagccgggcccgcagctctacgacgtgatggacgcggtcccagcgcggcgctggaaggagttcgtgcgcacgctggggctgcgcgaggcagagatcgaagccgtggaggtggagatcggccgcttccgagaccagcagtacgagatgctcaagcgctggcgccagcagcagcccgcgggcctcggagccgtttacgcggccctggagcgcatggggctggacggctgcgtggaagacttgcgcagccgcctgcagcgcggcccgtgacacggcgcccacttgccacctaggcgctctggtggcccttgcagaagccctaagtacggttacttatgcgtgtagacattttatgtcacttattaagccgctggcacggccctgcgtagcagcaccagccggccccacccctgctcgcccctatcgctccagccaaggcgaagaagcacgaacgaatgtcgagagggggtgaagacatttctcaacttctcggccggagtttggctgagatcgcggtattaaatctgtgaaagaaaacaaaacaaaacaaa

SEQ ID NO: 389303 - DNA, 1488 bp, Homo sapiens
cgggccctgcgggcgcggggctgaaggcggaaccacgacgggcagagagcacggagccgggaagcccctgggcgcccgtcggagggctatggagcagcggccgcggggctgcgcggcggtggcggcggcgctcctcctggtgctgctgggggcccgggcccagggcggcactcgtagccccaggtgtgactgtgccggtgacttccacaagaagattggtctgttttgttgcagaggctgcccagcggcctcccaggtggcgctggagaactgttcagcagtggccgacacccgctgtggctgtaagccaggctggtttgtggagtgccaggtcagccaatgtgtcagcagttcacccttctactgccaaccatgcctagactgcggggccctgcaccgccacacacggctactctgttcccgcagagatactgactgtgggacctgcctgcctggcttctatgaacatggcgatggctgcgtgtcctgccccacgagcaccctggggagctgtccagagcgctgtgccgctgtctgtggctggaggcagatgttctgggtccaggtgctcctggctggccttgtggtccccctcctgcttggggccaccctgacctacacataccgccactgctggcctcacaagcccctggttactgcagatgaagctgggatggaggctctgaccccaccaccggccacccatctgtcacccttggacagcgcccacacccttctagcacctcctgacagcagtgagaagatctgcaccgtccagttggtgggtaacagctggacccctggctaccccgagacccaggaggcgctctgcccgcaggtgacatggtcctgggaccagttgcccagcagagctcttggccccgctgctgcgcccacactctcgccagagtccccagccggctcgccagccatgatgctgcagccgggcccgcagctctacgacgtgatggacgcggtcccagcgcggcgctggaaggagttcgtgcgcacgctggggctgcgcgaggcagagatcgaagccgtggaggtggagatcggccgcttccgagaccagcagtacgagatgctcaagcgctggcgccagcagcagcccgcgggcctcggagccgtttacgcggccctggagcgcatggggctggacggctgcgtggaagacttgcgcagccgcctgcagcgcggcccgtgacacggcgcccacttgccacctaggcgctctggtggcccttgcagaagccctaagtacggttacttatgcgtgtagacattttatgtcacttattaagccgctggcacggccctgcgtagcagcaccagccggccccacccctgctcgcccctatcgctccagccaaggcgaagaagcacgaacgaatgtcgagagggggtgaagacatttctcaacttctcggccggagtttggctgagatcgcggtattaaatctgtgaaagaaaacaaaacaaaacaaa

SEQ ID NO: 389304 - DNA, 1070 bp, Homo sapiens
cgggccctgcgggcgcggggctgaaggcggaaccacgacgggcagagagcacggagccgggaagcccctgggcgcccgtcggagggctatggagcagcggccgcggggctgcgcggcggtggcggcggcgctcctcctggtgctgctgggggcccgggcccagggcggcactcgtagccccaggtgtgactgtgccggtgacttccacaagaagattggtctgttttgttgcagaggctgcccagcggggcactacctgaaggccccttgcacggagccctgcggcaactccacctgccttgtgtgtccccaagacaccttcttggcctgggagaaccaccataattctgaatgtgcccgctgccaggcctgtgatgagcaggcctcccaggtggcgctggagaactgttcagcagtggccgacacccgctgtggctgtaagccaggctggtttgtggagtgccaggtcagccaatgtgtcagcagttcacccttctactgccaaccatgcctagactgcggggccctgcaccgccacacacggctactctgttcccgcagagatactgactgtgggacctgcctgcctggcttctatgaacatggcgatggctgcgtgtcctgccccacgtaattcctagctgtcgtgggatggagggaagggcggctgggagcagagcaggggcctggggtggggcaggtgctgctggttcaggaataggaagaggggatagggaggagggagccttggccctgtgatgggtgggccccacttcaggcaaacttagatggcaaaagagcaatctggatccgccttagccagatacataagggtatttgccttcactttcagccagcattccccccagcgatcctagccagatattacagatgatttgtcacttacacagagagtcacattgatatagctttaaaacttgggctgaaggaggttgaggctgcagtgagctatgatcgtgccactgcacttcagcctgggcaacagagcgagacctattaaataaataaataaatattaaatctattaaatattaaatattaaatctatt

SEQ ID NO: 389305 - DNA, 1566 bp, Homo sapiens
ggaggagacgcagcagggagaggccccacgtgggcagctgcgctgagagtcagcagcacctgtcccccaggcgctcctcctggtgctgctgggggcccgggcccagggcggcactcgtagccccaggtgtgactgtgccggtgacttccacaagaagattggtctgttttgttgcagaggctgcccagcggggcactacctgaaggccccttgcacggagccctgcggcaactccacctgccttgtgtgtccccaagacaccttcttggcctgggagaaccaccataattctgaatgtgcccgctgccaggcctgtgatgagcaggcctcccaggtggcgctggagaactgttcagcagtggccgacacccgctgtggctgtaagccaggctggtttgtggagtgccaggtcagccaatgtgtcagcagttcacccttctactgccaaccatgcctagactgcggggccctgcaccgccacacacggctactctgttcccgcagagatactgactgtgggacctgcctgcctggcttctatgaacatggcgatggctgcgtgtcctgccccacgagcaccctggggagctgtccagagcgctgtgccgctgtctgtggctggaggcagatgttctgggtccaggtgctcctggctggccttgtggtccccctcctgcttggggccaccctgacctacacataccgccactgctggcctcacaagcccctggttactgcagatgaagctgggatggaggctctgaccccaccaccggccacccatctgtcacccttggacagcgcccacacccttctagcacctcctgacagcagtgagaagatctgcaccgtccagttggtgggtaacagctggacccctggctaccccgagacccaggaggcgctctgcccgcaggtgacatggtcctgggaccagttgcccagcagagctcttggccccgctgctgcgcccacactctcgccagagtccccagccggctcgccagccatgatgctgcagccgggcccgcagctctacgacgtgatggacgcggtcccagcgcggcgctggaaggagttcgtgcgcacgctggggctgcgcgaggcagagatcgaagccgtggaggtggagatcggccgcttccgagaccagcagtacgagatgctcaagcgctggcgccagcagcagcccgcgggcctcggagccgtttacgcggccctggagcgcatggggctggacggctgcgtggaagacttgcgcagccgcctgcagcgcggcccgtgacacggcgcccacttgccacctaggcgctctggtggcccttgcagaagccctaagtacggttacttatgcgtgtagacattttatgtcacttattaagccgctggcacggccctgcgtagcagcaccagccggccccacccctgctcgcccctatcgctccagccaaggcgaagaagcacgaacgaatgtcgagagggggtgaagacatttctcaacttctcggccggagtttggctgagatcgcggtattaaatctgtgaaagaaaacaaaacaaaacaaa

SEQ ID NO: 389306 - DNA, 1207 bp, Homo sapiens
cgggccctgcgggcgcggggctgaaggcggaaccacgacgggcagagagcacggagccgggaagcccctgggcgcccgtcggagggctatggagcagcggccgcggggctgcgcggcggtggcggcggcgctcctcctggtgctgctgggggcccgggcccagggcggcactcgtagccccaggtgtgactgtgccggtgacttccacaagaagattggtctgttttgttgcagaggctgcccagcggcctcccaggtggcgctggagaactgttcagcagtggccgacacccgctgtggctgtaagccaggctggtttgtggagtgccaggtcagccaatgtgtcagcagttcacccttctactgccaaccatgcctagactgcggggccctgcaccgccacacacggctactctgccacccatctgtcacccttggacagcgcccacacccttctagcacctcctgacagcagtgagaagatctgcaccgtccagttggtgggtaacagctggacccctggctaccccgagacccaggaggcgctctgcccgcaggtgacatggtcctgggaccagttgcccagcagagctcttggccccgctgctgcgcccacactctcgccagagtccccagccggctcgccagccatgatgctgcagccgggcccgcagctctacgacgtgatggacgcggtcccagcgcggcgctggaaggagttcgtgcgcacgctggggctgcgcgaggcagagatcgaagccgtggaggtggagatcggccgcttccgagaccagcagtacgagatgctcaagcgctggcgccagcagcagcccgcgggcctcggagccgtttacgcggccctggagcgcatggggctggacggctgcgtggaagacttgcgcagccgcctgcagcgcggcccgtgacacggcgcccacttgccacctaggcgctctggtggcccttgcagaagccctaagtacggttacttatgcgtgtagacattttatgtcacttattaagccgctggcacggccctgcgtagcagcaccagccggccccacccctgctcgcccctatcgctccagccaaggcgaagaagcacgaacgaatgtcgagagggggtgaagacatttctcaacttctcggccggagtttggctgagatcgcggtattaaatctgtgaaagaaaacaaaacaaaacaaa

SEQ ID NO: 389307 - DNA, 1077 bp, Homo sapiens
cgggccctgcgggcgcggggctgaaggcggaaccacgacgggcagagagcacggagccgggaagcccctgggcgcccgtcggagggctatggagcagcggccgcggggctgcgcggcggtggcggcggcgctcctcctggtgctgctgggggcccgggcccagggcggcactcgtagccccaggtgtgactgtgccggtgacttccacaagaagattggtctgttttgttgcagaggctgcccagcggcagatgaagctgggatggaggctctgaccccaccaccggccacccatctgtcacccttggacagcgcccacacccttctagcacctcctgacagcagtgagaagatctgcaccgtccagttggtgggtaacagctggacccctggctaccccgagacccaggaggcgctctgcccgcaggtgacatggtcctgggaccagttgcccagcagagctcttggccccgctgctgcgcccacactctcgccagagtccccagccggctcgccagccatgatgctgcagccgggcccgcagctctacgacgtgatggacgcggtcccagcgcggcgctggaaggagttcgtgcgcacgctggggctgcgcgaggcagagatcgaagccgtggaggtggagatcggccgcttccgagaccagcagtacgagatgctcaagcgctggcgccagcagcagcccgcgggcctcggagccgtttacgcggccctggagcgcatggggctggacggctgcgtggaagacttgcgcagccgcctgcagcgcggcccgtgacacggcgcccacttgccacctaggcgctctggtggcccttgcagaagccctaagtacggttacttatgcgtgtagacattttatgtcacttattaagccgctggcacggccctgcgtagcagcaccagccggccccacccctgctcgcccctatcgctccagccaaggcgaagaagcacgaacgaatgtcgagagggggtgaagacatttctcaacttctcggccggagtttggctgagatcgcggtattaaatctgtgaaagaaaacaaaacaaaacaaa

SEQ ID NO: 389308 - DNA, 1623 bp, Homo sapiens
cgggccctgcgggcgcggggctgaaggcggaaccacgacgggcagagagcacggagccgggaagcccctgggcgcccgtcggagggctatggagcagcggccgcggggctgcgcggcggtggcggcggcgctcctcctggtgctgctgggggcccgggcccagggcggcactcgtagccccaggtgtgactgtgccggtgacttccacaagaagattggtctgttttgttgcagaggctgcccagcggggcactacctgaaggccccttgcacggagccctgcggcaactccacctgccttgtgtgtccccaagacaccttcttggcctgggagaaccaccataattctgaatgtgcccgctgccaggcctgtgatgagcaggcctcccaggtggcgctggagaactgttcagcagtggccgacacccgctgtggctgtaagccaggctggtttgtggagtgccaggtcagccaatgtgtcagcagttcacccttctactgccaaccatgcctagactgcggggccctgcaccgccacacacggctactctgttcccgcagagatactgactgtgggacctgcctgcctggcttctatgaacatggcgatggctgcgtgtcctgccccacgagcaccctggggagctgtccagagcgctgtgccgctgtctgtggctggaggcagatgttctgggtccaggtgctcctggctggccttgtggtccccctcctgcttggggccaccctgacctacacataccgccactgctggcctcacaagcccctggttactgcagatgaagctgggatggaggctctgaccccaccaccggccacccatctgtcacccttggacagcgcccacacccttctagcacctcctgacagcagtgagaagatctgcaccgtccagttggtgggtaacagctggacccctggctaccccgagacccaggaggcgctctgcccgcaggtgacatggtcctgggaccagttgcccagcagagctcttggccccgctgctgcgcccacactctcgccagagtccccagccggctcgccagccatgatgctgcagccgggcccgcagctctacgacgtgatggacgcggtcccagcgcggcgctggaaggagttcgtgcgcacgctggggctgcgcgaggcagagatcgaagccgtggaggtggagatcggccgcttccgagaccagcagtacgagatgctcaagcgctggcgccagcagcagcccgcgggcctcggagccgtttacgcggccctggagcgcatggggctggacggctgcgtggaagacttgcgcagccgcctgcagcgcggcccgtgacacggcgcccacttgccacctaggcgctctggtggcccttgcagaagccctaagtacggttacttatgcgtgtagacattttatgtcacttattaagccgctggcacggccctgcgtagcagcaccagccggccccacccctgctcgcccctatcgctccagccaaggcgaagaagcacgaacgaatgtcgagagggggtgaagacatttctcaacttctcggccggagtttggctgagatcgcggtattaaatctgtgaaagaaaacaaaacaaaacaaa

SEQ ID NO: 389309 - DNA, 1745 bp, Homo sapiens
cgggccctgcgggcgcggggctgaaggcggaaccacgacgggcagagagcacggagccgggaagcccctgggcgcccgtcggagggctatggagcagcggccgcggggctgcgcggcggtggcggcggcgctcctcctggtgctgctgggggcccgggcccagggcggcactcgtagccccaggtgtgactgtgccggtgacttccacaagaagattggtctgttttgttgcagaggctgcccagcggggcactacctgaaggccccttgcacggagccctgcggcaactccacctgccttgtgtgtccccaagacaccttcttggcctgggagaaccaccataattctgaatgtgcccgctgccaggcctgtgatgagcaggcctcccaggtggcgctggagaactgttcagcagtggccgacacccgctgtggctgtaagccaggctggtttgtggagtgccaggtcagccaatgtgtcagcagttcacccttctactgccaaccatgcctagactgcggggccctgcaccgccacacacggctactctgttcccgcagagatactgactgtgggacctgcctgcctggcttctatgaacatggcgatggctgcgtgtcctgccccacgccacccccgtcccttgcaggagcaccctggggagctgtccagagcgctgtgccgctgtctgtggctggaggcagaagtaggtggtgtgctgggaatgcgagtgggagaactgggatggaccgaggggaggcgggtgaggaggggggcaaccacccaacacccaccagctgctttcagtgttctgggtccaggtgctcctggctggccttgtggtccccctcctgcttggggccaccctgacctacacataccgccactgctggcctcacaagcccctggttactgcagatgaagctgggatggaggctctgaccccaccaccggccacccatctgtcacccttggacagcgcccacacccttctagcacctcctgacagcagtgagaagatctgcaccgtccagttggtgggtaacagctggacccctggctaccccgagacccaggaggcgctctgcccgcaggtgacatggtcctgggaccagttgcccagcagagctcttggccccgctgctgcgcccacactctcgccagagtccccagccggctcgccagccatgatgctgcagccgggcccgcagctctacgacgtgatggacgcggtcccagcgcggcgctggaaggagttcgtgcgcacgctggggctgcgcgaggcagagatcgaagccgtggaggtggagatcggccgcttccgagaccagcagtacgagatgctcaagcgctggcgccagcagcagcccgcgggcctcggagccgtttacgcggccctggagcgcatggggctggacggctgcgtggaagacttgcgcagccgcctgcagcgcggcccgtgacacggcgcccacttgccacctaggcgctctggtggcccttgcagaagccctaagtacggttacttatgcgtgtagacattttatgtcacttattaagccgctggcacggccctgcgtagcagcaccagccggccccacccctgctcgcccctatcgctccagccaaggcgaagaagcacgaacgaatgtcgagagggggtgaagacatttctcaacttctcggccggagtttggctgagatcgcggtattaaatctgtgaaagaaaacaaaacaaaacaaa

SEQ ID NO: 389310 - DNA, 818 bp, Homo sapiens
ggtccgcggggtgcgcggtggcggcggcgctcctcctggtgctgctgggggcccgggcccagggcggcactcgtagccccaggtgtgactgtgccggtgacttccacaagaagattggtctgttttgttgcagaggctgcccagcggggcactacctgaaggccccttgcacggagccctgcggcaactccacctgccttgtgtgtccccaagacaccttcttggcctgggagaaccaccataattctgaatgtgcccgctgccaggcctgtgatgagcaggcctcccaggtggcgctggagaactgttcagcagtggccgacacccgctgtggctgtaagccaggctggtttgtggagtgccaggtcagccaatgtgtcagcagttcacccttctactgccaaccatgcctagactgcggggccctgcaccgccacacacggctactctgttcccgcagagatactgactgtgggacctgcctgcctggcttctatgaacatggcgatggctgcgtgtcctgccccacgtaattcctagctgtcgtgggatggagggaagggcggctgggagcagagcaggggcctggggtggggcaggtgctgctggttcaggaataggaagaggggatagggaggagggagccttggccctgtgatgggtgggccccacttcaggcaaacttagatggcaaaagagcaatctggatccgccttagccagatacataagggtatttgccttcactttcagccagcattccccccagcgatcctagccagatattacagatggtaaccctcgtgccgaattcttgcc

SEQ ID NO: 389311 - DNA, 1459 bp, Homo sapiens
cgggccctgcgggcgcggggctgaaggcggaaccacgacgggcagagagcacggagccgggaagcccctgggcgcccgtcggagggctatggagcagcggccgcggggctgcgcggcggtggcggcggcgctcctcctggtgctgctgggggcccgggcccagggcggcactcgtagccccaggtgtgactgtgccggtgacttccacaagaagattggtctgttttgttgcagaggctgcccagcggggcactacctgaaggccccttgcacggagccctgcggcaactccacctgccttgtgtgtccccaagacaccttcttggcctgggagaaccaccataattctgaatgtgcccgctgccaggcctgtgatgagcaggcctcccaggtggcgctggagaactgttcagcagtggccgacacccgctgtggctgtaagccaggctggtttgtggagtgccaggtcagccaatgtgtcagcagttcacccttctactgccaaccatgcctagactgcggggccctgcaccgccacacacggctactctgttcccgcagagatactgactgtgggacctgcctgcctggcttctatgaacatggcgatggctgcgtgtcctgccccaccagatgaagctgggatggaggctctgaccccaccaccggccacccatctgtcacccttggacagcgcccacacccttctagcacctcctgacagcagtgagaagatctgcaccgtccagttggtgggtaacagctggacccctggctaccccgagacccaggaggcgctctgcccgcaggtgacatggtcctgggaccagttgcccagcagagctcttggccccgctgctgcgcccacactctcgccagagtccccagccggctcgccagccatgatgctgcagccgggcccgcagctctacgacgtgatggacgcggtcccagcgcggcgctggaaggagttcgtgcgcacgctggggctgcgcgaggcagagatcgaagccgtggaggtggagatcggccgcttccgagaccagcagtacgagatgctcaagcgctggcgccagcagcagcccgcgggcctcggagccgtttacgcggccctggagcgcatggggctggacggctgcgtggaagacttgcgcagccgcctgcagcgcggcccgtgacacggcgcccacttgccacctaggcgctctggtggcccttgcagaagccctaagtacggttacttatgcgtgtagacattttatgtcacttattaagccgctggcacggccctgcgtagcagcaccagccggccccacccctgctcgcccctatcgctccagccaaggcgaagaagcacgaacgaatgtcgagagggggtgaagacatttctcaacttctcggccggagtttggctgagatcgcggtattaaatctgtgaaagaaaacaaaacaaaacaaa

SEQ ID NO: 389312 - DNA, 1940 bp, Homo sapiens
  misc_feature (15)..(15): n is a, c, g, or t
  misc_feature (541)..(541): n is a, c, g, or t
gagaggcatggggcnggcagggctggagaggtggcgggcaggcccgggaggtaagaggaggctggcaggggaggtaggggtaggctgacagagaagtagggagctggagagaaagagggagggagggcagggtgggaagcaggtcgggggttgctgggcagcccctctgcctgcctgacccctgcctggttccacagggcactacctgaaggccccttgcacggagccctgcggcaactccacctgccttgtgtgtccccaagacaccttcttggcctgggagaaccaccataattctgaatgtgcccgctgccaggcctgtgatgagcagggtgaggggcttctcagtgcttggcagggagttcctaaggacaggcctttctgaaggaagtggctggctcgggcccaaacttggggtgtgagggtcctgcacccacccttgccagaaccctccaccctgatcctccttcagggtgcccttgccccttctctcttcctggtgaccttcccatctctccatgtgccttggcctctggtcggncttaatctctgagcttctctcttttttagggtagccctgtacctgtctgtctttcgcctatttctgtctccattatcttgggataatgcctctgcctctccatgggagcctttggccctgactaactctccactccccatctccctgcacccccaccagcctcccaggtggcgctggagaactgttcagcagtggccgacacccgctgtggctgtaagccaggctggtttgtggagtgccaggtcagccaatgtgtcagcagttcacccttctactgccaaccatgcctagactgcggggccctgcaccgccacacacggctactctgttcccgcagagatactgactgtgggacctgcctgcctggcttctatgaacatggcgatggctgcgtgtcctgccccacgagcaccctggggagctgtccagagcgctgtgccgctgtctgtggctggaggcagatgttctgggtccaggtgctcctggctggccttgtggtccccctcctgcttggggccaccctgacctacacataccgccactgctggcctcacaagcccctggttactgcagatgaagctgggatggaggctctgaccccaccaccggccacccatctgtcacccttggacagcgcccacacccttctagcacctcctgacagcagtgagaagatctgcaccgtccagttggtgggtaacagctggacccctggctaccccgagacccaggaggcgctctgcccgcaggtgacatggtcctgggaccagttgcccagcagagctcttggccccgctgctgcgcccacactctcgccagagtccccagccggctcgccagccatgatgctgcagccgggcccgcagctctacgacgtgatggacgcggtcccagcgcggcgctggaaggagttcgtgcgcacgctggggctgcgcgaggcagagatcgaagccgtggaggtggagatcggccgcttccgagaccagcagtacgagatgctcaagcgctggcgccagcagcagcccgcgggcctcggagccgtttacgcggccctggagcgcatggggctggacggctgcgtggaagacttgcgcagccgcctgcagcgcggcccgtgacacggcgcccacttgccacctaggcgctctggtggcccttgcagaagccctaagtacggttacttatgcgtgtagacattttatgtcacttattaagccgctggcacggccctgcgtagcagcaccagccggccccacccctgctcgcccctatcgctccagccaaggcgaagaagcacgaacgaatgtcgagagggggtgaagacatttctcaacttctcggccggagtttggctgagatcgcggtattaaatctgtgaaagaaaacaaaacaaaacaaa

SEQ ID NO: 389313 - DNA, 1324 bp, Homo sapiens
cgggccctgcgggcgcggggctgaaggcggaaccacgacgggcagagagcacggagccgggaagcccctgggcgcccgtcggagggctatggagcagcggccgcggggctgcgcggcggtggcggcggcgctcctcctggtgctgctgggggcccgggcccagggcggcactcgtagccccaggtgtgactgtgccggtgacttccacaagaagattggtctgttttgttgcagaggctgcccagcggcctcccaggtggcgctggagaactgttcagcagtggccgacacccgctgtggctgtaagccaggctggtttgtggagtgccaggtcagccaatgtgtcagcagttcacccttctactgccaaccatgcctagactgcggggccctgcaccgccacacacggctactctgttcccgcagagatactgactgtgggacctgcctgcctggcttctatgaacatggcgatggctgcgtgtcctgccccaccagatgaagctgggatggaggctctgaccccaccaccggccacccatctgtcacccttggacagcgcccacacccttctagcacctcctgacagcagtgagaagatctgcaccgtccagttggtgggtaacagctggacccctggctaccccgagacccaggaggcgctctgcccgcaggtgacatggtcctgggaccagttgcccagcagagctcttggccccgctgctgcgcccacactctcgccagagtccccagccggctcgccagccatgatgctgcagccgggcccgcagctctacgacgtgatggacgcggtcccagcgcggcgctggaaggagttcgtgcgcacgctggggctgcgcgaggcagagatcgaagccgtggaggtggagatcggccgcttccgagaccagcagtacgagatgctcaagcgctggcgccagcagcagcccgcgggcctcggagccgtttacgcggccctggagcgcatggggctggacggctgcgtggaagacttgcgcagccgcctgcagcgcggcccgtgacacggcgcccacttgccacctaggcgctctggtggcccttgcagaagccctaagtacggttacttatgcgtgtagacattttatgtcacttattaagccgctggcacggccctgcgtagcagcaccagccggccccacccctgctcgcccctatcgctccagccaaggcgaagaagcacgaacgaatgtcgagagggggtgaagacatttctcaacttctcggccggagtttggctgagatcgcggtattaaatctgtgaaagaaaacaaaacaaaacaaa

SEQ ID NO: 389314 - DNA, 1522 bp, Homo sapiens
ggtccgcggggtgcgcggtggcggcggcgctcctcctggtgctgctgggggcccgggcccagggcggcactcgtagccccaggtgtgactgtgccggtgacttccacaagaagattggtctgttttgttgcagaggctgcccagcggggcactacctgaaggccccttgcacggagccctgcggcaactccacctgccttgtgtgtccccaagacaccttcttggcctgggagaaccaccataattctgaatgtgcccgctgccaggcctgtgatgagcaggcctcccaggtggcgctggagaactgttcagcagtggccgacacccgctgtggctgtaagccaggctggtttgtggagtgccaggtcagccaatgtgtcagcagttcacccttctactgccaaccatgcctagactgcggggccctgcaccgccacacacggctactctgttcccgcagagatactgactgtgggacctgcctgcctggcttctatgaacatggcgatggctgcgtgtcctgccccacgagcaccctggggagctgtccagagcgctgtgccgctgtctgtggctggaggcagatgttctgggtccaggtgctcctggctggccttgtggtccccctcctgcttggggccaccctgacctacacataccgccactgctggcctcacaagcccctggttactgcagatgaagctgggatggaggctctgaccccaccaccggccacccatctgtcacccttggacagcgcccacacccttctagcacctcctgacagcagtgagaagatctgcaccgtccagttggtgggtaacagctggacccctggctaccccgagacccaggaggcgctctgcccgcaggtgacatggtcctgggaccagttgcccagcagagctcttggccccgctgctgcgcccacactctcgccagagtccccagccggctcgccagccatgatgctgcagccgggcccgcagctctacgacgtgatggacgcggtcccagcgcggcgctggaaggagttcgtgcgcacgctggggctgcgcgaggcagagatcgaagccgtggaggtggagatcggccgcttccgagaccagcagtacgagatgctcaagcgctggcgccagcagcagcccgcgggcctcggagccgtttacgcggccctggagcgcatggggctggacggctgcgtggaagacttgcgcagccgcctgcagcgcggcccgtgacacggcgcccacttgccacctaggcgctctggtggcccttgcagaagccctaagtacggttacttatgcgtgtagacattttatgtcacttattaagccgctggcacggccctgcgtagcagcaccagccggccccacccctgctcgcccctatcgctccagccaaggcgaagaagcacgaacgaatgtcgagagggggtgaagacatttctcaacttctcggccggagtttggctgagatcgcggtattaaatctgtgaaagaaaacaaaacaaaacaaa

SEQ ID NO: 389315 - DNA, 354 bp, Homo sapiens
taccatgtgggttttctccttgcttcagctctccttataattatcagagagaaacattaagtgaggctctttatttctcatgcttttaggtgttaaatttctataagcttaaagtaataacttcaagaactcaatagatgaggtaatgtgctatgagaaatggaagtataaaattacttctaaataatcttagcatactgtgaaggatactgacttaggtatataattacattgtaaaatatagccttgtttttaaatatgagagagaaaagaataaaaggaaaacctaaaagttacagaacacgtactgacacacatatatgtacaaatgcatgtgtctattcatggctgtca

SEQ ID NO: 389316 - DNA, 911 bp, Homo sapiens
  misc_feature (497)..(497): n is a, c, g, or t
  misc_feature (501)..(502): n is a, c, g, or t
  misc_feature (557)..(557): n is a, c, g, or t
ggccccctccccggaaccggcggtcgagctacggtcgcggagcagtggaaccgagactgccccgcggagccgccggtatgagcgcccctcgccaccccgtgtcccaggcccggcctttctgacaagagctagacttcgggctccttgaggatattcagttttgtatgtttgaatatcctctcaccatgttcagcataaagtaccattcttaatgattatcctcaacaagacaggtgtgagagggttgctgttgtattgcaatcatggtgcagaaataccagtccccagtgagggtgtacaaatacccctttgaattaattatggctgcctatgaaaggaggttccctacatgtcctttgattccgatgttcgtgggcagtgacactgtgaatgaattcaagagcgaagatggggctattcatgtcattgaaaggcgctgcaagctggatgtagatgcacccagactgctgaagaagattgcaggagtcgattatgtncatnntgtccagaaaaatcactgaattctcgggaacgtactttgcacattgaggcttatnatgaaacgttttccaatcgggtcatcattaatgagcattgctgctacaccgttcaccctgaaacatgaagatcggaactgtattagaacagtctgcaagtttagcatattaaatctttctttggtcttcgaaagtacagtggcaaaaaattgcaatgaaacaatataacagcaacatcaacaacaggaaaggaaatcatccgaaatactaccatcgccaaatagaacgaagaaggcatacacctttgtgccccggcggagagccgcctaccaatcacgaccctcttcaaaagaatctcaacatccaccagaacacagcaggctcaagggccgacgcatccagaagatggcccag

SEQ ID NO: 389317 - DNA, 105 bp, Homo sapiens
gatcacttgatttttaagaaattaaaaattgcactaggtagaaatagtgtaccaggcaatagtccagctttagttttgtgtcatttttggtctctatttaaagca

SEQ ID NO: 389318 - DNA, 1148 bp, Homo sapiens
tacggaaagactagggtgtgaattcagcaatctctggttaggagaaaagtagcctagtttattacttcttcactacttttgcctggatgacctgaattttaatcaagaagttctttcctctctatatgcgctcccccattttcccacttttgtattgactttcccactattgtatttctaatgcaccttcttaatcactggagaaagctttgaggcatgtaagaggtcctagcaccattttcagtcttaaagtttcatagccaccagctttatgggactctattatcagccctttcaaacaaattcttcccttccctcacaatcccaagctattgatcttttctctaaggaagccttttgtattactaattaagactaggtgactatattaaaacagggttatcttctaaaagatttatataaatgataaaacagaggctaagtatttttgtaaggacagcaatttgaagtcagttaatgcctagagtgactgtttcattcttctgctatggctctggtgacttcctgataattctgtccgagcccctgtgtccagttccaggacctaagaatggaagagctctggaggctgaaggtggaagatggatccccctttcagggacagtgaaaggagggttaatctttcctgaagctgttagtctggtatctattagcacacatgagaattagaaaccttgcaactttagaaatagtatctgtgtagtaaatgctgtctgtgtaccaatttgtatagcttttaatagaaatatcttatttttggatggaaaatgtgtgtaagcttgtgactaaaatagttctggatggaagaccattcagtatcttctgaaaaaaaaattgtcttctggaactaaaacatgaaaaaaaaacctatccattattgcttttttttaaataaagaaaaccagtgctgtgtaatccatattttaccaatattaattatgtcttagaaccatttaagaatgatggtttacatatcctattttaaagtcaagattttaaagagcttttatttgttattactaattattgggagaatattgaaaaattttcaatttaaatgttgaattaaaaatgtaacctttttggctgggtgcggtggctcacgcctgtaatcccagtactttggg

SEQ ID NO: 389319 - DNA, 1094 bp, Homo sapiens
tacggaaagactagggtgtgaattcagcaatctctggttaggagaaaagtagcctagtttattacttcttcactacttttgcctggatgacctgaattttaatcaagaagttctttcctctctatatgcgctcccccattttcccacttttgtattgactttcccactattgtatttctaatgcaccttcttaatcactggagaaagctttgaggcatgtaagaggtcctagcaccattttcagtcttaaagtttcatagccaccagctttatgggactctattatcagccctttcaaacaaattcttcccttccctcacaatcccaagctattgatcttttctctaaggaagccttttgtattactaattaagactaggtgactatattaaaacagggttatcttctaaaagatttatataaatgattagagtgactgtttcattcttctgctatggctctggtgacttcctgataattctgtccgagcccctgtgtccagttccaggacctaagaatggaagagctctggaggctgaaggtggaagatggatccccctttcagggacagtgaaaggagggttaatctttcctgaagctgttagtctggtatctattagcacacatgagaattagaaaccttgcaactttagaaatagtatctgtgtagtaaatgctgtctgtgtaccaatttgtatagcttttaatagaaatatcttatttttggatggaaaatgtgtgtaagcttgtgactaaaatagttctggatggaagaccattcagtatcttctgaaaaaaaaattgtcttctggaactaaaacatgaaaaaaaaacctatccattattgcttttttttaaataaagaaaaccagtgctgtgtaatccatattttaccaatattaattatgtcttagaaccatttaagaatgatggtttacatatcctattttaaagtcaagattttaaagagcttttatttgttattactaattattgggagaatattgaaaaattttcaatttaaatgttgaattaaaaatgtaacctttttggctgggtgcggtggctcacgcctgtaatcccagtactttggg

SEQ ID NO: 389320 - DNA, 558 bp, Homo sapiens
gagtctacatgttaaaggacaaccttaactgtgaatttgctttctctgcattggacccttaatgttaatccattgtagtttattgggtgattatagtaaagaggtttttggtccaggaggagtatgaaggcattctgtaaatagcgtcctgcccatcctgacatggaaatgtttgtggcctttccctcttattactaatccctcctgcacaaaccctctcacatacttactcattttctatactttgtgatctattaggcactaaccaattttatttgtaagcttgtcaatatctgaatcttttaaaaataagtattagtgggctgggtatgttggttcacacctgtaatcctagcactttaagaggccaaggcagccagatcacttgaccccagttcaagaccaacatggcgaatcctcatctctactaaaaatacaagaaattagccaggtgcggtggcatgctgttgcccaggctggagtgtaatggcgggatctcagctcactgcagccacctcagccccccaagtagctgggaccacaagtgcatgtcgacgc

SEQ ID NO: 389321 - DNA, 665 bp, Homo sapiens
cgggagcagaacagctttggtgaggtggacaggaggtgacctcgcgagcagacgcgcgcgccagcgacagcagcccgccccggcctctcgggagccgtggggcagaggctgcggagccccaggagggccggagccctcatgacttcagtgacctgcttctgcccctctaggtctatcagccacagtctctgcaagtttccaagagcagcagaaaatgaacacattgcaggggccagtgtcattcaaagatgtggctgtggatttcacccaggaggagtggcagcaactggaccctgatgagaagatagcatacggggatgtgatgttggagaactacagccatctagtttctgtggggtatgattatcaccaagccaaacatcatcatggagtggaggtgaaggaagtggagcagggagaggagccgtggataatggaaggtgaatttccatgtcaacatagtccaggttcaagtgctggggccggcagtggagagttccacgtgtacagacatctgcgccggagagaatatcagcgaaggactacatggatgccatgggtgagaagcaaaaatggatgcagagtttcagaaaagatggaaaagaataaattgtgcagaggagcagaccgaagcgcggaagaagcgcagaagttaaaagagaaga

SEQ ID NO: 389322 - DNA, 425 bp, Homo sapiens
ccagccccctaggaataaggcctcttagaaagacagagagaactagaagttttagacccaaactatttggaattcattctttttctacggattttctcaaaacagtgttcttgttaccaaggggtccttgctcccagagctcccaagacggtggtgggccacttccaagacggtggtgggccgcttccaagatggcagaagccacttccaagatggtggcaagcctcatgttctctgacctggggttcttggcctcacggattccaaggaatggaatcttgggccatgcagtgagtgttatagctctattagaaaccatgggtcacagaagagaaccgtggaacccagtgactagtgttcagctcgattaggatgaatccaggcatttagccatgcaggaacaatggtgagtctttagcccaatg

SEQ ID NO: 389323 - DNA, 518 bp, Homo sapiens
gaaccagggcatttattgccagggagcacgttgaatcatgagaggggccagtatctcccagcagatgccagcatctgcccagagctcttgtggcctttctgggtctggctggcactcactcccaattcctcttgggacaataaaacttcttcccatttcccccaacaaagcctggcttctatggcaccccactgcccaggttcccaatctcaaggcaactgtcggtcaattttgattcattcagcttatacagtatgatctcaaacttgcacagctgctggcaacatagcctcacaaatttctatttaattgcatgaacggcatgtaatagactaattctcaatatctggttcctggaaaaatatgccctgctcactgttctcagtgacagggggcccaggcggtcagcactctcctgtaggacgggctgcaccagcagatgtaactgtccggaagaaggatatccagccatgtttgatgcttcgcagagctcacaacacaggaggagaatcactccc

SEQ ID NO: 389324 - DNA, 192 bp, Homo sapiens
ttgatttgattctcagcttggttgctgttggtgtatagggctactgacttaaatctaagacccaaaaccataaaaattctagaagataacattggaaaaacccttctagccattggcttaggcaaagacttcacaaccaagaacccaaaagcaaatgcaaagacaaaaataaaaataaataaatgggactca

SEQ ID NO: 389325 - DNA, 525 bp, Homo sapiens
accctggggccagatcaggcaagcctcatatgacctacatcaattggacatttttctatagtcagtgtaacgtcattgaaaggagtcctgtaaacagctgaaaagattaaagattactaagctggtagcagcctgtgggatggtttggtgtaggaaagttctagagccaaggagtcagattggcaagctaccgtaatcatctaggcaaaagagtcggggctggctgggcaaggtgggtcacacctgtaatcccagcactttgggaggccgaggcaggcaaatcacctgaggtcaggagttcaagaccagcctggccaacatggtgaaaccccgtctctacttaaaatacaaaaattagcccggcttggtggtaggcacctgtaatcccagccactggggaggctgaggcaggagaatcacttgaacccgggaggtggaggttgcagtgagctgagatcgcgccactgcactgcagcccgggcaacagagtgagactccttctcaaaagcaaaaaaaaaaaaaaaa

SEQ ID NO: 389326 - DNA, 450 bp, Homo sapiens
aagtaggaaggcatatattttggtagtatttgagtccgcttcttagtctgggtaacataccttagggggatacagtggtgtggcaaggagtaggcaaactcacagaattaaaatatgcatcttggtgcatcaattttccacaatggtaaaataagatactattttttaatgtggaagccaatagataagagtttagaatatattgcatatttgacataattttttaaagtaaattacatgtagagggttatcctaaccatctcctcaaatcctctccttcgttcttagatacacattggaagaaatatttgagaaaacagatactgaagtttttatcttatgttgggacttctgcaatgtaaagtaggttctgtctccagttttgtgccaaggagagaatggtgtccctacagtgacgtaggggctatgggtgccctccacacaaatatt

SEQ ID NO: 389327 - DNA, 410 bp, Homo sapiens
gccttgatacgcccaccgcacccccacccccacccccagctttggcattgaaattcttgtgtgtggtgcgcttgaaaggaatcccatcctgcctgcgtctgcggaggctcccggcccgtgtttggtcagcaagcaacagtgggtggtcgggctgctgtgcaggacaacggcccgctgtgcgcaggaaaatgtgttcaaaggtgtttaagggccatgaggaagtcggccacccttctgagagtctgaggctgcagatcagtgttccctacactattgtagactgtgagaaaacttgctgtagtaggcatgaaggatgagaaaatacagtaaccttactcacctggctccgtgtctgcaggcttcccttaagaagggtctcttctgccctttttgtggtatagagtctgtta

SEQ ID NO: 389328 - DNA, 338 bp, Homo sapiens
cacgcagtgtcctctccaggcaggcgcacccaggagggccaggagaagcaacactgtttagcaagggtcagcaacctctcaaggcctcaatgccacagctgcctccttaggggagggatgaaagaaggaagaggaagagagagggatagcgttctaggggtaaaagggccgtagaaagccaaagggtacgtacacaagccatggcccagtgcagctgcgccatggagcagccttggcctctggtgtctccctggcatgctcccaggactctgcccctggcatgaaggtcgtgacagaaacggggcactaagaaatcctcactggaagagtggcctccg

SEQ ID NO: 389329 - DNA, 482 bp, Homo sapiens
tgtgtctgctctgtgtctgctctgtgtctgctctgttgtctgctcctccccagtagctaagattacaggcacccatcaccacgcccagctaatttttgtattttttttagtagagacacagtttcaccgtgttggctaggctggtcttgaactcttgacctcaagtgatccacctgcctcggcctcccaaagtgccaggattacaggtgtgagccaccatgcccggcctaaattattatttagagattcagattgaagatattctcccattgattactttgtaaaagtacaaaatatttcctatatccagttgtgaatttcttctagaaagctaaactttttcctagtagatcatgacttttttacctttacaaataaagagtggcaagtataagaaatactgtgagccaacaactttccatctcatgtcttctaaaatagaaatgagaatctttttctgaggtttccagagctcttgcaaa

SEQ ID NO: 389330 - DNA, 820 bp, Homo sapiens
agccctgggcaattcaccttttctttaaatactcatgtcacatttgtgctgttgccaatgcttctcagaccctccagatgaggacatttccctgaggaggtggctatgatggtagaacttacaagacttcagtggacataagttgtgcatctgatcattatttaaacatcagaacaaatgaaaaagattctaaggagaaaaattaccacaagcattcaggcaatttgaaaccaaagctgttccagtacaagtatcacacaaagacattctggagaatggcagaaaagtgagcgaagccagaaaaacaacacttcaaaaggtctgtggaggagacggggtcaaggtggcaggcaagatggtcaaatagaagtagcttcagtctgcagctcccagtgagatcaacacagaagcctctgctggtgatacccaagcaaacagggtctggagtggacctccagcaaactccagcacacctgcagcagaggggcctgactgttagaaggaaaacgaacaaacagaaaggaatagcatcaacatcaacaaaaaggacatccacacaaaaaccccatctgaaggtcaccagcatcaaagacaaaggaaacaatgccaagaatacgttaatctaaacccatgatgtttctacatctcaaagaacagagagaaaaggaaactggagagaggccagaagtgaccaactctattccctcatttctgtgttatactccctttgtctaatcttccctaccctaccaggtggtttaagaattttatcctttctccagactagaagaggaagtgggggccggaattaggtgtatac

SEQ ID NO: 389331 - DNA, 446 bp, Homo sapiens
agccctgggcaattcaccttttctttaaatactcatgtcacatttgtgctgttgccaatgcttctcagaccctccagatgaggacatttccctgaggaggtggctatgatggtagaacttacaagacttcagtggacataaggagacggggtcaaggtggcaggcaagatggtcaaatagaagtagcttcagtctgcagctcccagtgagatcaacacagaaggaaacaatgccaagaatacgttaatctaaacccatgatgtttctacatctcaaagaacagagagaaaaggaaactggagagaggccagaagtgaccaactctattccctcatttctgtgttatactccctttgtctaatcttccctaccctaccaggtggtttaagaattttatcctttctccagactagaagaggaagtgggggccggaattaggtgtatac

SEQ ID NO: 389332 - DNA, 423 bp, Homo sapiens
cacccatgaggagaggatttgaccagccccagccagagggaaactgcccatcccagcagtccagaacctgagttgcagccagccttactactatgggctaaagtgctttgggatcctaaataaacttgaaagccagtcttatccacaaggactgcaattcttgggcaagtcccagtgctgtgctgggctcagagccagtagacttggggtacacgcgcctggtgagagagtagctggggcagctaaagaattatttgtgtcaccccccctcccccaaccttcacagtcccaggcagcacaactcgcagctccagaagactctttcattccacaagaggacaggagaggaaggagtgaagagaactttatcttgcaacttggataccagctcagccacagtagaggaggtagagtcgtgacaca

SEQ ID NO: 389333 - DNA, 364 bp, Homo sapiens
tctctggccattcacattggtcacatggccaagcccaacatcaataaagtgcggaaatatatttcatctaccctagtaagaaggagataataccaaatcactttgcaaaagggtgtgcaattctagaacaagaaaagaatgaagaattggggacaataatattctacaatattttttgcaatacatcatagtagacatttattacttttaatttcataaatatacttgcacactttgaggaataagctcatgataattaaggtaaaataatctacttgtaataataatttaaagttgaaaatttagccagaatttatgccagtttatattatgccagtttaggttaaacatacatttaaaaatt

SEQ ID NO: 389334 - DNA, 291 bp, Homo sapiens
ttattaaaatattgacattcctcccaatgcttcatttgtctagataaatgtagcccatggcacaaaaatacgttcttaggctgggcacagtggctcatgcctgtaatcccagcactttgggaggccaaggcagacggatcacttgaggtcaagagttcgagaccagcctggccaaaatggtggaactccatttctactaaaaatataaaaaattaactaggcgtggtggtgggcgcctgtagtcccagctactcaggaagctgaggcaacagaattgcttgaacctggggg

SEQ ID NO: 389335 - DNA, 309 bp, Homo sapiens
gaaatatgatagttcttttcaaagttgtggttgtatttttgaaatcttgccaaactggggatcattaaagggctgtggtattatggtgttaggttgaaatcttgacattttcatatggtttaacctaaaatgtaagtgacttcatttagaattcaacttttgaaactgtctgcctataccatatataatggccaggacactcagtaaatggcaatgtgcattttgtctaaggaatgacgactttaaaaaccaaagtatatgtgggttttacttaagaaacatggaaactagtgaaaatacagttgactt

SEQ ID NO: 389336 - DNA, 211 bp, Homo sapiens
ggctgacatcttggttacaacttcgtgagtgaccctgtgccagtagcacccagctaaatcactcctgaaatccagatccactgaaactgtgaggtaatacatatgtattgttttaagccattaagtttggggtatttgctacacagcaatagataactaataactatattatgacagtacaaggaaaaaaactgcctcgaatatatttttt

SEQ ID NO: 389337 - DNA, 1247 bp, Homo sapiens
ccccaggcgtgggaagatggaaccagaacaattcgaacgagcagagcaaaacagatcggaattgcagacttcaggtcgtggcagagaaaaccagctgagacagggcgccacttactagctctgaaagtctaggatattttgccactggaagaccagcagacaatgtcatgacaactcaagaggatacaacagggctgcatcaaaagacaagtctttggaccatgtcaagacctggagcgaagaaggtaatgaactcctacttcatagcaggctgtgggccagcagtttgctactacgctgtctcttggttaaggcaaggtttcagtatcaacctgacttcttttggaaggatcccttggcctcacgctggagtgggcacctgccctagcccacagagctggatttctccctttcttcaatcacacagggagcaccactatgcaaagacctcatcacattcacagccgtctccgcagagcctcgcactgtgcttggcatatagcaggtgctcaataaatatctgccaaatgactgaatgcatctcgctagcctcaggatgccaccaggccctgagggagccaggaagatcagaggaaagcttttggattcctgccacaccttacattagcaacatcttctccgagtcctgacagccagcctcctgggacaccattcaagccagctgaattccggtcaccgcttcaccttggaaaggcatccgcagccctcaccaagcggccccgtaattgacgtcacagcggggccaggagctgccctgttaatatttaatgtggccttcactgcgcaaaatgcagcctctaagagctggaggggccgtgcagagtctccatggggttgtgaggagggcacagaagggaaagggctttataaaccataaagcgcccaacagatgagcattctgccgacccatttcagtccctggcttaactcagaaagagccggggctgcacatgcctgcagtgggacaagaagactgctgaccaagcccgaacactaaatcaatgggggattaggggctcctgggtacattccattgagacagcgggagagcagagcactggtgccagcccaacctggactccactccaggtttgccccctgcacagctgtgtgactgggtcagcaagtgcactgctgagcctcagtcccccttatctgtgaaatgggaatgatgctttccttgtagcactgctgtgaagattcaatgaaacgagtgatgccgaaga

SEQ ID NO: 389338 - DNA, 4160 bp, Homo sapiens
ttgatttggtatagtgggaacatttgctttggagacagatgaactggattctgatcgtgaccctgctattttctccttgtgtgactttggagccatgagaccccagatcctgctgctcctggccctgctgaccctaggcctggctgcacaacaccaagacaaagtgccctgtaagatggtggacaagaaggtctcgtgccaggttctgggcctgctccaggtcccctcggtgctcccgccagacactgagacccttgatctatctgggaaccagctgcggagtatcctggcctcacccctgggcttctacacggcacttcgtcacctggacctgagcaccaatgagatcagcttcctccagccaggagccttccaggccctgacccacctggagcacctcagcctggctcacaaccggctggcgatggccactgcgctgagtgctggtggcctgggccccctgccacgcgtgacctccctggacctgtctgggaacagcctgtacagcggcctgctggagcggctgctgggggaggcacccagcctgcataccctctcactggcggagaacagtctgactcgcctcacccgccacaccttccgggacatgcctgcgctggagcagcttgacctgcatagcaacgtgctgatggacatcgaggatggcgccttcgagggcctgccccgcctgacccatctcaacctctccaggaattccctcacctgcatctccgacttcagcctccagcagctgcgggtgctagacctgagctgcaacagcatcgaggcctttcagacggcctcccagccccaggctgagttccagctcacctggcttgacctgcgggagaacaaactgctccatttccccgacctggccgcgctcccgagactcatctacctgaacttgtccaacaacctcatccggctccccacagggccaccccaggacagcaagggcatccacgcaccttccgagggctggtcagccctgcccctctcagcccccagcgggaatgccagcggccgccccctttcccagctcttgaatctggatttgagctacaatgagattgagctcatccccgacagctttcttgagcacctgacctccctgtgcttcctgaacctcagcagaaactgcttgcggacctttgaggcccggcgcttaggctccctgccctgcctgatgctccttgacttaagccacaatgccctggagacactggaactgggcgccagagccctggggtctctgcggacgctgctcctacagggcaatgccctgcgggacctgcccccatacacctttgccaatctggccagcctgcagcggctcaacctgcaggggaaccgagtcagcccctgtggggggccagatgagcctggcccctccggctgtgtggccttctccggcatcacctccctccgcagcctgagcctggtggataatgagatagagctgctcagggcaggggccttcctccacaccccactgactgagctggacctttcttccaatcctgggctggaggtggccacgggggccttgggaggcctggaggcctccttggaggtcctggcactgcagggcaacgggctgatggtcctgcaggtggacctgccctgcttcatctgcctcaagcggctcaatcttgccgagaaccgcctgagccaccttcccgcctggacacaggctgtgtcactggaggtgctggacctgcgcaacagcttcagcctcctgccaggcagtgccatgggtggcctggagaccagcctccggcgcctctacctgcaggggaatccactcagctgctgcggcaatggctggctggcagcccagctgcaccagggccgtgtggacgtggacgccacccaggacctgatctgccgcttcagctcccaggaggaggtgtccctgagccacgtgcgtcccgaggactgtgagaaggggggactgaagaacatcaacctcatcatcatcctcaccttcatactggtctctgccatcctcctcaccacgctggccgcctgctgctgcgtccgccggcagaagtttaaccaacagtataaagcctaaagaagccgggagacactctaggtcagtgggggagcctgaggtacagagaagagtgaggactgactcaaggtcacacagtgatccgggatcccagaactctggtctccaaattacagcccaggacacctttctctgccgcctgctgcatcagtgggtgacccccttcccgggctgcactttgggtccagctgtggaagccagaagttgggcggtttcagggacagccgagaataatgttgacctgtcagatcaacaaatcttcactgagcatgtattttgtgccacaccctgctctgggcactgggaatgctgggaaatgagatacattcccgccctcaagaatctcccagtctggtaggagagagtgctgcagagccacgtggccgccacgcagtgtgcttagggcctgaggtgtgaaagcccagggctccagagctcggcaggccccgctggtttggtgcggtgagtcctgccccggctgtgccagggtgagggagggccaagcccaggaggatttgtctgagacatttccaagcagactgtttgtcacgtcttctgagaatgactttcagtctctctgaaaatgaaaagcttaggaccggaagagagaattggagctgtacgagtgtgtctcggatctggtgttgttaggtgggccacggcggctccagcagggtctggttaaggggtccagcccagcactggaccattccgtctcctgctctggacttgccctctcccttcctggcactctcatgttgcataccctgaccccagtgctgctctaagcaccgtccctgcccagccccacttctccatcgcagccccaccttggctgctgagccaggagctaaaaccttagatatctggttctgttttgcacccagcttggcagatgtggatttgaatccaagccttgtgtctgcccctatgtgacagctctatattttatccccgttttataaaagaggaaactgaagttctgaaaatctccttccagggccccagctaactaatgccataggtgagattcaaaccttcatccttctgtctccagggcctgatctttaccactgcaggggctgcaggccgttaagtggacaggaagtggccccacatagcccgagcagggtctggaagcatcctgtgctgtgcacacctgctctctcctctctcccaggcaggcagctgcaggcgctctcctccttctctgcctgtttccctcctcccttcctttccaccctggtgtgggttctcctgttctctctgtgctcttgcattctctcattcccttttcctctattgagcagagcctggagtttgagactatggaatccaacctccccattgcacagatggggaaactgaggcttaggaagagaatgaaacttgtggagagcttatacagagcctctgggggaaaaaagagcccttatttgtggggtgagattgggggttggaccagagtgatgtcctctctcagctatcacatcacaagataatgctggctccaaacttcctttctgtgcctcatcatgcaaggatcttttttccctcttacaaaaacaggtaaaaagcctcacccagatgacccccatccctcataccatggagtcatgagctgtctgggaagaatggacgtgctgggaccaactcaagaccttgttttgctgtcttcatcatcttacctgtgcttggcccacagtctggctcatgatgtgggctcagtaatgtgcgagaaagtgaaaatgccactctctccaccccattttacagaggagaacaccaaggcccagaggaagttaagggagagtcaatgggcagagccagggctaggccctggtggtgtgtggagcacccaggcagacccagtcctggttgggatcacacccacgggtgctactgcacgtaacactcctccttaggcctggaggccaaggtgtgggtccccacgcctgatctttgaaaacactacacagggctgctgtcacttcccagggcccaggcctcagcccaggcctcgggaccaactctttgtataacctacctgaatgtattaaaaactaattttggagaagca

SEQ ID NO: 389339 - DNA, 626 bp, Homo sapiens
  misc_feature (555)..(555): n is a, c, g, or t
tgcatcaacgcgttgggagctctccatattgtcgacctgcaggcggcgcgaattcactagtgattatcccctgctctgggcactgggaatgctgggaaatgagatacattcccgccctcaagaatctcccagtctggtaggagagagtgctgcagagccacgtggccgccacgcagtgtgcttagggcctgaggtgtgaaagcccagggctccagagctcggcaggccccgctggtttggtgcggtgagtcctgccccggctgtgccagggtgagggagggccaagcccaggaggatttgtctgagacatttccaagcagactgtttgtcacgtcttctgagaatgactttcagtctctctgaaaatgaaaagcttaggaccggaagagagaattggagctgtacgagtgtgtctcggatctggtgttgttaggtgggccacggcggctccagcagggtctggttaaggggtccagcccagcactggaccattccgtctcctgctctggacttgccctctcccttcctggcactctcatgttgcatacccagganccggggataatcactagtgaattcgcgccgcctgcaggtcgacatatgagagctccctacgcgttgatgca

SEQ ID NO: 389340 - DNA, 2654 bp, Homo sapiens
tccggggggcagctgagcggcctgctcctcctcgggccgtgaccccggggtctggcgcggggtgggacccgggggcgggtttgcgcaaaatgtgccgagactgcccgggagaggagctgcggccgcgctgagccagagccatgagaccccagatcctgctgctcctggccctgctgaccctaggcctggctgcacaacaccaagacaaagtgccctgtaagatggtggacaagaaggtctcgtgccaggttctgggcctgctccaggtcccctcggtgctcccgccagacactgagacccttgatctatctgggaaccagctgcggagtatcctggcctcacccctgggcttctacacggcacttcgtcacctggacctgagcaccaatgagatcagcttcctccagccaggagccttccaggccctgacccacctggagcacctcagcctggctcacaaccggctggcgatggccactgcgctgagtgctggtggcctgggccccctgccacgcgtgacctccctggacctgtctgggaacagcctgtacagcggcctgctggagcggctgctgggggaggcacccagcctgcataccctctcactggcggagaacagtctgactcgcctcacccgccacaccttccgggacatgcctgcgctggagcagcttgacctgcatagcaacgtgctgatggacatcgaggatggcgccttcgagggcctgccccgcctgacccatctcaacctctccaggaattccctcacctgcatctccgacttcagcctccagcagctgcgggtgctagacctgagctgcaacagcatcgaggcctttcagacggcctcccagccccaggctgagttccagctcacctggcttgacctgcgggagaacaaactgctccatttccccgacctggccgcgctcccgagactcatctacctgaacttgtccaacaacctcatccggctccccacagggccaccccaggacagcaagggcatccacgcaccttccgagggctggtcagccctgcccctctcagcccccagcgggaatgccagcggccgccccctttcccagctcttgaatctggatttgagctacaatgagattgagctcatccccgacagctttcttgagcacctgacctccctgtgcttcctgaacctcagcagaaactgcttgcggacctttgaggcccggcgcttaggctccctgccctgcctgatgctccttgacttaagccacaatgccctggagacactggaactgggcgccagagccctggggtctctgcggacgctgctcctacagggcaatgccctgcgggacctgcccccatacacctttgccaatctggccagcctgcagcggctcaacctgcaggggaaccgagtcagcccctgtggggggccagatgagcctggcccctccggctgtgtggccttctccggcatcacctccctccgcagcctgagcctggtggataatgagatagagctgctcagggcaggggccttcctccacaccccactgactgagctggacctttcttccaatcctgggctggaggtggccacgggggccttgggaggcctggaggcctccttggaggtcctggcactgcagggcaacgggctgatggtcctgcaggtggacctgccctgcttcatctgcctcaagcggctcaatcttgccgagaaccgcctgagccaccttcccgcctggacacaggctgtgtcactggaggtgctggacctgcgcaacagcttcagcctcctgccaggcagtgccatgggtggcctggagaccagcctccggcgcctctacctgcaggggaatccactcagctgctgcggcaatggctggctggcagcccagctgcaccagggccgtgtggacgtggacgccacccaggacctgatctgccgcttcagctcccaggaggaggtgtccctgagccacgtgcgtcccgaggactgtgagaaggggggactgaagaacatcaacctcatcatcatcctcaccttcatactggtctctgccatcctcctcaccacgctggccgcctgctgctgcgtccgccggcagaagtttaaccaacagtataaagcctaaagaagccgggagacactctagaaagcctcacccagatgacccccatccctcataccatggagtcatgagctgtctgggaagaatggacgtgctgggaccaactcaagaccttgttttgctgtcttcatcatcttacctgtgcttggcccacagtctggctcatgatgtgggctcagtaatgtgcgagaaagtgaaaatgccactctctccaccccattttacagaggagaacaccaaggcccagaggaagttaagggagagtcaatgggcagagccagggctaggccctggtggtgtgtggagcacccaggcagacccagtcctggttgggatcacacccacgggtgctactgcacgtaacactcctccttaggcctggaggccaaggtgtgggtccccacgcctgatctttgaaaacactacacagggctgctgtcacttcccagggcccaggcctcagcccaggcctcgggaccaactctttgtataacctacctgaatgtattaaaaactaattttggagaagca

SEQ ID NO: 389341 - DNA, 731 bp, Homo sapiens
tccggggggcagctgagcggcctgctcctcctcgggccgtgaccccggggtctggcgcggggtgggacccgggggcgggtttgcgcaaaatgtgccgagactgcccgggagaggagctgcggccgcgctgagccagagccatgagaccccagatcctgctgctcctggccctgctgaccctaggcctggctgcacaacaccaagacaaagtgccctgtaagatgaaagcctcacccagatgacccccatccctcataccatggagtcatgagctgtctgggaagaatggacgtgctgggaccaactcaagaccttgttttgctgtcttcatcatcttacctgtgcttggcccacagtctggctcatgatgtgggctcagtaatgtgcgagaaagtgaaaatgccactctctccaccccattttacagaggagaacaccaaggcccagaggaagttaagggagagtcaatgggcagagccagggctaggccctggtggtgtgtggagcacccaggcagacccagtcctggttgggatcacacccacgggtgctactgcacgtaacactcctccttaggcctggaggccaaggtgtgggtccccacgcctgatctttgaaaacactacacagggctgctgtcacttcccagggcccaggcctcagcccaggcctcgggaccaactctttgtataacctacctgaatgtattaaaaactaattttggagaagca

SEQ ID NO: 389342 - DNA, 2970 bp, Homo sapiens
  misc_feature (2899)..(2899): n is a, c, g, or t
tccggggggcagctgagcggcctgctcctcctcgggccgtgaccccggggtctggcgcggggtgggacccgggggcgggtttgcgcaaaatgtgccgagactgcccgggagaggagctgcggccgcgctgagccagagccatgagaccccagatcctgctgctcctggccctgctgaccctaggcctggctgcacaacaccaagacaaagtgccctgtaagatggtggacaagaaggtctcgtgccaggttctgggcctgctccaggtcccctcggtgctcccgccagacactgagacccttgatctatctgggaaccagctgcggagtatcctggcctcacccctgggcttctacacggcacttcgtcacctggacctgagcaccaatgagatcagcttcctccagccaggagccttccaggccctgacccacctggagcacctcagcctggctcacaaccggctggcgatggccactgcgctgagtgctggtggcctgggccccctgccacgcgtgacctccctggacctgtctgggaacagcctgtacagcggcctgctggagcggctgctgggggaggcacccagcctgcataccctctcactggcggagaacagtctgactcgcctcacccgccacaccttccgggacatgcctgcgctggagcagcttgacctgcatagcaacgtgctgatggacatcgaggatggcgccttcgagggcctgccccgcctgacccatctcaacctctccaggaattccctcacctgcatctccgacttcagcctccagcagctgcgggtgctagacctgagctgcaacagcatcgaggcctttcagacggcctcccagccccaggctgagttccagctcacctggcttgacctgcgggagaacaaactgctccatttccccgacctggccgcgctcccgagactcatctacctgaacttgtccaacaacctcatccggctccccacagggccaccccaggacagcaagggcatccacgcaccttccgagggctggtcagccctgcccctctcagcccccagcgggaatgccagcggccgccccctttcccagctcttgaatctggatttgagctacaatgagattgagctcatccccgacagctttcttgagcacctgacctccctgtgcttcctgaacctcagcagaaactgcttgcggacctttgaggcccggcgcttaggctccctgccctgcctgatgctccttgacttaagccacaatgccctggagacactggaactgggcgccagagccctggggtctctgcggacgctgctcctacagggcaatgccctgcgggacctgcccccatacacctttgccaatctggccagcctgcagcggctcaacctgcaggggaaccgagtcagcccctgtggggggccagatgagcctggcccctccggctgtgtggccttctccggcatcacctccctccgcagcctgagcctggtggataatgagatagagctgctcagggcaggggccttcctccacaccccactgactgagctggacctttcttccaatcctgggctggaggtggccacgggggccttgggaggcctggaggcctccttggaggtcctggcactgcagggcaacgggctgatggtcctgcaggtggacctgccctgcttcatctgcctcaagcggctcaatcttgccgagaaccgcctgagccaccttcccgcctggacacaggctgtgtcactggaggtgctggacctgcgcaacagcttcagcctcctgccaggcagtgccatgggtggcctggagaccagcctccggcgcctctacctgcaggggaatccactcagctgctgcggcaatggctggctggcagcccagctgcaccagggccgtgtggacgtggacgccacccaggacctgatctgccgcttcagctcccaggaggaggtgtccctgagccacgtgcgtcccgaggactgtgagaaggggggactgaagaacatcaacctcatcatcatcctcaccttcatactggtctctgccatcctcctcaccacgctggccgcctgctgctgcgtccgccggcagaagtttaaccaacagtataaagcctaaagaagccgggagacactctaggtcagtgggggagcctgaggtacagagaagagtgaggactgactcaaggtcacacagtgatccgggatcccagaactctggtctccaaattacagcccaggacacctttctctgccgcctgctgcatcagtgggtgacccccttcccgggctgcactttgggtccagctgtggaagccagaagttgggcggtttcagggacagccgagaataatgttgacctgtcagatcaacaaatcttcactgagcatgtattttgtgccacaccctgctctgggcactgggaatgctgggaaatgagatacattcccgccctcaagaatctcccagtctggtaggagagagtgctgcagagccacgtggccgccacgcagtgtgcttagggcctgaggtgtgaaagcccagggctccagagctcggcaggccccgctggtttggtgcggtgagtcctgccccggctgtgccagggtgagggagggccaagcccaggaggatttgtctgagacatttccaagcagactgtttgtcacgtcttctgagaatgactttcagtctctctgaaaatgaaaagcttaggaccggaagagagaattggagctgtacgagtgtgtctcggatctggtgttgttaggtgggccacggcggctccagcagggtctggttaaggggtccagcccagcactggaccattccgtctcctgctctggacttgccctctcccttcctggcactctcatgttgcatacccagganccggggataatcactagtgaattcgcgccgcctgcaggtcgacatatgagagctccctacgcgttgatgca

SEQ ID NO: 389343 - DNA, 4206 bp, Homo sapiens
tccggggggcagctgagcggcctgctcctcctcgggccgtgaccccggggtctggcgcggggtgggacccgggggcgggtttgcgcaaaatgtgccgagactgcccgggagaggagctgcggccgcgctgagccagagccatgagaccccagatcctgctgctcctggccctgctgaccctaggcctggctgcacaacaccaagacaaagtgccctgtaagatggtggacaagaaggtctcgtgccaggttctgggcctgctccaggtcccctcggtgctcccgccagacactgagacccttgatctatctgggaaccagctgcggagtatcctggcctcacccctgggcttctacacggcacttcgtcacctggacctgagcaccaatgagatcagcttcctccagccaggagccttccaggccctgacccacctggagcacctcagcctggctcacaaccggctggcgatggccactgcgctgagtgctggtggcctgggccccctgccacgcgtgacctccctggacctgtctgggaacagcctgtacagcggcctgctggagcggctgctgggggaggcacccagcctgcataccctctcactggcggagaacagtctgactcgcctcacccgccacaccttccgggacatgcctgcgctggagcagcttgacctgcatagcaacgtgctgatggacatcgaggatggcgccttcgagggcctgccccgcctgacccatctcaacctctccaggaattccctcacctgcatctccgacttcagcctccagcagctgcgggtgctagacctgagctgcaacagcatcgaggcctttcagacggcctcccagccccaggctgagttccagctcacctggcttgacctgcgggagaacaaactgctccatttccccgacctggccgcgctcccgagactcatctacctgaacttgtccaacaacctcatccggctccccacagggccaccccaggacagcaagggcatccacgcaccttccgagggctggtcagccctgcccctctcagcccccagcgggaatgccagcggccgccccctttcccagctcttgaatctggatttgagctacaatgagattgagctcatccccgacagctttcttgagcacctgacctccctgtgcttcctgaacctcagcagaaactgcttgcggacctttgaggcccggcgcttaggctccctgccctgcctgatgctccttgacttaagccacaatgccctggagacactggaactgggcgccagagccctggggtctctgcggacgctgctcctacagggcaatgccctgcgggacctgcccccatacacctttgccaatctggccagcctgcagcggctcaacctgcaggggaaccgagtcagcccctgtggggggccagatgagcctggcccctccggctgtgtggccttctccggcatcacctccctccgcagcctgagcctggtggataatgagatagagctgctcagggcaggggccttcctccacaccccactgactgagctggacctttcttccaatcctgggctggaggtggccacgggggccttgggaggcctggaggcctccttggaggtcctggcactgcagggcaacgggctgatggtcctgcaggtggacctgccctgcttcatctgcctcaagcggctcaatcttgccgagaaccgcctgagccaccttcccgcctggacacaggctgtgtcactggaggtgctggacctgcgcaacagcttcagcctcctgccaggcagtgccatgggtggcctggagaccagcctccggcgcctctacctgcaggggaatccactcagctgctgcggcaatggctggctggcagcccagctgcaccagggccgtgtggacgtggacgccacccaggacctgatctgccgcttcagctcccaggaggaggtgtccctgagccacgtgcgtcccgaggactgtgagaaggggggactgaagaacatcaacctcatcatcatcctcaccttcatactggtctctgccatcctcctcaccacgctggccgcctgctgctgcgtccgccggcagaagtttaaccaacagtataaagcctaaagaagccgggagacactctaggtcagtgggggagcctgaggtacagagaagagtgaggactgactcaaggtcacacagtgatccgggatcccagaactctggtctccaaattacagcccaggacacctttctctgccgcctgctgcatcagtgggtgacccccttcccgggctgcactttgggtccagctgtggaagccagaagttgggcggtttcagggacagccgagaataatgttgacctgtcagatcaacaaatcttcactgagcatgtattttgtgccacaccctgctctgggcactgggaatgctgggaaatgagatacattcccgccctcaagaatctcccagtctggtaggagagagtgctgcagagccacgtggccgccacgcagtgtgcttagggcctgaggtgtgaaagcccagggctccagagctcggcaggccccgctggtttggtgcggtgagtcctgccccggctgtgccagggtgagggagggccaagcccaggaggatttgtctgagacatttccaagcagactgtttgtcacgtcttctgagaatgactttcagtctctctgaaaatgaaaagcttaggaccggaagagagaattggagctgtacgagtgtgtctcggatctggtgttgttaggtgggccacggcggctccagcagggtctggttaaggggtccagcccagcactggaccattccgtctcctgctctggacttgccctctcccttcctggcactctcatgttgcataccctgaccccagtgctgctctaagcaccgtccctgcccagccccacttctccatcgcagccccaccttggctgctgagccaggagctaaaaccttagatatctggttctgttttgcacccagcttggcagatgtggatttgaatccaagccttgtgtctgcccctatgtgacagctctatattttatccccgttttataaaagaggaaactgaagttctgaaaatctccttccagggccccagctaactaatgccataggtgagattcaaaccttcatccttctgtctccagggcctgatctttaccactgcaggggctgcaggccgttaagtggacaggaagtggccccacatagcccgagcagggtctggaagcatcctgtgctgtgcacacctgctctctcctctctcccaggcaggcagctgcaggcgctctcctccttctctgcctgtttccctcctcccttcctttccaccctggtgtgggttctcctgttctctctgtgctcttgcattctctcattcccttttcctctattgagcagagcctggagtttgagactatggaatccaacctccccattgcacagatggggaaactgaggcttaggaagagaatgaaacttgtggagagcttatacagagcctctgggggaaaaaagagcccttatttgtggggtgagattgggggttggaccagagtgatgtcctctctcagctatcacatcacaagataatgctggctccaaacttcctttctgtgcctcatcatgcaaggatcttttttccctcttacaaaaacaggtaaaaagcctcacccagatgacccccatccctcataccatggagtcatgagctgtctgggaagaatggacgtgctgggaccaactcaagaccttgttttgctgtcttcatcatcttacctgtgcttggcccacagtctggctcatgatgtgggctcagtaatgtgcgagaaagtgaaaatgccactctctccaccccattttacagaggagaacaccaaggcccagaggaagttaagggagagtcaatgggcagagccagggctaggccctggtggtgtgtggagcacccaggcagacccagtcctggttgggatcacacccacgggtgctactgcacgtaacactcctccttaggcctggaggccaaggtgtgggtccccacgcctgatctttgaaaacactacacagggctgctgtcacttcccagggcccaggcctcagcccaggcctcgggaccaactctttgtataacctacctgaatgtattaaaaactaattttggagaagca

SEQ ID NO: 389344 - DNA, 1862 bp, Homo sapiens
tgcatcaacgcgttgggagctctccatattgtcgacctgcaggcggcgcgaattcactagtgattatcccctgctctgggcactgggaatgctgggaaatgagatacattcccgccctcaagaatctcccagtctggtaggagagagtgctgcagagccacgtggccgccacgcagtgtgcttagggcctgaggtgtgaaagcccagggctccagagctcggcaggccccgctggtttggtgcggtgagtcctgccccggctgtgccagggtgagggagggccaagcccaggaggatttgtctgagacatttccaagcagactgtttgtcacgtcttctgagaatgactttcagtctctctgaaaatgaaaagcttaggaccggaagagagaattggagctgtacgagtgtgtctcggatctggtgttgttaggtgggccacggcggctccagcagggtctggttaaggggtccagcccagcactggaccattccgtctcctgctctggacttgccctctcccttcctggcactctcatgttgcataccctgaccccagtgctgctctaagcaccgtccctgcccagccccacttctccatcgcagccccaccttggctgctgagccaggagctaaaaccttagatatctggttctgttttgcacccagcttggcagatgtggatttgaatccaagccttgtgtctgcccctatgtgacagctctatattttatccccgttttataaaagaggaaactgaagttctgaaaatctccttccagggccccagctaactaatgccataggtgagattcaaaccttcatccttctgtctccagggcctgatctttaccactgcaggggctgcaggccgttaagtggacaggaagtggccccacatagcccgagcagggtctggaagcatcctgtgctgtgcacacctgctctctcctctctcccaggcaggcagctgcaggcgctctcctccttctctgcctgtttccctcctcccttcctttccaccctggtgtgggttctcctgttctctctgtgctcttgcattctctcattcccttttcctctattgagcagagcctggagtttgagactatggaatccaacctccccattgcacagatggggaaactgaggcttaggaagagaatgaaacttgtggagagcttatacagagcctctgggggaaaaaagagcccttatttgtggggtgagattgggggttggaccagagtgatgtcctctctcagctatcacatcacaagataatgctggctccaaacttcctttctgtgcctcatcatgcaaggatcttttttccctcttacaaaaacaggtaaaaagcctcacccagatgacccccatccctcataccatggagtcatgagctgtctgggaagaatggacgtgctgggaccaactcaagaccttgttttgctgtcttcatcatcttacctgtgcttggcccacagtctggctcatgatgtgggctcagtaatgtgcgagaaagtgaaaatgccactctctccaccccattttacagaggagaacaccaaggcccagaggaagttaagggagagtcaatgggcagagccagggctaggccctggtggtgtgtggagcacccaggcagacccagtcctggttgggatcacacccacgggtgctactgcacgtaacactcctccttaggcctggaggccaaggtgtgggtccccacgcctgatctttgaaaacactacacagggctgctgtcacttcccagggcccaggcctcagcccaggcctcgggaccaactctttgtataacctacctgaatgtattaaaaactaattttggagaagca

SEQ ID NO: 389345 - DNA, 562 bp, Homo sapiens
ggctcaacaaggttatcagtgagctgaatggaaaaaacattgaagacgccattgcaaagcctcacccagatgacccccatccctcataccatggagtcatgagctgtctgggaagaatggacgtgctgggaccaactcaagaccttgttttgctgtcttcatcatcttacctgtgcttggcccacagtctggctcatgatgtgggctcagtaatgtgcgagaaagtgaaaatgccactctctccaccccattttacagaggagaacaccaaggcccagaggaagttaagggagagtcaatgggcagagccagggctaggccctggtggtgtgtggagcacccaggcagacccagtcctggttgggatcacacccacgggtgctactgcacgtaacactcctccttaggcctggaggccaaggtgtgggtccccacgcctgatctttgaaaacactacacagggctgctgtcacttcccagggcccaggcctcagcccaggcctcgggaccaactctttgtataacctacctgaatgtattaaaaactaattttggagaagca

SEQ ID NO: 389346 - DNA, 330 bp, Homo sapiens
aatctaatatttagatcactataccacagtagagcaggtattcaaaatgttttaaagttactgctgcctaaagttgttcttctagaacgagctcttattttaaacgctatttgggtcagatgatggggtcactgtaagatggataacaactctaacagattactggttatacaattcgagtgttcaaaaataaaatgccagtggtctactctcttactccttgccgaaccaattttagagtggaaacaaaaaggacagagcactgggcaacccattcaggtccccttccacactgttgaagctttgttctttcgctcttcacaataaatc

SEQ ID NO: 389347 - DNA, 289 bp, Homo sapiens
ttttcttcttatggaagtgtgcctcatgggtattaagtattgcagtactttgtagactttgtctgacttcgtgaagcatttctagttttagaagagtgctcctaattcaaaggtaggggaaggcatgtgcaaaaaagccgccctttccactctatattctgctgatcagcaacactatttgtcatcaaattaccggaacagagactatcttgagtcagaaggttatgttgttgctctctgttcttaggaatgtttttgtactctgagagtaaagataatttttcctgtt

SEQ ID NO: 389348 - DNA, 831 bp, Homo sapiens
ggccagagagtctttattacagtggtttgctattgaaatgtgcaaacaatatgatatatgagtcagtactacagactggttaaacagggtacaacatctaaagccaagcatagtggtatgtacctttggtcccagctactctggagactgagttgggaggatctcttgagcccaggagttccagagcagcctgagcaatgtagcaagaacccatctcttaaaaaacaaataaaaacagtccatgaaacataaagtttgaaataaagattaaaagatatatgccaggaaaatgtaaccctttcccatcccacaaaaaaaaaagaataaataccagataacaaggaatttaagacaaaaaaatttggatataaaatggtcatgtattatgataaaagttctaattccaccaggacaaaaaaaaatttaaacttgtgcgtgtctaaatacataattttccatatacataaagaaaaaacaatgtaactgcagagagaaataaataaatatatcatgattgtagaaactttgtcatacctctctcagtagttagtctatgaaaataataataaaaaaatgataaggctatataaaatttggacttaagataatttaaaagctttaactattcaatgtatattaattggtgcatttaacaactggaaaacacacctttgctttccaagtactgttttataaaagttgatgacatataaagtgataaaaccagttctaacatatttttaaaaacaagtaccatagagaatatgttctttgaacacaatgcacttaagctagaaatcaataacaagataacataaaatatcatatatt

SEQ ID NO: 389349 - DNA, 333 bp, Homo sapiens
agcttcccaaagtgctgggattacaggcgtgagccactgcgacctgcctatcctcacagcttttatcccacttgattaaatgcttccagtcagtggttgctttttcccatgatgcttttttaaatagataagattgaataaggtacacaatagctgcgtattcctaaataatatctttcagaaatgtgctcatcatacatggacagatagaaatagaactttcattctgtagtctcttttattctgagagtgtgtcactgagggtgagtattcagactggtgtacatgtagcaactgtttggcagagggaaaagctgtctttgttgtcagaga

SEQ ID NO: 389350 - DNA, 463 bp, Homo sapiens
ttttattttattttgagacagagttttgctcttgttgcccaggctggagtgcaatggcacgatctcagcttactgcaacctcgatctcccaggttcaagtgattctcctgcctcagcctcctgagtagctgggattacaggcgtgtgccacgatgccaggctaattttttttgtatttttagtggagacggggtttcgccatgtcggccaggctggtctcgaactcctgacctcaggtgatccgcccacagcctcccaaagtgctgggattacaggcttgagccaccaagtctggccaaggggacttttaagggggctggaaatggtctccattttgattgtgaggtggtggctacaagattgcatgcatttgtcaaactcatagaactgcacactgaaaagagtgaattgtactgtatgtcaattatacctaaataaatctgacttaacaaaaaaataaaac

SEQ ID NO: 389351 - DNA, 787 bp, Homo sapiens
gtggacttccatttcctctctgtaaaatgagagaagtgactgacattgggtagttttctaaggctcctttcaaccataagagaaaactgggaagtctaagtagctcaatagattgcttttttctgaagatggagggaagattggaaaattcagcctttactagaataaatggttaacatacaatttttttcaacaagtttatttaatgtcagcttttaatttcttttatttatttattttttctgagacagagtctcactctgatgccctggctggagtgccgtggtgagatcacagctcactacagcctccgcttcccaagttcaagagactcttgtgcctcagcctcccgagtagctgggattacaggcacccaccaccacgtctggctaattttttggattttgggtagagacaaggtttcaccatgttgcccaggctggtctcgaactcctgaactcaagggatccacccacctcagcctcccaaagtgctgagataacagccatgagccactgcacctgcctcttaatttctaattgaaataaaagtgtaaatttttccatttttacttccccaaagaagaagaaaattccttttgaggaaatgaaaatgtttattaatgggccccagatatatctatcaatattcctttttgatccaaaagatgtaactttttattatgggcttctattacatcaatagttgggatactgtattggaaaccatttagttttaggaacaaaagggtaaatattaacctatatggtgttattctcaagaaact

SEQ ID NO: 389352 - DNA, 627 bp, Homo sapiens
atatattctagctgtcaaacattatggcacatttttctgtttctgcctcattagaaagaatcactaggagagattctttgcagtaattatcacacaaacttctcatcttgattaggtgttatcttctggctcatttggcaggaagatttgaggagcaaatacccataaacttcacgatcacctacaggctataaggaatgagattgcatatacaggctggattttaagttgataatgtttcatactttacttggaaacatagtcctgaagcgttgcatattggaaaggatattaatgttatattaatattagagatgtcatgaatttaactcgtatatctgctatttactggttttctttgattctgggatagttaccttaattttctcatttgtaaaagtctacaacataggatagcaaggcataatattttggggtgatgaaatgaggtgctctatttaaaagaatatttcttacacagacttataaagaaagatatattgtatcatcagtgatattaattcatgggactccagtttggtggcccatgccatatgattgtagacagtattacacaaaatgttaacaactaaacatcgcttaccctaggagaaagattttttaaga

SEQ ID NO: 389353 - DNA, 367 bp, Homo sapiens
  misc_feature (54)..(54): n is a, c, g, or t
ctgcagtgtagcccagtgctagcaggacacgtgtatacctgaggatggcaaggntgctggggctcagagtctgcacttggttttggttttctttgagacaaggtctcgctctgtctccaggccggagtgcaatggctgggaaatcagatcttttctggactgaaaacattggccagatgagagtgagacaccgcagtaagcgtgcagggttccagatggtggcagtggcacacggtattatttattcagacctcttctctcccgcattctcttagtagcaggagatttcacatgcaggagccaatgtacatgtatttactttgcctgacttctgtttttttgtgtggattttttttattttattttt

SEQ ID NO: 389354 - DNA, 143 bp, Homo sapiens
agtgtgtgctgtaaggtcgacaatggtggccttatcttagtggctgtcaatctctctcctggactcccgcagtcctctcctaactgtaccccatttcttcttccttagtgtttcacagtggcttaccacatggtagccagggc

SEQ ID NO: 389355 - DNA, 482 bp, Homo sapiens
atgtcattttcccatggcagattatatcattagcccatgaatatatctccccaagctaagaatctattaatactgtctgtagaggtgtctaataaatattcaaagattgagttggagcagatgatgattaagagtaagtgtatgtttgtaagtctctggatttccataattgtaaaagaggaaaaaagatattaggaagattaagttgctaaagttttctgttcaaataatatgttcaataaacattagtaatttgacttttattttctgtttatctcttcataaggtgcaaaatgctgaatgttttacgtcttaatgaacttaggagcaattaaggagactcatcatttcacaagcttgaaatttaggctattaatatttgatcagtccatttttatcttattaggtaaccattaattttagagttttaaatgaaactgaaaaccagtagcataattcgaccatctgttaaaaaaaaaaaa

SEQ ID NO: 389356 - DNA, 401 bp, Homo sapiens
tgaagaaggaaggtaggaacggtagaaagaactccggcaatgaaaggtggtgcagacaaaggagttcaagtgttccgttctggggccagaccgcctaaattccaatcctagccttgacttttagtatctatattatcataaactagctctttgtgtgtctcagtttatctgtaaaattagggaaacaatagtgtcttctccatggaactgctgtgaatattaaacagctttatcatacataaatcatgtagaataatatctgccacatgattagcactagaaaaatagatctcattatagctggttcatcagaagcccagctgtcaactggacttgtggctggtgtctgaattaatgggggtgggcagccttgcagaactgagcccataacctatagggtc

SEQ ID NO: 389357 - DNA, 596 bp, Homo sapiens
tttggtcgctcagaggatcccccagtcctacacttgctgcaacctgggggcagctgcgaatgaaacagtaagcattgcttcaaatcatatcttgagctctgctaattaagaaatgaagtccaggcagacctaaatccttccctttccttaagtgtcagacactgtcccatacatgttaatttccagcagtgcccaagagactcccaataacacagaacactagggtaaagatgggcttggtatccgaggacctcacactctcaagtgcaatgatagccagcagcgatgtgcacaaacacacaatatatgaatacttctccttgccccatattagttacagggaagaaaagaggagtctaaaatatattctgcttttgccccaagaggctttatttaattcactttagtgcattttgcccactatcatgtaattattgtgtatcaactgcatgggaatatggagattgtctcagcctcaagtaagtcacagcagtaataggaacagacagacaagtatagcaataggcaattagcctctccccatatctatcttgacccctctgcattagcttcttcccatgcagcaagtgtatgag

SEQ ID NO: 389358 - DNA, 711 bp, Homo sapiens
aaaataaagcagaagtaattttaaaatgacaccataaaatgtgctgtggttttggctttcttctttctctttctcagagcaccctttgtgcaagaaggcagtgctatgtcatgaggataatcaagcagccctacagagaggtccacatggagagaactgaggcttgcttgaactctgtgagatgttgttttaatttaaacaacaaaatttaaactaaattttgggataatttgttacagactagtatataaataatatatctttttaaaaattatgttttctatttgtttctggtttacagaaattaaagtttttacattattctcctagccagttactttatttagctctcttcttaatttcagtaataatacatttcaatagattctattgagttttatgtagacagtcatcttctatgtacttaatggcagctttgagtctttctctccaatccttatttatttttcttctccatgcagatggcttagtctttgatatagtatcaactagaaaaaatgatagtgagtatccttgttctgttcttgattttaaggggattttctaatatttttccatttaagaataccatcttagaggtttctgatggatatccttattagattaagggagttctttctaactcctggttgcttctgtcaagatacatacacacacacacacacacacacacacacacacacacacaca

SEQ ID NO: 389359 - DNA, 243 bp, Homo sapiens
gtttctgtatttctaccaactggacggccccacctggacctgccaaccagttctgtggtctccacccaggaactgactcagcataagagaagagctttgactccctgttatttcatccctgagccaaccaatcagcactcctgattcactggccccctacccaccaaattatccttgaaaactctgatccccgagtttttggggagactgatttgagtaataataaaactccagtctcctgcc

SEQ ID NO: 389360 - DNA, 365 bp, Homo sapiens
cttattcttttcctgaggatgttggttttatatggattgtctttaagcatcacttggaaacgctacaaataatgcagctaaatgtttaagcaattaggaaataggaatttttaaatacagaattttgcactgcagagtgtttacaagtattaaaagattgtattacacaactgttgttaaattctagtaagataaattgatactaaagaaaacaaacccagaaagatcaagtgacttggatcacacaacacaggaattaagaaggaaattagtattctttgttgaatattttccatttgaatagttacaggaaaattatttgcatattttacaaattaatgtgtattgacatcatagtggaaaat

SEQ ID NO: 389361 - DNA, 363 bp, Homo sapiens
gggagtggagagagaaaggggggggatggagagaagggggagtggagagagaaggggactgttaccctatgcgtagatacaccggttccctactggagatcaaaggtttccggagtagctgattcatcaacacccttgaaatctggcgtcaatttcacaaagagaaatttctttctttctttaagtttgtttgtttgtttctctctctctcttttctttctttctttccctttctttctttctttctttctttctttctttctttctttctttctttctttcttttctttctttctccttccttccttctttccttccttctctcttttcccttcccttcccttcccttcccttcccttccct

SEQ ID NO: 389362 - DNA, 437 bp, Homo sapiens
aatgggcacagatgcagggaggtgggtagctatggtgtctggacatagggaggttctcttctcattgcttctgttttctcggtgaaataagcagctcagtcattagctgggagtgagaaaccagaggaagtggaaatttgaggttagagaggaaggtttaaactagtcctctagggaaatggaaagcagatggattagggcaatgtgggtggattgctagacagcattaagagtccctttaaggttagtgaccatacatttaaggcgaaaatagtcagtgggattgtgtgcttttgtccagctgtggtcagccaccctggtggagatgcatagtggatagagaattgaatttaaccaggatagaggttccaggtgaaggccctgaagggagaggcaagagagctgattgtgtatgcaagggggtgagtataatggtg

SEQ ID NO: 389363 - DNA, 457 bp, Homo sapiens
gagtggtggcttttccatcagttccatcagttgctgggggatcagcaagcagctgactgacggtaacaaaaccaaggtcatagctcctctaggctgcagcgtgtgtgctatgtccctcttctctctgtggaaatgcttaggcacatattccatccctgcccttcaagtctcatggtcgtgggatcagggcaaggacatctgatactgtatcatcagtcacgggctcgcaaagcaatgagatcaggcaggtgaagaattagtcccagaactacggaatcccacagagggaaggcccgctatgcggtgggccggctagcgtttcctctaggaagcaggtagagatgcccattttaccgatgaggacccagggctgagcaaagcccatgaaggtgggtccttgtgataggccaaatactgccccccaacactcacacccagaggtgcccttgtcccaatc

SEQ ID NO: 389364 - DNA, 358 bp, Homo sapiens
ccgcagcgggcttggctgcagcttggcttatatgaataacccggagagctctaaaacatttccaatgcccaggagtcacccttggagattctgaattaatgcatcattttttggcacttgggcatcagtatttttttattttaatttttgcatttacaaaattttagtaaaatatgtaacataaaacttactattttaaccattttaaagtgcacagttaagtgccattaagtacattaatggtattgtgtaaccatcacctctatctagtttgggaacttctgtatcccctacatggaaatcccttccccatcgtgagtcactcctcatttccccctcctcccagctgctgacaacc

SEQ ID NO: 389365 - DNA, 516 bp, Homo sapiens
ggtttgaattgctgtttcctggggacttggctgggcacaatctggggctggccgtggggtgatcggccacgggcccaggctgtgtctctgctgctctgggcgggctctcccctcaccttgaattcatgtgcaatggccccattttccgtgtccatgtgtgttcctgagtagtgggtgtttgctgatcacctgctgcccactctgctggctctgctcttctgtgtctgagggtaaagggtgtctgcctccctttcccctgcaggaagggctggactctcatcccctgatgaatggtgctttgtccttatagaatgatggaagagggacactctttttcttttaaacctgctattttaaccattttaaagtgcacagttaagtgccattaagtacattaatggtattgtgtaaccatcacctctatctagtttgggaacttctgtatcccctacatggaaatcccttccccatcgtgagtcactcctcatttccccctcctcccagctgctgacaacc

SEQ ID NO: 389366 - DNA, 707 bp, Homo sapiens
agcggattgctgctctcaaatttagataaccagtcatttattcactgggaatctatgtctattctgcccttcattcattgccttgcttacttttaaaggttcatatgaggagaacatttgaatattgtatttgtaacaattgaaatacaaccagatgtgcaaggatagtgataacaataggcataaaaaatttcatggaatgttcagagggtcatttgcccccaactagattttatgctctgaagaacacataagatgaaaaatttactaaacaaagtgaagggtctgaaaacaaataatagtgaatatgtataggaaatgctatttactagttttttttaaggcttatctaagccatgtaattctgtcccagaaatatacctaggttggtcataactacatctaaagtgagtgactttaatgaatattttaaatggtaattattacttatagtttatattgggtattgctttaaaactcaaattagattgaatgtcaacttgacattttatttgaccctgcaattcttgtgaaatactgtaaagggaatttatggttgttatagataaatttattttaaaaaatcacttttactgactgtttaacataataagatagataaatacctggtaaatttgatattcatcattaaaatatccatgcatgtgcagataaaaatatgaataactgctgactaatacctccta

SEQ ID NO: 389367 - DNA, 518 bp, Homo sapiens
ctgggagagggtgtcccgtgccctttgctggcagcatctgtgagttgcacagccctttgagcattgccagactgtgaggtgtttagaaaattccaggccagatgggagactgctgaaggtttgtgatgttgccgccgcctgcccacgaggggagtgtcctcccacccacactgggcaccgggtgcttggcttcctgagcaggatgtggtttctcattctagacctggtacaagagagggtagttttcacccaacagtaaacctggcaaatggcaatgcctggttctctggagggtccgtggagcccaggtcctggtctgggtttgcctgcgatgtggtctgagcttcactatgcccacgtgggaatggggacagtgggaaggtgggcttgcccagcaaccctatgaagactacgttctctccgtaatgtagcacaactctgtgcatgccatttaatctcttgcacctcagtttgtcgctctgtacaatgggggtgtggtttcttacgagttctgcttc

SEQ ID NO: 389368 - DNA, 162 bp, Homo sapiens
ggacaggccccgaagaacccgaaagtcacagaatcagagtgttatgactggagaggagcttggagatcgggtcttcttactcctagagctggacagaccctctgtcctgagtcacactgcctctggtttccatcattgatgcttactgaactcagaaatgag

SEQ ID NO: 389369 - DNA, 352 bp, Homo sapiens
tattttttttttttaagtagacagggtttcaccatgttgtccaggctagtatcaaactcctggccttatgatccacccgccttagcctcccaaagtgctgggattacaggtgtgaccactgtgccaggctcctggtttactttttggagccctaaattgtttcttcaggaggaaatccatgttcaattcaggttgaggaattccattttcactacccaggacactaagccatcaatttgaaaccatctttgcaaaaaatcataactgagaaaattattacagtgaaagagatctgacctaactgactccatcttgcttctaacctccaagctgcccttgttcattccccgcg

SEQ ID NO: 389370 - DNA, 448 bp, Homo sapiens
ggtctcttactcctggcctcagacggtctgcccaccttggcttcccaaagtgctgggattaggtgtgaaccaccatacccagccttatgcctgtaaacaatgtaaataatgctacaggaaaaaaagagatagatatagaacccattctgaaagaaaatttactctaggaaatagaacatcctccacatcaaatgccctatagtctaaaagaaattaaagagaaaaaggatcaatgaaaaaacaagtcaaagacaaaatgagacactacaataaaatagaaaggaaacttagagctaaggacatgagtttcataaattagaaacagcaaagaacaaaatacgcacagctaaaaattgagttgccaacacacagaacccttgagataattcagtcaagtgcttattgagcatcatctatatgcacctgacgctgttctggcacagggtta

SEQ ID NO: 389371 - DNA, 212 bp, Homo sapiens
acatcaaaataaaagtatgttttgctgccagacatcagattttagaagtgagtaagactttgaaaaaaattttctaaatcaaacctgtgtcctctcatgttactgaactttatggtagactctgtcaaacttggttgcatttgtttagaactagttggagatctttagacaaatatcagtaaagattgacaaaacttttgttcctgaagtta

SEQ ID NO: 389372 - DNA, 452 bp, Homo sapiens
aattttttactgaagaacaaagtgtaaagcaatttaagtggcaaagatctctgagtgctgtgtccagtagtggtggactaagggagtcaatgaccctggcaccaaaaacagatctggacaaaatgtatgaaataatgaaggatcacagtgatgagtcagagggcagagacccaggagaagggtagggatgtggcacttagggtcagtgttttccagaggtgtcagccggtcctgatcaggagcctcggagagctgttgggcagaggtccctggtatgcctcagagactcgagttaggacccagcaggctgcacccagaaagggttcagcagacagctgtcttcgtaggcacagagctggctcagtgccctgggttgggttcagggctgtcagggctgctggaatcctcagccgctagatggggcaaagtggatcttctctggaggaggtagc

SEQ ID NO: 389373 - DNA, 896 bp, Homo sapiens
agttactctgggggctgaggtgggaggctcacttgagcccaggaggtcaaggttgcagtgagctgtgattgtgtcagtgcactccagcctgggtgacagagcaagaccgggtctcaaaaaaataaaaaaacagataaaattgagatgtaattcacatattataaagttcaccattttaaagtgtacagttcatatgtttttagtattattcagtcatcatcattatctgattccagaacattttcatcaatccataaatatctcttgatttttatcttcgaatgataagttacttagcaaagtgttatttaatttgcaggtatttgggggtttcatagatatcttgttattgatttctaatttaatttcctatagtcagagaagacactttgtatgatttcagtccctttagatttgttgagatttattttgagatccagcctgtggtctatattgttgaatatatcacgtgcactgggaaggaatatgtattaagcagttgtttgaggtagtgttctgtagatattatttatatgaaggtggttgataatgttgttcagatcttttgtgttcatattgatttttgggggttctagttctctaaattcctaagagaggaatggtaagatctcctactatgattctgaaattgcctcttgctcctttaaattctatcaatttttgctttattttggtatgcattttgagtctctgttgttaagtgtattcacatttataataatattttctcatgaattgtcccttttatcattatgaactatctctctttatctattgtaatgccatgtgtcttaaaatctattttatctgatattaaaatagttactgtagcctgggcaacagagtgagaatttgtctcaaaaaataaaaaaaaa

SEQ ID NO: 389374 - DNA, 415 bp, Homo sapiens
ttcctttcctaacgtacagctttcatcacatcactggcgaaaaacatttgatgacttcccactacctagtcaatcaagttcaaacttcccagcttggaatagaaatgggtattcaaagccttccatgatttgattatatggtatgcagagattaggaaggcaggctttgaaattagactacctggactcaaatactttctgtatcaattgttagctctcttcttcattttatatgtaaaaagggattaaaaaccagtgcctacctcatcaggttgttgtaaggattaaataaaatgctacttatgaaatacttagcacattatcttgcaaatagtaagcatgcaaaaaatgtgagccattggccaggcatatggcttgtgcctataatcctagcaatttgggagaccaaggcagg

SEQ ID NO: 389375 - DNA, 303 bp, Homo sapiens
gtctacgactgagctacccaaaccacctccgcatgcccactccccaaggacagggcctgggtggggcacaaaaccctgtccagctcactactcccaggaggctcactatctagtacaccatcaccaaccctgtacttagaacctcaggccctgaaaggttaaggggacaactcagaatcagagctgcctggcaaatacagaacagccccaggagaaaaagtttgattgaaaaggtcagagatggcagcccagtaacccagccaatcagagggcaaatgaaagcaatatacctctggggtcatc

SEQ ID NO: 389376 - DNA, 236 bp, Homo sapiens
ataataactgatacaatgttggcactgctgaaattaggcaggtattatttgtgtaaagagttgtaacaaaaggacttgattaaagagcccaggctccaaactcatttgaaattccaggtaaagtataagaataataattcatatttgtatgggactttataatactctgaatgttttcatatacaagatctcctttgattcttataagaactcagggtaatagtagtacaggtttg

SEQ ID NO: 389377 - DNA, 725 bp, Homo sapiens
  misc_feature (23)..(23): n is a, c, g, or t
  misc_feature (42)..(42): n is a, c, g, or t
  misc_feature (291)..(291): n is a, c, g, or t
aattcccttgtgaaattccatgngattaatttaaaattcccngggatcctatctaacatcacagttgatggatataacaatgtattttgagaaatccagttttggtgaacagtaacagcattactgataataggcaacaaacactactgcattttatttctgataggcattataggtggtaatccaaatgattaatgattttattgctctttacattttctagaacaggtgatttgacataattgtacttttttctgagaagttggtagtgtacttactactctattttgnagttatacaataaatcttacttagctgacaactaggagtaaaagctctgacaaaaagcctctgctgtaactaaaatactgagatcattctatcttaacaaacttaacagatggggaaggggtatattttaaagatggagaaatgatgcagtttgcaaatatagtcaataaatattctcaagtgtacgtagctcaatttcatttgcagcaaagataacactgaaatgtctatggatgagattattggataaacttttttaaaaacactgttctcaagataggcaagtgattaagagcccggcctggacttaacttctgaagaactctttctgtttagattgcaggagcgttctctcggctcatctcttgttttctcacccagctgttcttcttctagttggccatcattcttcatccctccctccctttcctgca

SEQ ID NO: 389378 - DNA, 3164 bp, Homo sapiens
gtgcgcggaggggacgagcggctggaccacagccggcgcccgatcaggatctccgcgctgggatcggtggaacttgaggcagcggcggcgcggggcgccatggcacaccgagcggctccgtcttctgctcctcagagagcccggctggcggcctgggatgacaagatgtctggactgcaatcctgcacagttttgagagggagatgacttgagtggttggcttttatctccacaacaatgtccatgaacaattccaaacagctagtgtctcctgcagctgcgcttctttcaaacacaacctgccagacggaaaaccggctttccgtatttttttcagtaatcttcatgacagtgggaatcttgtcaaacagccttgccatcgccattctcatgaaggcatatcagagatttagacagaagtccaaggcatcgtttctgcttttggccagcggcctggtaatcactgatttctttggccatctcatcaatggagccatagcagtatttgtatatgcttctgataaagaatggatccgctttgaccaatcaaatgtcctttgcagtatttttggtatctgcatggtgttttctggtctgtgcccacttcttctaggcagtgtgatggccattgagcggtgtattggagtcacaaaaccaatatttcattctacgaaaattacatccaaacatgtgaaaatgatgttaagtggtgtgtgcttgtttgctgttttcatagctttgctgcccatccttggacatcgagactataaaattcaggcgtcgaggacctggtgtttctacaacacagaagacatcaaagactgggaagatagattttatcttctacttttttcttttctggggctcttagcccttggtgtttcattgttgtgcaatgcaatcacaggaattacacttttaagagttaaatttaaaagtcagcagcacagacaaggcagatctcatcatttggaaatggtaatccagctcctggcgataatgtgtgtctcctgtatttgttggagcccatttctggttacaatggccaacattggaataaatggaaatcattctctggaaacctgtgaaacaacactttttgctctccgaatggcaacatggaatcaaatcttagatccttgggtatatattcttctacgaaaggctgtccttaagaatctctataagcttgccagtcaatgctgtggagtgcatgtcatcagcttacatatttgggagcttagttccattaaaaattccttaaaggttgctgctatttctgagtcaccagttgcagagaaatcagcaagcacctagcttaataggacagtaaatctgtgtggggctagaacaaaattaagacatgtttggcaatatttcagttagttaaatacctgtagcctaactggaaaattcaggcttcatcatgtagtttgaagatactattgtcagattcaggttttgaaatttgtcaaataaacaggataactgtacatttttcacttgtttttgccaatgggaggtagacacaataaaataatgccatgggagtcacactgaaagcaattttgagcttatctgtcttatttatgctttgagtgaatcatctgttgaggtctaatgcctttacttggcctatttgccagagaacatcttaatgcagcctgcatagtgaaatggttattttgagatcaccgctctgtagctaacccttataaactaggctcagtaaaataaagcactcttattttttgatctggcctattttgcccctcattgtgtagcctcaattaacacatgcatggtcatgacacccagaattcatgatggtttgttataacaacctctgcatattccaggtctggcagacaggttgcctgaccctgcaatcctatctagaatgggcccattcttgtcacatttgacaaataggactgcctacatttattattatgaaggtcgattgttgttggaagtgttttttcatgtcatagattagcaattttcaaataattattttttctctgaaaattttgtgtgtgattgcacaataaataatttttagagaaacaaaggctctttctcagcacattgatgggcaactagaattacagcagtttcaaactctaccatggataatgcaaacaaaccgaagctacatgccaatgataggtgcaaagaatattggcaaaaggtgctttaccttgagccattatttgtgtcagagaacaaaagaaacagaatcaatatataaattcaaagactatctgcagctagtgtgtttcttctttacacacatatacacacagacatcagaaaattctgttgagagcaggttcattaaatttgtaagatggcatattctaaagcctgtgctaccagtactaagaggggaagactggcaatttgccaagcacttggggattattataacaattaactaggagatcaagagataataatctctccccaaattttccaataataattgagactttttctttgcttgtttgtgtaattcaaccaaaagaatttcaatacccattcaaattgtcctaggtctatcagaaattagggaaggtagtcctgctttataataggaaaatgtatttctgtataagatttctttgctttcattaaaaatgggattcatttaaaaattaatctttccctgttaggctgatttcagattctctaggaaatctggtgtaagtaaccagaagacctttcagatggtttatttgctttcagcagagaatttatttcatacagttacttaagagtgttgatgtcttgtgaacagagatataaggaaccattctccatccttccttatcatgctgggtacaatgcttctatgaatatttccatgtattttgactggggagaggcatggagaagaaactctcattcaggggctccaggatccttctccttgaggcttctaaataaatggcagaattcttgctgtattgccatgatgtcaccctggccatgtgtactgacttgaggagatcttgcaacatggccatgtgcaaggctttaaggagtgagagagatgtgtacatatcttaggagggttatctatgttatctgagtatatgtttgggtaaccaaattggtcttaaaaatgatgttaacccaagaagtagacatcaaaaatt

SEQ ID NO: 389379 - DNA, 2287 bp, Homo sapiens
tgaaagaaactcatctccagatgagactttggacttgggactttcgagttaatgctttggaggactattgcgaaggcttgactgtattttgaaatttttcttaggcctttaccagacacagatgccagcgccatgcttcctgtacagcctgcaaaacggttacaatggccaacattggaataaatggaaatcattctctggaaacctgtgaaacaacactttttgctctccgaatggcaacatggaatcaaatcttagatccttgggtatatattcttctacgaaaggctgtccttaagaatctctataagcttgccagtcaatgctgtggagtgcatgtcatcagcttacatatttgggagcttagttccattaaaaattccttaaaggttgctgctatttctgagtcaccagttgcagagaaatcagcaagcacctagcttaataggacagtaaatctgtgtggggctagaacaaaattaagacatgtttggcaatatttcagttagttaaatacctgtagcctaactggaaaattcaggcttcatcatgtagtttgaagatactattgtcagattcaggttttgaaatttgtcaaataaacaggataactgtacatttttcacttgtttttgccaatgggaggtagacacaataaaataatgccatgggagtcacactgaaagcaattttgagcttatctgtcttatttatgctttgagtgaatcatctgttgaggtctaatgcctttacttggcctatttgccagagaacatcttaatgcagcctgcatagtgaaatggttattttgagatcaccgctctgtagctaacccttataaactaggctcagtaaaataaagcactcttattttttgatctggcctattttgcccctcattgtgtagcctcaattaacacatgcatggtcatgacacccagaattcatgatggtttgttataacaacctctgcatattccaggtctggcagacaggttgcctgaccctgcaatcctatctagaatgggcccattcttgtcacatttgacaaataggactgcctacatttattattatgaaggtcgattgttgttggaagtgttttttcatgtcatagattagcaattttcaaataattattttttctctgaaaattttgtgtgtgattgcacaataaataatttttagagaaacaaaggctctttctcagcacattgatgggcaactagaattacagcagtttcaaactctaccatggataatgcaaacaaaccgaagctacatgccaatgataggtgcaaagaatattggcaaaaggtgctttaccttgagccattatttgtgtcagagaacaaaagaaacagaatcaatatataaattcaaagactatctgcagctagtgtgtttcttctttacacacatatacacacagacatcagaaaattctgttgagagcaggttcattaaatttgtaagatggcatattctaaagcctgtgctaccagtactaagaggggaagactggcaatttgccaagcacttggggattattataacaattaactaggagatcaagagataataatctctccccaaattttccaataataattgagactttttctttgcttgtttgtgtaattcaaccaaaagaatttcaatacccattcaaattgtcctaggtctatcagaaattagggaaggtagtcctgctttataataggaaaatgtatttctgtataagatttctttgctttcattaaaaatgggattcatttaaaaattaatctttccctgttaggctgatttcagattctctaggaaatctggtgtaagtaaccagaagacctttcagatggtttatttgctttcagcagagaatttatttcatacagttacttaagagtgttgatgtcttgtgaacagagatataaggaaccattctccatccttccttatcatgctgggtacaatgcttctatgaatatttccatgtattttgactggggagaggcatggagaagaaactctcattcaggggctccaggatccttctccttgaggcttctaaataaatggcagaattcttgctgtattgccatgatgtcaccctggccatgtgtactgacttgaggagatcttgcaacatggccatgtgcaaggctttaaggagtgagagagatgtgtacatatcttaggagggttatctatgttatctgagtatatgtttgggtaaccaaattggtcttaaaaatgatgttaacccaagaagtagacatcaaaaatt

SEQ ID NO: 389380 - DNA, 2224 bp, Homo sapiens
tgaaagaaactcatctccagatgagactttggacttgggactttcgagttaatgctttggaggactattgcgaaggcttgactgtattttgaaatgttacaatggccaacattggaataaatggaaatcattctctggaaacctgtgaaacaacactttttgctctccgaatggcaacatggaatcaaatcttagatccttgggtatatattcttctacgaaaggctgtccttaagaatctctataagcttgccagtcaatgctgtggagtgcatgtcatcagcttacatatttgggagcttagttccattaaaaattccttaaaggttgctgctatttctgagtcaccagttgcagagaaatcagcaagcacctagcttaataggacagtaaatctgtgtggggctagaacaaaattaagacatgtttggcaatatttcagttagttaaatacctgtagcctaactggaaaattcaggcttcatcatgtagtttgaagatactattgtcagattcaggttttgaaatttgtcaaataaacaggataactgtacatttttcacttgtttttgccaatgggaggtagacacaataaaataatgccatgggagtcacactgaaagcaattttgagcttatctgtcttatttatgctttgagtgaatcatctgttgaggtctaatgcctttacttggcctatttgccagagaacatcttaatgcagcctgcatagtgaaatggttattttgagatcaccgctctgtagctaacccttataaactaggctcagtaaaataaagcactcttattttttgatctggcctattttgcccctcattgtgtagcctcaattaacacatgcatggtcatgacacccagaattcatgatggtttgttataacaacctctgcatattccaggtctggcagacaggttgcctgaccctgcaatcctatctagaatgggcccattcttgtcacatttgacaaataggactgcctacatttattattatgaaggtcgattgttgttggaagtgttttttcatgtcatagattagcaattttcaaataattattttttctctgaaaattttgtgtgtgattgcacaataaataatttttagagaaacaaaggctctttctcagcacattgatgggcaactagaattacagcagtttcaaactctaccatggataatgcaaacaaaccgaagctacatgccaatgataggtgcaaagaatattggcaaaaggtgctttaccttgagccattatttgtgtcagagaacaaaagaaacagaatcaatatataaattcaaagactatctgcagctagtgtgtttcttctttacacacatatacacacagacatcagaaaattctgttgagagcaggttcattaaatttgtaagatggcatattctaaagcctgtgctaccagtactaagaggggaagactggcaatttgccaagcacttggggattattataacaattaactaggagatcaagagataataatctctccccaaattttccaataataattgagactttttctttgcttgtttgtgtaattcaaccaaaagaatttcaatacccattcaaattgtcctaggtctatcagaaattagggaaggtagtcctgctttataataggaaaatgtatttctgtataagatttctttgctttcattaaaaatgggattcatttaaaaattaatctttccctgttaggctgatttcagattctctaggaaatctggtgtaagtaaccagaagacctttcagatggtttatttgctttcagcagagaatttatttcatacagttacttaagagtgttgatgtcttgtgaacagagatataaggaaccattctccatccttccttatcatgctgggtacaatgcttctatgaatatttccatgtattttgactggggagaggcatggagaagaaactctcattcaggggctccaggatccttctccttgaggcttctaaataaatggcagaattcttgctgtattgccatgatgtcaccctggccatgtgtactgacttgaggagatcttgcaacatggccatgtgcaaggctttaaggagtgagagagatgtgtacatatcttaggagggttatctatgttatctgagtatatgtttgggtaaccaaattggtcttaaaaatgatgttaacccaagaagtagacatcaaaaatt

SEQ ID NO: 389381 - DNA, 2190 bp, Homo sapiens
catataattctctcttactctctacttatatctacttagcatatcatcgttataaatcttagttacaatggccaacattggaataaatggaaatcattctctggaaacctgtgaaacaacactttttgctctccgaatggcaacatggaatcaaatcttagatccttgggtatatattcttctacgaaaggctgtccttaagaatctctataagcttgccagtcaatgctgtggagtgcatgtcatcagcttacatatttgggagcttagttccattaaaaattccttaaaggttgctgctatttctgagtcaccagttgcagagaaatcagcaagcacctagcttaataggacagtaaatctgtgtggggctagaacaaaattaagacatgtttggcaatatttcagttagttaaatacctgtagcctaactggaaaattcaggcttcatcatgtagtttgaagatactattgtcagattcaggttttgaaatttgtcaaataaacaggataactgtacatttttcacttgtttttgccaatgggaggtagacacaataaaataatgccatgggagtcacactgaaagcaattttgagcttatctgtcttatttatgctttgagtgaatcatctgttgaggtctaatgcctttacttggcctatttgccagagaacatcttaatgcagcctgcatagtgaaatggttattttgagatcaccgctctgtagctaacccttataaactaggctcagtaaaataaagcactcttattttttgatctggcctattttgcccctcattgtgtagcctcaattaacacatgcatggtcatgacacccagaattcatgatggtttgttataacaacctctgcatattccaggtctggcagacaggttgcctgaccctgcaatcctatctagaatgggcccattcttgtcacatttgacaaataggactgcctacatttattattatgaaggtcgattgttgttggaagtgttttttcatgtcatagattagcaattttcaaataattattttttctctgaaaattttgtgtgtgattgcacaataaataatttttagagaaacaaaggctctttctcagcacattgatgggcaactagaattacagcagtttcaaactctaccatggataatgcaaacaaaccgaagctacatgccaatgataggtgcaaagaatattggcaaaaggtgctttaccttgagccattatttgtgtcagagaacaaaagaaacagaatcaatatataaattcaaagactatctgcagctagtgtgtttcttctttacacacatatacacacagacatcagaaaattctgttgagagcaggttcattaaatttgtaagatggcatattctaaagcctgtgctaccagtactaagaggggaagactggcaatttgccaagcacttggggattattataacaattaactaggagatcaagagataataatctctccccaaattttccaataataattgagactttttctttgcttgtttgtgtaattcaaccaaaagaatttcaatacccattcaaattgtcctaggtctatcagaaattagggaaggtagtcctgctttataataggaaaatgtatttctgtataagatttctttgctttcattaaaaatgggattcatttaaaaattaatctttccctgttaggctgatttcagattctctaggaaatctggtgtaagtaaccagaagacctttcagatggtttatttgctttcagcagagaatttatttcatacagttacttaagagtgttgatgtcttgtgaacagagatataaggaaccattctccatccttccttatcatgctgggtacaatgcttctatgaatatttccatgtattttgactggggagaggcatggagaagaaactctcattcaggggctccaggatccttctccttgaggcttctaaataaatggcagaattcttgctgtattgccatgatgtcaccctggccatgtgtactgacttgaggagatcttgcaacatggccatgtgcaaggctttaaggagtgagagagatgtgtacatatcttaggagggttatctatgttatctgagtatatgtttgggtaaccaaattggtcttaaaaatgatgttaacccaagaagtagacatcaaaaatt

SEQ ID NO: 389382 - DNA, 445 bp, Homo sapiens
gcattatgcttgtacagcttgcagaaccatgaggcaattaaacctcttttctttataaattacccagtctcagggattcctttatagcaatgtaagaacagcccaacacagcatgtaaaacattgattgtttttgctataactctttataaaataagaactattggtagtggtaataaaattgtttaatccattgcttcacattgaaggaatgtctaaatcagtgattcacaaggacaattgaatgaaaatcgtctctggctttttgaactttgcatatttcccagattttctaatatgcctctactcccaccagatttgagcgtaactgtagcagtgagttcaagttattaatgggtgtgtgttgcatccttcttgtatgtttgggggtggaggtggcatcgataaacgccgggtttcctctagggtcgggggcaggcatcaag

SEQ ID NO: 389383 - DNA, 672 bp, Homo sapiens
gcattatgcttgtacagcttgcagaaccatgaggcaattaaacctcttttctttataaattacccagtctcagggattcctttatagcaatgtaagaacagcccaacacagcatgtaaaacattgattgtttttgctataactctttataaaataagaactattggtagtggtaataaaattgtttaatccattgcttcacattgaaggaatgtctaaatcagtgattcacaaggacaattgaatgaaaatcgtctctggctttttgaactttgcatatttcccagattttctaatatgcctctactcccaccagatttgagcgtaactgtagcagtgagttcaagttattaatgggtgtgtgttgcatccttcttgtatgtttgggggtggaggtggcacatatagacataccagtagactaaatagtctaagatgtgcattgttgtttctaatctaatgaccattaggaataaataggtcataatcttttgtaagcatatctgtaagctttccttagggccaaccaaatatttctttgaaccattttccctgttctgttccacttgtttaggcctgtgctttatcatttacttgacatcttaatagtctagacagtatttgctttccttgtttatgactcttgtatgtgactctagagtttttcttttct

SEQ ID NO: 389384 - DNA, 412 bp, Homo sapiens
gaacacacaacttgtaagggaaaaatgcctaaagtgagcatgtgtacaacttcagtaaacacgctgtgcatgcggcccctcccaagtcctggcaggccactgtggatggccactatgcatgtggatggcgcaccctaagggaagaatcgggggagagggaaaacgacctctacccctgaagcatgccaacatataaaacccaagtcaaaggtcaaagagggcacttggccttcttccaagtgtactttacttcctttctttcctgctctgaaactttttaataaactttcactcttgttcaaatacttgcctcagtacaagcataagtacattctgccttatgcccctcagatgaattatttcctcggaggaggcaagagtcaaattgccgcagacctgtatggattcgctg

SEQ ID NO: 389385 - DNA, 197 bp, Homo sapiens
aagagacaaggcaagtaggagaaataattgcagtctagaagatcttaaggagacgtgaggactaaaagccatgttgtcctggatggggtcgtggaacagaaacaggatgttaagtacacaccagggaaatccgaataaagtgtggacttcagttaataatgatgtaaggaacattggctcctgatttatggcagatg

SEQ ID NO: 389386 - DNA, 683 bp, Homo sapiens
tctcttttcatggatatgtattttactgtgtcacatacaatgtaatctgattcagtgccatatgttgcacccagcattcagggatggggtgagacaaactgtctttccacatgtgttacacattaagaaggcaaaaacaaaagttataatcactgtgagcaaatagcactacctattgccttctgcaagaaattatttgctgttacatttcaacaagtaaaatgactaaaggtatttcaagattgacatttagcactgagttttaacatattttaatacacacaaattcaagaagatggtaaaaataaagcagagacttctaatatggtgttactgaaatccagcctataaaatttaaaagtatggtacccagatgtattaatattaacaaaaacagtatagtcatacctttcataattatctgtttggggtaataacatctaacagtggctggaactctatatgaaacacttgtgcatatgttacctcacttattccttgaaagttgttgaagtagatgttttattcccatataacagattttttttttttaaatgagtatttagaacttcagagttgtgtaagtagcagagctgggccttagatcctcataatcttatttcccaaattatatgttttccaccactgcaatttctgataaaaaggtaaatgcatcctagcac

SEQ ID NO: 389387 - DNA, 347 bp, Homo sapiens
tgaggcagggtcttgctctgtcacccaagctggagtgcagcagtgctatcatagctcactgcaaccttgaactcctggactcaagcgatcctcccaccttggcctcccaagtgctgggattacaggtgtgagccacggtgcccagccaacttgttaaagaatctgtattttatgataattgatctcacccttcataaacctttactagggagctataactgagagagctctagtctttattaaattcacctgtgtcggtaattaaacttcaagaaagtttaattttctttcctaggacaaagcaatacttttaaaaagggccaaagataggggaaagaagtgccatc

SEQ ID NO: 389388 - DNA, 375 bp, Homo sapiens
tcactaaatacttgacttatacatgttaagataatatttatggttgagtaacattgaaattgattataagtgttacttgggatactaactctgagggatatactacttatcagataaatgtgaatgatcatacaaagatactccatttttatatgaatttttcctcttcattgccattttgaaaataatttgtattttatattcagagatactgcccaagagaacactaaaatcctgctttgtgtttcagttaatgcaattttagtattataatcaaaagccattaagaaaatttcacagaaatacaaaaattagctgggcgtggtagcatacacctgtaggctcagccatttgggagcctgaggtgggaggatc

SEQ ID NO: 389389 - DNA, 441 bp, Homo sapiens
ggtgatggttgcacaatagcgtgaatgtgcttaatgccatcaaactgcacacttaaaagtggtaaattgtatgctctgtgccttgtgtcacaataaaaaatgctctagattccatttgctaatatgtaggacttgtgaaaaatatgcatatacaatatatattatggcaccactggactataattatttaaagacaaagtccataggtgtccccagtgagacgggactctgctgccaagcctccggcgggtcatgcaaacagtggagggcgccgttcctggaacagcagtgccccagcagctttaagcagtaggagggataaaagcaggagtggttaaagtgaaatggcagagctcattaatcaaattcgttcagttttattgattgattgagatggagtctcgctctgtcgccgaggctggagtgtactggtgtgatctc

SEQ ID NO: 389390 - DNA, 621 bp, Homo sapiens
tcaacgaataatattcagtaggtgctgtaagaaatagaattcatgacatacctgaataaagtgagagagaatttaccacagtccagaaacctgccatcaccttgtaataattataaatgagccatgatataataggccggattctatgaacagacatagtgaagagactaaagcaacctttatcttcctagttttctttgctacataaaatttacattttacttgtagactctgtgctcgtctttgagtgtgaggcttacccaagcagatttaaaaattgtgctggctttcttcactatccatcaaaactctgtcagttgatatggtcaataggaagtgcaaaaataatcctaaatttgcagcacaatattgcacaaaatatggtacatttcaaaaacagttttgtgcttaacttttagattatcagatcaggctacctgtgtctgtgttttcattggcttagacaatcaaggggagagctcatagctgaagcattttgtcatttagctgatttgaaatacttgcacagtgacatagtgacataaaaacaataataaataaatgagtggtcaaaatgatttctgttcttttaaactatttttactttttgtctgggttctt

SEQ ID NO: 389391 - DNA, 912 bp, Homo sapiens
ccccgtatcacaccctaatttggaatctagcgtctccatcagcacacccctctgagagcatcccttccctggcctcctgccttcactcctgctctatactcatgcctcctcctagtcaggtttatggtagaccccttgtaactcctcctccttcaaaactacttcaagccctttttgggtctttgaccgctttgcttttttagggcatgcccgtctctgctgcctcttctactctatcctcctgtgatcccacacttgactttgtcctagtctttccctcccctaggctgcttttcctttcttctgttttttaaggcgccttctgctgctgcagcccaccctctctcccctgctgcagtccctcccccttcatacgcctcccccaccacatccctccatgctcttgcgggatgctgccttgtcttgcaatctctgtgcacaccgcctccattaccctaatctaggtgttacatttgcctttttgtacttcgtattgaaattcggatagtgattgccggttgacttgcaggtggtgtgtgctcgcgttgtctccgttctcctcagcagtcttcagtgctgtgtttctgcttactgaatctatgttgtgcattccttttttacacttttactctctccctccatatttcgatttgcccacttgaaatcgttctcattttttataaattttaattgtaatttccgcaaccttctgttgcctcttgtaaaacagtaggtttgcaaaagggatagttttttgaaaatctgccttatagagaaatccattccttcttactcatctcgtgccatctacccttatccttgacattcttaactccatggtgtccactcattctgtttcctcacctcttccacctcaagaaatggttggttttaacctgggagagttgattg

SEQ ID NO: 389392 - DNA, 550 bp, Homo sapiens
tggcctggttggagctgctgttaaaccagggttgccatatgggccccacaggctccagattgctgccagggagcaactgccagccagcaagcaggcccagggtgcagcacaggcagaatgaggccagggcctgagaggtctcctgggtggaggtaaggcaggatgccagtgttttcccttggcacccatgcagtgggtaagcagatggaggcacccttaagggcagaatggggcctagaaactgccctcgttactttcagtgaaaggttttgtccttggaacttgagaacgctctcttactctttgttctagaggaacattcagaaggcctgggtggatgcccctcttgccaaaatcagaggtaggaagctcgtaggacaaaggcagcggagggcagaagatagctcctggggaccggagacaggcccagaggtgctcactgagtgctgcttcctctccccgatgccagcctcaagcagggccgtgggtacaaggaggagcaaatctgcaccaggctttctgccttacccaggaaggaaaagtgcttggt

SEQ ID NO: 389393 - DNA, 884 bp, Homo sapiens
agccagagacagctgggccactggcagtgagggagagtgaggatggcagagaccagtgccttgcccaccggcttcggggagctcgaggtgctggctgtggggatggtgctactggtggaagaccccggagctgcggactccctgccacctactggtgctgagcttggctcttgcggacagtgggatcagcctgaatgccctcgttgcagccacatccagccttctccggcgctggccctacggctcggacggctgccaggctcacggcttccagggctttgtgacagcgttggccagcatctgcagcagtgcagccatcgcatgggggcgttatcaccactactgcacccgccaaaatgctgccatcggtctcatcattttgagtggcgataggttagccctcttgtccacttggcctcagagcacttctcccactccttacatcccagcccctgcccctaatgctcccttggaccatcttatacacacacacacacacacacacacacacacacacacacacacacaccaccttctcagatagcaacaggcttctctgcctcaatatagaacagttaatccctgtgccagaggccttagatcaaagccctttctatactgagagcatggcagagcagtgtgaaggcaggcaaaggggaatgaggaggtctgaattcatctactccatccctgggtggttgtaggcatgtcaccttggccatctgtttctaaagctgaaagtctgaggcagcacaatggtccaggtagatattaattattgtgcccacagagaattgtttgaacctggaaggcagaggttgcagtgagctgagatggcaccactgcactccagcctgggcaacagaatgagactccgcctcaat

SEQ ID NO: 389394 - DNA, 2126 bp, Homo sapiens
  misc_feature (1754)..(1754): n is a, c, g, or t
agccagagacagctgggccactggcagtgagggagagtgaggatggcagagaccagtgccttgcccaccggcttcggggagctcgaggtgctggctgtggggatggtgctactggtggaagctctctccggtctcagcctcaataccctgaccatcttctctttctgcaagaccccggagctgcggactccctgccacctactggtgctgagcttggctcttgcggacagtgggatcagcctgaatgccctcgttgcagccacatccagccttctccggcgctggccctacggctcggacggctgccaggctcacggcttccagggctttgtgacagcgttggccagcatctgcagcagtgcagccatcgcatgggggcgttatcaccactactgcacccgtagccagctggcctggaactcagccgtctctctggtgctcttcgtgtggctgtcttctgccttctgggcagctctgccccttctgggttggggtcactacgactatgagccactggggacatgctgcaccctggactactccaagggggacagaaacttcaccagcttcctcttcaccatgtccttcttcaacttcgccatgcccctcttcatcacgatcacttcctacagtctcatggagcagaaactggggaagagtggccatctccaggtgcccgccctcattgccaaaatggtgcccacgatcaatgccatcaactatgccctgggcaatgagatggtctgcaggggaatctggcagtgcctctcaccgcagaagagggagaaggaccgaaccaagtgagcctgccaccctggagtgagccccaggccaggaggctgttccaggagtcctgcccagcagcctcggtggccaagcccagacactcacccaccttccccagtggccccgtggatcctggtcctaggctggacacaggattcagaaagacaccaggctgcacagaaagagccagatggacctgagtgtcggtcacagccccctacactcaaggctgagaggcctcaggaaagtcattcctttttaaaaataataataaatgtaagggggtacagtgcagttttgttacatggatagattgcctagtggtgaagtctgggcttttagtgtaaccatcaccctaataatatacgttgtacccattaagttatttctcatccctcaccccctcccaccttgtcacccttctgagtctccaatgtctattattccacactccatgtccacgtgtacacattatttagctcccacttacaagtgagaacatgtggtatttgactttctgtttttgagttatttcacttaaaataatgacctccagtttcatccatgttgctgcaaaagacatgatctcgttcttttttatggcagtgtagtattccattccatatacatatataaacgttatatatatgtaacgttttctttatccaatcatctgttgatggatagattccatatctttgctactgtaaacagagctgtgataagcatacaagtgcaggtttctttttgatatactgatttcttttcctttgggtagataccagtagtaggactgctggatcaaatggtagctctatttttaagacagtatggagaaatcaccatactgttttccataggggttgtactaatttacagtcccaccaacagtgtataggtgttcccttttctctgcatccttaccaatatctgtaattttttgactttttaataatagccattctcanttgtgtgagataaggtctcattgtggttttaatttccatttctctgatgacttttgatgttaagcattttttcatatgcttcttagccacgtgtatgtattctttttgaaaaaatgtttattcatgtcttttgcccactttttaatggcattatttggattttttttgttgagttatttgagtttcttatatattctggataatagtctggataatatattctggataatatataatagtcttatatattctggatatattctggatacatggtttgcaaatattttctccggttctgcacgttgttcattctgttgatggtttattttgctgtgcagaaacttttttagtttaattaagtcccatttgtct

SEQ ID NO: 389395 - DNA, 744 bp, Homo sapiens
aggatggcagagaccagtgccttgcccaccggcttcggggagctcgaggtgctggctgtggggatggtgctactggtggaaggtgagccaggcagaacctggggtgcagcgggggcccagtgggttctgaggacccaggccaccagtgtggagctggcaaggagaggagaggtccccaaacccagctgggtgtccggtcccattggctgccttcccctctgtgcccggactcggggggtgttctgacaattgaacctgtgaggtgcagcacactgcccgctgggagcagagaggaagccaggcaagggtcagggagggagggactttgaaaggggacatctgcccaggagatgatcaagagccaggctttaggacttttcatgtccctccagccgggagaaaatttaatccactccttggaaatcctgctgagaatcccacataagatcagtcccccaaaaggctctggggacagacagctctgcctcctgctcttgtgtggctggaaccaagtcccttcagctctctgccctcaatgccttgacattccgaatgggtggttgtaaagattaaatgggataatgggtataaagtgctagcctaaatagactctagggtatttaagttcattcactcccatcctctccagccccaccactattttcactgtgtctactcctatgagcccaagcacttcacctctggaggcaacctgggtctgcgaggtacctacctcaacctaga

SEQ ID NO: 389396 - DNA, 2240 bp, Homo sapiens
  misc_feature (1868)..(1868): n is a, c, g, or t
agccagagacagctgggccactggcagtgagggagagtgaggatggcagagaccagtgccttgcccaccggcttcggggagctcgaggtgctggctgtggggatggtgctactggtggaagctctctccggtctcagcctcaataccctgaccatcttctctttctgcaagaccccggagctgcggactccctgccacctactggtgctgagcttggctcttgcggacagtgggatcagcctgaatgccctcgttgcagccacatccagccttctccggcgctggccctacggctcggacggctgccaggctcacggcttccagggctttgtgacagcgttggccagcatctgcagcagtgcagccatcgcatgggggcgttatcaccactactgcacccgtagccagctggcctggaactcagccgtctctctggtgctcttcgtgtggctgtcttctgccttctgggcagctctgccccttctgggttggggtcactacgactatgagccactggggacatgctgcaccctggactactccaagggggacagaaacttcaccagcttcctcttcaccatgtccttcttcaacttcgccatgcccctcttcatcacgatcacttcctacagtctcatggagcagaaactggggaagagtggccatctccaggtaaacaccactctgccagcaaggacgctgctgctcggctggggcccctatgccatcctgtatctatacgcagtcatcgcagacgtgacttccatctcccccaaactgcagatggtgcccgccctcattgccaaaatggtgcccacgatcaatgccatcaactatgccctgggcaatgagatggtctgcaggggaatctggcagtgcctctcaccgcagaagagggagaaggaccgaaccaagtgagcctgccaccctggagtgagccccaggccaggaggctgttccaggagtcctgcccagcagcctcggtggccaagcccagacactcacccaccttccccagtggccccgtggatcctggtcctaggctggacacaggattcagaaagacaccaggctgcacagaaagagccagatggacctgagtgtcggtcacagccccctacactcaaggctgagaggcctcaggaaagtcattcctttttaaaaataataataaatgtaagggggtacagtgcagttttgttacatggatagattgcctagtggtgaagtctgggcttttagtgtaaccatcaccctaataatatacgttgtacccattaagttatttctcatccctcaccccctcccaccttgtcacccttctgagtctccaatgtctattattccacactccatgtccacgtgtacacattatttagctcccacttacaagtgagaacatgtggtatttgactttctgtttttgagttatttcacttaaaataatgacctccagtttcatccatgttgctgcaaaagacatgatctcgttcttttttatggcagtgtagtattccattccatatacatatataaacgttatatatatgtaacgttttctttatccaatcatctgttgatggatagattccatatctttgctactgtaaacagagctgtgataagcatacaagtgcaggtttctttttgatatactgatttcttttcctttgggtagataccagtagtaggactgctggatcaaatggtagctctatttttaagacagtatggagaaatcaccatactgttttccataggggttgtactaatttacagtcccaccaacagtgtataggtgttcccttttctctgcatccttaccaatatctgtaattttttgactttttaataatagccattctcanttgtgtgagataaggtctcattgtggttttaatttccatttctctgatgacttttgatgttaagcattttttcatatgcttcttagccacgtgtatgtattctttttgaaaaaatgtttattcatgtcttttgcccactttttaatggcattatttggattttttttgttgagttatttgagtttcttatatattctggataatagtctggataatatattctggataatatataatagtcttatatattctggatatattctggatacatggtttgcaaatattttctccggttctgcacgttgttcattctgttgatggtttattttgctgtgcagaaacttttttagtttaattaagtcccatttgtct

SEQ ID NO: 389397 - DNA, 718 bp, Homo sapiens
agccagagacagctgggccactggcagtgagggagagtgaggatggcagagaccagtgccttgcccaccggcttcggggagctcgaggtgctggctgtggggatggtgctactggtggaagaccccggagctgcggactccctgccacctactggtgctgagcttggctcttgcggacagtgggatcagcctgaatgccctcgttgcagccacatccagccttctccggtaccagccccctccccagtccacaggctctggggtcctgcctggggcctgacccctgggccctgggcagccaggccaagggcatttttactacttacagaaaattggccaagggcagagggtgggcaggctaaaatgggctgaattccagattgattctgaagaacgacagctgatttctggaagacaggggttgctgaaacctgatgaaagagatggtaggctgtagagatcaatggtgtgggttctgtaaccaagcaacctaggtttgcattctggcttcagcatttctagttctgggcttcttccataaatcggatattatttcctaactcatataggtggttggaagtatttacttctattatgtgtaaataacttaaaataatgcttgatacctaggactctacgtaagtgtttgtgaacacaaatgggggcgttatcaccactactgcacccgtatgtatctgggctcctggagtggagggac

SEQ ID NO: 389398 - DNA, 870 bp, Homo sapiens
agccagagacagctgggccactggcagtgagggagagtgaggatggcagagaccagtgccttgcccaccggcttcggggagctcgaggtgctggctgtggggatggtgctactggtggaagctctctccggtctcagcctcaataccctgaccatcttctctttctgcaagaccccggagctgcggactccctgccacctactggtgctgagcttggctcttgcggacagtgggatcagcctgaatgccctcgttgcagccacatccagccttctccggcgctggccctacggctcggacggctgccaggctcacggcttccagggctttgtgacagcgttggccagcatctgcagcagtgcagccatcgcatgggggcgttatcaccactactgcacccgtagccagctggcctggaactcagccgtctctctggtgctcttcgtgtggctgtcttctgccttctgggcagctctgccccttctgggttggggtcactacgactatgagccactggggacatgctgcaccctggactactccaagggggacagaaacttcaccagcttcctcttcaccatgtccttcttcaacttcgccatgcccctcttcatcacgatcacttcctacagtctcatggagcagaaactggggaagagtggccatctccaggtaaacaccactctgccagcaaggacgctgctgctcggctggggcccctatgccatcctgtatctatacgcagtcatcgcagacgtgacttccatctcccccaaactgcagatggtacagatacttctagtacctaaaactagacccctctccatctttgttctctgtctcatctcatctcactttctggatttatga

SEQ ID NO: 389399 - DNA, 649 bp, Homo sapiens
ttgaagtgaagtcagtaattcaggggtgttggacaccagccaagattgtttatacaccccttggagagaccgtccatagtttggcttgatgcatgacatgggggaagcgggtatcagaggtaggggattcctaactgtccagctttaaatctcagctccatcacctacaggctgggtggctttaagcaacagcctattctatcttcctaagcttcagtctccccacctatgaagggggagggtgataacattacctcctcacaggacccatgaattaatatatatccaaagctcttggaacagataataagcacttaataaatgtttcttgtttttgtagttattgatgatattattccaaaattcccaggaggacggttataaaatgttctcatctgccaggcacagtggctaacgcctgtaatcccaacactctgagaggccgaggcaggtgggtcacctgaggttaggagttcaagaccagcctgaccaacatggagaaagctcatctctactaaaaatacaaaaattagccgggtgtggtggtgcatgtctgtaatcccagctactcgtgaggctaaggcaggagaattgcttgaacctgggaggcagagattgcagtgagccaagatcgccccattgcactcca

SEQ ID NO: 389400 - DNA, 755 bp, Homo sapiens
tacccacgactccttctccttttagtgtggcgtttgcccgctagacccagcccagagtccaggtcagcacaggccctctcagccaaccactcatgacaaatgaggagtcgagatccacagtgtggatggggcaagccccagttcacagtagagaggtggagcttagtacttcctgctgcccattagacaccctttcttcctaagttcaagggaagcccacacatgtactgctccctgcatcctgctctaacttcctctcatcctctggatctcagctcaaatattccttatgcagagatgccttcccctgattccctaaactagactcggacccctctgttctgcatctctgtggcatatcatctgccccttttgtaaaacttataaacttgtggttacttgtttagcgtctctttcctccccagaccataagcaacataaagacaaagggtacatctagcacatagttcgtgttcaataaatgtttgttttcatcatgccacgggaagtgagatataccaagtattcaaaaaagtgttcaaatcattactaacagtgcttgctctgtgctggctgagtccagctgggcccagaattccacggttctaaatggcgcatattccatgtgcataggctgattgaaaatgtattaaacctaaatttttaaaaaaaagcacatgatactacacatgtcatgatgaatgaatagacagaactcctcctgaatataattacaaagttctgatccatctcag

SEQ ID NO: 389401 - DNA, 2390 bp, Homo sapiens
ggcggaagcactggagccccgagtcacgtggctgcgggcggagatgagcggggcgtgggacgtgctgcggcgtcctagctggcttacagggcggcggcggggtgtgtgtcctctgttaagagtgctactcgcccggggttgatctgtgcatgccactcctgggtcagacggtgaggtcggcgtctgcgaggacgcggcggtggagtagaagggcagccggagacaggcccggcgccccttccgaggctagacggccccagcttcgcggggatcatggcattgctggtggaccgagtgcggggccactggcgaatcgccgccgggctcctgttcaacctgctggtgtccatctgcattgtgttcctcaacaaatggatttatgtgtaccacggcttccccaacatgagcctgaccctggtgcacttcgtggtcacctggctgggcttgtatatctgccagaagctggacatctttgcccccaaaagtctgccgccctccaggctcctcctcctggccctcagcttctgtggctttgtggtcttcactaacctttctctgcagaacaacaccataggcacctatcagctggccaaggccatgaccacgccggtgatcatagccatccagaccttctgctaccagaaaaccttctccaccagaatccagctcacgctgattcctataactttaggtgtaatcctaaattcttattacgatgtgaagtttaatttccttggaatggtgtttgctgctcttggtgttttagttacatccctttatcaagtgtgggtaggagccaaacagcatgaattacaagtgaactcaatgcagctgctgtactaccaggctccgatgtcatctgccatgttgctggttgctgtgcccttctttgagccagtgtttggagaaggaggaatatttggtccctggtcagtttctgctttgcttatggtgctgctatctggagtaatagctttcatggtgaacttatcaatttattggatcattgggaacacttcacctgtcacctataacatgttcggacacttcaagttctgcattactttattcggaggatatgttttatttaaggatccactgtccattaatcaggcccttggcattttatgtacattatttggcattctcgcctatacccactttaagctcagtgaacaggaaggaagtaggagtaaactggcacaacgtccttaattgggtttttgtggagaaaagaatgttgtcccaagaagataaaaaatattgttaagtgtgcaagttattaaaaaaaaaaaattgggccaggcacggtggctcacgcctgtaatcccagcactttgggaggccaaggccagcggatcacttgaggtcaggagttcgagaccagcctgaccaacatggagaaaccctgtctcaactaataatacaaaattagccaggcgtggtggcgcatgcctgtaatcccagctactcgggaggctgaggcaggagaatcacttgaacccgggaggcggaggttgcagtgagccgagatcgtaccattgcactccagcctgggcaacaagagcgaaactccatttcaaaaaaaaaaaattggtgacagactcaatgatggaatgatttgtcggaattaacacaaagcagattttattcatataatgacttttttttaagagtctcttttttaaaaaaacttaattctctaaaaccgaaatggttcatgcttctttttaaaaatgattgtataaaatgtatggaatggttagcctggtgtggtggtgcacacctgtaatcccagctacttgggagactgagacatgagaatcgcttgagcctgggaggcggaggttgcaatgagccaagatcgtaccactgcactccagcctgggcgacagagcaagacactgtctctctctctctctccatatatatatgtgtgtgtgtgtatatatatatatatatgtgtgtgtgtgtgtgtatacatatatccacatatatacacacacacatacatatacatgtgtatatatataccatcccatatatatgtgggatatatatatatatatatatggatatggttatatatatgggatggtttggttggtcccagcaaagtatatgaaaattaaagttctgtgataatgacaaaggaattgctgttactgtactgcaaatatgctgtgggttctcggtgttcaaactcttctaaggaaggacacacagtagctctctgcttgctgatagatggtttcccagtgtgagatttgttattttgatcagagtattcaaatcagaatttaaatctagtgtttctattttagtttagcttcctgatttatataaatgaaatctcgatttataaagtataataaagatgactgtaagac

SEQ ID NO: 389402 - DNA, 2139 bp, Homo sapiens
  misc_feature (1046)..(1046): n is a, c, g, or t
ggcggaagcactggagccccgagtcacgtggctgcgggcggagatgagcggggcgtgggacgtgctgcggcgtcctagctggcttacagggcggcggcggggtgtgtgtcctctgttaagagtgctactcgcccggggttgatctgtgcatgccactcctgggtcagacggtgaggtcggcgtctgcgaggacgcggcggtggagtagaagggcagccggagacaggcccggcgccccttccgaggctagacggccccagcttcgcggggatcatggcattgctggtggaccgagtgcggggccactggcgaatcgccgccgggctcctgttcaacctgctggtgtccatctgcattgtgttcctcaacaaatggatttatgtgtaccacggcttccccaacatgagcctgaccctggtgcacttcgtggtcacctggctgggcttgtatatctgccagaagctggacatctttgcccccaaaagtctgccgccctccaggctcctcctcctggccctcagcttctgtggctttgtggtcttcactaacctttctctgcagaacaacaccataggcacctatcagctggccaaggccatgaccacgccggtgatcatagccatccagaccttctgctaccagaaaaccttctccaccagaatccagctcacgctgattcctataactttaggtgtaatcctaaattcttattacgatgtgaagtttaatttccttggaatggtgtttgctgctcttggtgttttagttacatccctttatcaagtgtgggtaggagccaaacagcatgaattacaagtgaactcaatgcagctgctgtactaccaggctccgatgtcatctgccatgttgctggttgctgtgcccttctttgagccagtgtttggagaaggaggaatatttggtccctggtcagtttctgctttgcttatggtgctgctatctggagtaatagctttcatggtgaacttatcaatttattggatcattgggaacacttcacctgtcactcaagaaatgaagtcatnggccgggtgcacggtggctcacgcctgtaatcccagcactttgggaggccaaggccagcggatcacttgaggtcaggagttcgagaccagcctgaccaacatggagaaaccctgtctcaactaataatacaaaattagccaggcgtggtggcgcatgcctgtaatcccagctactcgggaggctgaggcaggagaatcacttgaacccgggaggcggaggttgcagtgagccgagatcgtaccattgcactccagcctgggcaacaagagcgaaactccatttcaaaaaaaaaaaattggtgacagactcaatgatggaatgatttgtcggaattaacacaaagcagattttattcatataatgacttttttttaagagtctcttttttaaaaaaacttaattctctaaaaccgaaatggttcatgcttctttttaaaaatgattgtataaaatgtatggaatggttagcctggtgtggtggtgcacacctgtaatcccagctacttgggagactgagacatgagaatcgcttgagcctgggaggcggaggttgcaatgagccaagatcgtaccactgcactccagcctgggcgacagagcaagacactgtctctctctctctctccatatatatatgtgtgtgtgtgtatatatatatatatatgtgtgtgtgtgtgtgtatacatatatccacatatatacacacacacatacatatacatgtgtatatatataccatcccatatatatgtgggatatatatatatatatatatggatatggttatatatatgggatggtttggttggtcccagcaaagtatatgaaaattaaagttctgtgataatgacaaaggaattgctgttactgtactgcaaatatgctgtgggttctcggtgttcaaactcttctaaggaaggacacacagtagctctctgcttgctgatagatggtttcccagtgtgagatttgttattttgatcagagtattcaaatcagaatttaaatctagtgtttctattttagtttagcttcctgatttatataaatgaaatctcgatttataaagtataataaagatgactgtaagac

SEQ ID NO: 389403 - DNA, 1583 bp, Homo sapiens
  misc_feature (1476)..(1476): n is a, c, g, or t
ggcggaagcactggagccccgagtcacgtggctgcgggcggagatgagcggggcgtgggacgtgctgcggcgtcctagctggcttacagggcggcggcggggtgtgtgtcctctgttaagagtgctactcgcccggggttgatctgtgcatgccactcctgggtcagacggtgaggtcggcgtctgcgaggacgcggcggtggagtagaagggcagccggagacaggcccggcgccccttccgaggctagacggccccagcttcgcggggatcatggcattgctggtggaccgagtgcggggccactggcgaatcgccgccgggctcctgttcaacctgctggtgtccatctgcattgtgttcctcaacaaatggatttatgtgtaccacggcttccccaacatgagcctgaccctggtgcacttcgtggtcacctggctgggcttgtatatctgccagaagctggacatctttgcccccaaaagtctgccgccctccaggctcctcctcctggccctcagcttctgtggctttgtggtcttcactaacctttctctgcagaacaacaccataggcacctatcagctggccaaggccatgaccacgccggtgatcatagccatccagaccttctgctaccagaaaaccttctccaccagaatccagctcacgctgattcctataactttaggtgtaatcctaaattcttattacgatgtgaagtttaatttccttggaatggtgtttgctgctcttggtgttttagttacatccctttatcaagtgtgggtaggagccaaacagcatgaattacaagtgaactcaatgcagctgctgtactaccaggctccgatgtcatctgccatgttgctggttgctgtgcccttctttgagccagtgtttggagaaggaggaatatttggtccctggtcagtttctgctttgtcgcctggactagagtgcagttgtgcattcttggctcactgcaacctccacctcctgggtttaagtgattctcatgcctcaggctcccaagtagctgggattgaaggcatgtgccaccacgcccagctaatttttgtattttttgtagagacaaggtttcaccatgatggccaggctggtctcaaattcccagcttcaagtgatccaccacctcagcttcccaaagtgctgggattacaggcatgatccaccacgcctggccagtaatttcttaatcctacctccctgcttctattgcctagcccgtacatttgaggcttccatggagctttctgtggtactgaaacacttggagtgaactgcaaacttggagtgaactacatccaacctttctaaggtggctggggaaaattcttgtacagcaagttgggacaaaatagccatatagaaacagccatataagatcccaatatagaaaaatcgggatattagaggaaatacatgatttccatttatggagtgctacatgtntgccaaaatgtatttctgcttttcatcttcttgacatctgaatattaaagcaggtgttgatcatttcatattataacttggacgtttctttcacaacaaaaaaacaa

SEQ ID NO: 389404 - DNA, 1402 bp, Homo sapiens
  misc_feature (309)..(309): n is a, c, g, or t
aggtgatctagaggatcccgtatatgggtgagcctcccgtttatcagtgtgggtaggagccaaacagcatgaattacaagtgaactcaatgcagctgctgtactaccaggctccgatgtcatctgccatgttgctggttgctgtgcccttctttgagccagtgtttggagaaggaggaatatttggtccctggtcagtttctgctttgcttatggtgctgctatctggagtaatagctttcatggtgaacttatcaatttattggatcattgggaacacttcacctgtcactcaagaaatgaagtcatnggccgggtgcacggtggctcacgcctgtaatcccagcactttgggaggccaaggccagcggatcacttgaggtcaggagttcgagaccagcctgaccaacatggagaaaccctgtctcaactaataatacaaaattagccaggcgtggtggcgcatgcctgtaatcccagctactcgggaggctgaggcaggagaatcacttgaacccgggaggcggaggttgcagtgagccgagatcgtaccattgcactccagcctgggcaacaagagcgaaactccatttcaaaaaaaaaaaattggtgacagactcaatgatggaatgatttgtcggaattaacacaaagcagattttattcatataatgacttttttttaagagtctcttttttaaaaaaacttaattctctaaaaccgaaatggttcatgcttctttttaaaaatgattgtataaaatgtatggaatggttagcctggtgtggtggtgcacacctgtaatcccagctacttgggagactgagacatgagaatcgcttgagcctgggaggcggaggttgcaatgagccaagatcgtaccactgcactccagcctgggcgacagagcaagacactgtctctctctctctctccatatatatatgtgtgtgtgtgtatatatatatatatatgtgtgtgtgtgtgtgtatacatatatccacatatatacacacacacatacatatacatgtgtatatatataccatcccatatatatgtgggatatatatatatatatatatggatatggttatatatatgggatggtttggttggtcccagcaaagtatatgaaaattaaagttctgtgataatgacaaaggaattgctgttactgtactgcaaatatgctgtgggttctcggtgttcaaactcttctaaggaaggacacacagtagctctctgcttgctgatagatggtttcccagtgtgagatttgttattttgatcagagtattcaaatcagaatttaaatctagtgtttctattttagtttagcttcctgatttatataaatgaaatctcgatttataaagtataataaagatgactgtaagac

SEQ ID NO: 389405 - DNA, 915 bp, Homo sapiens
gtttaaatggctcaaagaaaagactataaatggaattgaacatgtttgttagctgtttgagcattttatattggtaaattttttattttcttattttttgtcttacagtcgaccaggctggagtgcaatggcacgatctcggctcaccgcaacctccgcctcccgggtttaagcgattctcctgcctcagcctcccgagtagctgggattacaggcatgcgccaccacgcccggctaattttgtatttttagtaaagacggggtttctccatgttaatcaggctggtctcgaactctgacctcaggtgatctgcccgccccagctacttgggagactgagacatgagaatcgcttgagcctgggaggcggaggttgcaatgagccaagatcgtaccactgcactccagcctgggcgacagagcaagacactgtctctctctctctctccatatatatatgtgtgtgtgtgtatatatatatatatatgtgtgtgtgtgtgtgtatacatatatccacatatatacacacacacatacatatacatgtgtatatatataccatcccatatatatgtgggatatatatatatatatatatggatatggttatatatatgggatggtttggttggtcccagcaaagtatatgaaaattaaagttctgtgataatgacaaaggaattgctgttactgtactgcaaatatgctgtgggttctcggtgttcaaactcttctaaggaaggacacacagtagctctctgcttgctgatagatggtttcccagtgtgagatttgttattttgatcagagtattcaaatcagaatttaaatctagtgtttctattttagtttagcttcctgatttatataaatgaaatctcgatttataaagtataataaagatgactgtaagac

SEQ ID NO: 389406 - DNA, 1305 bp, Homo sapiens
ggcggaagcactggagccccgagtcacgtggctgcgggcggagatgagcggggcgtgggacgtgctgcggcgtcctagctggcttacagggcggcggcggggtgtgtgtcctctgttaagagtgctactcgcccggggttgatctgtgcatgccactcctgggtcagacggtgaggtcggcgtctgcgaggacgcggcggtggagtagaagggcagccggagacaggcccggcgccccttccgaggctagacggccccagcttcgcggggatcatggcattgctggtggaccgagtgcggggccactggcgaatcgccgccgggctcctgttcaacctgctggtgtccatctgcattgtgttcctcaacaaatggatttatgtgtaccacggcttccccaacatgagcctgaccctggtgcacttcgtggtcacctggctgggcttgtatatctgccagaagctggacatctttgcccccaaaagtctgccgccctccaggctcctcctcctggccctcagcttctgtggctttgtggtcttcactaacctttctctgcagaacaacaccataggcacctatcagctggccaaggccatgaccacgccggtgatcatagccatccagaccttctgctaccagaaaaccttctccaccagaatccagctcacgctgattcctataactttaggtgtaatcctaaattcttattacgatgtgaagtttaatttccttggaatggtgtttgctgctcttggtgttttagttacatccctttatcaagtgtgggtaggagccaaacagcatgaattacaagtgaactcaatgcagctgctgtactaccaggctccgatgtcatctgccatgttgctggttgctgtgcccttctttgagccagtgtttggagaaggaggaatatttggtccctggtcagtttctgctttgcttatggtgctgctatctggagtaatagctttcatggtgaacttatcaatttattggatcattgggaacacttcacctgtcacctataacatgttcggacacttcaagttctgcattactttattcggaggatatgttttatttaaggatccactgtccattaatcaggcccttggcattttatgtacattatttggcattctcgcctatacccactttaagctcagtgaacaggaaggaagtaggagtaaactggcacaacgtccttaattgggtttttgtggagaaaagaatgttgtcccaagaagataaaaaatattgttaagtgtgcaagttattaaaaaaaaaaaattgggccag

SEQ ID NO: 389407 - DNA, 1600 bp, Homo sapiens
ggcggaagcactggagccccgagtcacgtggctgcgggcggagatgagcggggcgtgggacgtgctgcggcgtcctagctggcttacagggcggcggcggggtgtgtgtcctctgttaagagtgctactcgcccggggttgatctgtgcatgccactcctgggtcagacggtgaggtcggcgtctgcgaggacgcggcggtggagtagaagggcagccggagacaggcccggcgccccttccgaggctagacggccccagcttcgcggggatcatggcattgctggtggaccgagtgcggggccactggcgaatcgccgccgggctcctgttcaacctgctggtgtccatctgcattgtgttcctcaacaaatggatttatgtgtaccacggcttccccaacatgagcctgaccctggtgcacttcgtggtcacctggctgggcttgtatatctgccagaagctggacatctttgcccccaaaagtctgccgccctccaggctcctcctcctggccctcagcttctgtggctttgtggtcttcactaacctttctctgcagaacaacaccataggcacctatcagctggccaaggccatgaccacgccggtgatcatagccatccagaccttctgctaccagaaaaccttctccaccagaatccagctcacgctgattcctataactttaggtgtaatcctaaattcttattacgatgtgaagtttaatttccttggaatggtgtttgctgctcttggtgttttagttacatccctttatcaagtgtgggtaggagccaaacagcatgaattacaagtgaactcaatgcagctgctgtactaccaggctccgatgtcatctgccatgttgctggttgctgtgcccttctttgagccagtgtttggagaaggaggaatatttggtccctggtcagtttctgctttgtcgcctggactagagtgcagttgtgcattcttggctcactgcaacctccacctcctgggtttaagtgattctcatgcctcaggctcccaagtagctgggattgaaggcatgtgccaccacgcccagctaatttttgtattttttgtagagacaaggtttcaccatgatggccaggctggtctcaaattcccagcttcaagtgatccaccacctcagcttcccaaagtgctgggattacaggcatgatccaccacgcctggtcccattgttctttacatctgatgggctgcttttgggttgttttatgcagtgcgagtgtgtgtgtaaatattaacatctatcttgttattcctttttatccttatccaaaaacctcagctataacatgttcggacacttcaagttctgcattactttattcggaggatatgttttatttaaggatccactgtccattaatcaggcccttggcattttatgtacattatttggcattctcgcctatacccactttaagctcagtgaacaggaaggaagtaggagtaaactggcacaacgtccttaattgggtttttgtggagaaaagaatgttgtcccaagaagataaaaaatattgttaagtgtgcaagttattaaaaaaaaaaaattgggccag

SEQ ID NO: 389408 - DNA, 271 bp, Homo sapiens
tgctgtgggatttgaacaagtgcctttgtttttctggttctaagttcagcatctgtgcaaatgaaaacattggtctatgtaggtggctttcaaactgtaacgcatctcagaatcacttgggttgactgctcagttggcagattgctaggccccttcctcaggttgctagttcactggaattagagacccaatatctgtattcttagtaagacctgccaggtggttctaaaggacaaaatctataagtgacattttgaaaaacactaatcta

SEQ ID NO: 389409 - DNA, 389 bp, Homo sapiens
tgcaacctctgcctcccaagttcgagctattctgctgcctcagtctcccgagtagttggggtctacaggcacacgccaccatgcttggctatgttttgtatttttagtagagacggggtttcgccatgttggccaggctggtcttgaactcccgacctcaagtaatccatccaccttggcctcccaaagtgctgggattacaggcgtgagccactgtgcccagccaaagagtagagttaaaatgttttcttcaatggctgtttcgagctgtgttaaaaaaaaaattattttaaaaatgttttcaccaccaaaataggtatgtgatgtgactgatttcttaattatcttgattgaagccctccacaggtaaacaccaaaacatcacacac

SEQ ID NO: 389410 - DNA, 317 bp, Homo sapiens
atttttagctgacagcataagggattcctgacaggccatgttatccaattttacaccaaaagaatgaattctctttcagataatatttctctacaaatacaagtggaatatataacccaatttagagctgactttgacaatacaatatatttatatgtaaataatatcctatatatttgttattatttatattattagtttatgttatgtatagttgtaaatatacacgtctacatgtataaatacataaataaaatgtatctgtaaaactaaaagtttcagttgaattttggttctccatggaatataagatattt

SEQ ID NO: 389411 - DNA, 406 bp, Homo sapiens
gggtttatttaaaacacacacacacacacacacacacacacacacacacacatacacacacaaaacaaaatccctcataaagatccttgaacatcagatgactcttacaaaacaatttgatgaattaagtgtaaatgaatcaggaacatgtggattaaatttccctcaaaatacacttgggtttaaatattcagagagaaagtgcttgggaaatatattctggattttcctgagctcaaatgttcgaaaattcatctcaaactttacttgacagcttccccaccccaggtcagatcgcattataaatacatggatatacgtctattgcatggtcgtaggggcgcacacatttttgcggcctggagtaataactatggtatatggagtgtgctgtgaagaagggctg

SEQ ID NO: 389412 - DNA, 759 bp, Homo sapiens
ccctgattcttccttttttggtttagtctaatggatgaaaaactcaaactgactgatgtggctgtaatcttgggcctgtgaggtagaacagcagaaaaaaaataggaatttagaagaagaagacttggtttgaatttatctcctttaataggtgtgtggcggctgggcacggtggctcacgcctgtgatcccagcactttgagaggctgaggcgggcggatcatgaggtcaggagactgagaccatcctggctgacgtggtgaaaccccgtctccactaaaaatacaaaaaattagccaggcatggtggcatgcgcctgtagtcccagctaatcaggaggctgaggctggagaatcgcttgaacccaggaggtggaggttattgtgagccgagatcgcaccactgcactccagcctgggcgacagagtgagacttcgtctcaaaaaaaaaaaaaaaaaaaggaatgtgtcagccaggtgtggtggctcacacctgtaatcccaacactttgggatgctgaggtgggtggattgcttgagcccagtagttcaagaccagcgtgggcaaaaatgataaaactctgtctctacaaaaaatacaaaaaatttacccagatgtggtggtgcatgcctgtagtctcagttatttaggaggctcaggtgggagaatcatttgagcctgggaggtcgaggctgcagtgagccaagactgcgccactgcactctagcctgggcaacagagtgagactccgtctcaaaa

SEQ ID NO: 389413 - DNA, 4404 bp, Homo sapiens
aagtgtcggtgaccaggggagtggctcagaacaacaaagggtcatgaccagagctagcctgacctggacatcacataccagtgttagtggcctgacatcaagtcagttacctttctgagcgtggttccataactcactgctggggtcagaactgctctgtgggcccaagcctgtgggagctgaagaagttagacacaggggtgggcacaggggtgggaggtgagggcagagaggggcagcgcctcacctccagtcctctggagtcccagcctggatgatctctaagtgacctcgtttgttttttgtttgttctgtctgggttgtttttttttttttttctcacagtgcagctcaacaaggacacagtgtgcaaaccttgccttgcaggctacttctctgatgccttttcctccacggacaaatgcagaccctggaccaactgtaccttccttggaaagagagtagaacatcatgggacagagaaatccgatgcggtttgcagttcttctctgccagctagaaaaccaccaaatgaaccccatgtttacttgcccggtttaataattctgcttctcttcgcgtctgtggccctggtggctgccatcatctttggcgtttgctataggaaaaaagggaaagcactcacagctaatttgtggcactggatcaatgaggcttgtggccgcctaagtggagataaggagtcctcaggtgacagttgtgtcagtacacacacggcaaactttggtcagcagggagcatgtgaaggtgtcttactgctgactctggaggagaagacatttccagaagatatgtgctacccagatcaaggtggtgtctgtcagggcacgtgtgtaggaggtggtccctacgcacaaggcgaagatgccaggatgctctcattggtcagcaagaccgagatagaggaagacagcttcagacagatgcccacagaagatgaatacatggacaggccctcccagcccacagaccagttactgttcctcactgagcctggaagcaaatccacacctcctttctctgaacccctggaggtgggggagaatgacagtttaagccagtgcttcacggggacacagagcacagtgggttcagaaagctgcaactgcactgagcccctgtgcaggactgattggactcccatgtcctctgaaaactacttgcaaaaagaggtggacagtggccattgcccgcactgggcagccagccccagccccaactgggcagatgtctgcacaggctgccggaaccctcctggggaggactgtgaacccctcgtgggttccccaaaacgtggacccttgccccagtgcgcctatggcatgggccttccccctgaagaagaagccagcaggacggaggccagagaccagcccgaggatggggctgatgggaggctcccaagctcagcgagggcaggtgccgggtctggaagctcccctggtggccagtcccctgcatctggaaatgtgactggaaacagtaactccacgttcatctccagcgggcaggtgatgaacttcaagggcgacatcatcgtggtctacgtcagccagacctcgcaggagggcgcggcggcggctgcggagcccatgggccgcccggtgcaggaggagaccctggcgcgccgagactccttcgcggggaacggcccgcgcttcccggacccgtgcggcggccccgaggggctgcgggagccggagaaggcctcgaggccggtgcaggagcaaggcggggccaaggcttgagcgccccccatggctgggagcccgaagctcggagccagggctcgcgagggcagcaccgcagcctctgccccagccccggccacccagggatcgatcggtacagtcgaggaagaccacccggcattctctgcccactttgccttccaggaaatgggcttttcaggaagtgaattgatgaggactgtccccatgcccacggatgctcagcagcccgccgcactggggcagatgtctcccctgccactcctcaaactcgcagcagtaatttgtggcactatgacagctatttttatgactatcctgttctgtgggggggggggtctatgttttccccccatatttgtattccttttcataacttttcttgatatctttcctccctcttttttaatgtaaaggttttctcaaaaattctcctaaaggtgagggtctctttcttttctcttttccttttttttttctttttttggcaacctggctctggcccaggctagagtgcagtggtgcgattatagcccggtgcagcctctaactcctgggctcaagcaatccaagtgatcctcccacctcaaccttcggagtagctgggatcacagctgcaggccacgcccagcttcctccccccgactccccccccccagagacacggtcccaccatgttacccagcctggtctcaaactccccagctaaagcagtcctccagcctcggcctcccaaagtactgggattacaggcgtgagcccccacgctggcctgctttacgtattttcttttgtgcccctgctcacagtgttttagagatggctttcccagtgtgtgttcattgtaaacacttttgggaaagggctaaacatgtgaggcctggagatagttgctaagttgctaggaacatgtggtgggactttcatattctgaaaaatgttctatattctcatttttctaaaagaaagaaaaaaggaaacccgatttatttctcctgaatctttttaagtttgtgtcgttccttaagcagaactaagctcagtatgtgaccttacccgctaggtggttaatttatccatgctggcagaggcactcaggtacttggtaagcaaatttctaaaactccaagttgctgcagcttggcattcttcttattctagaggtctctctggaaaagatggagaaaatgaacaggacatggggctcctggaaagaaagggcccgggaagttcaaggaagaataaagttgaaattttaatttgcattttttttgtctagataagaatagcgtgaatagatcctcttttattcgtaaataatcgtgcatctgtgggttagccttgtagaagtggaaaacattccattttccaatgcatttaaatgtaaagccaaatctgcatgttgtgaatttaagaaaacttattatcctaaaggtgcctttctcttggcatcatcccgcttgtgagaagcctagaggacgctccaggtggaaggaaatcccctgggtggttttatcttttgttacccagtgagcactggttccccgcaaatactggggaaaagcaaaaatacacaagcaagttaaaattaattttgcacatctgggaggttataaaagaaagcactaatagtagtcactgcccagactttactggccacaaatgcccagctgaagagcatgactgtggatcactggtttttccctcctgctggaaatgctggggtggtagcggtcgattaggattttcagtggagaagcacaggacagttctgtaattatgggactccttagccaacataaagaactgcaggaaataactgcacagccaggaggatccgttggtgggaatttaccgtcattcctgcccttttatttaacatcatccacagagagatgttatacaaatggaggaaaccattataccttttgatatggaatatattacagagttacagttcacaaagtagaatgctgagctgaaaacccgagtttctgctgtgactgtcatctcactgagcacttcgcttttctttgcttttattttttccttctataaaaaggcaataatgataatttataatagtttccctacccagagatattagaagtatgctacagtgaatgttaaagtaccttgagatccttaaatcaaaggtgctatatacataagtaagactctactttcagaaaaaggtaatattatttcctgcactgatccctactaattctatattgatccaaaggcaactcaatgctaaaaaatgtatagaaaatataagtctgtgtctgtgtactgtagagatgtatgtgacaagtgtaaacaaaatgaactgaagcagtaatgaacagttattagggggaacatgataaagagattatattaagcttatgtttcaccataaaatcctttttatggcttactaaaaccgagctcactgtaaaatcatgatccaacttattgctaatctttatgatatgcttattcctaatctttatggtatggtgtcaaccgttcatttgtatcttattgctcattccctggaccacagactagggacagaaaatacttgctttaataatatatatgctgttgatttcacaaaaatttcttaaaatacagcctgggtacccagtgaaagagctgaaatgga

SEQ ID NO: 389414 - DNA, 251 bp, Homo sapiens
gtgctcgcagacaaagggcagccaagggtggggactgtcacttctgctatcccagaccaacatttttgattctgaggtttgatttaccgggatttgtttttcaactgcgtaaaattaaagaatctttactaccatatttctcattttcttccaatacagaaccccatgtttacttgcccggtttaataattctgcttctcttcgcgtctgtggccctggtggctgccatcatctttggcgtttgctatagg

SEQ ID NO: 389415 - DNA, 4524 bp, Homo sapiens
ccgctgaggccgcggcgcccgccagcctgtcccgcgccatggccccgcgcgcccggcggcgccgcccgctgttcgcgctgctgctgctctgcgcgctgctcgcccggctgcaggtggctttgcagatcgctcctccatgtaccagtgagaagcattatgagcatctgggacggtgctgtaacaaatgtgaaccaggaaagtacatgtcttctaaatgcactactacctctgacagtgtatgtctgccctgtggcccggatgaatacttggatagctggaatgaagaagataaatgcttgctgcataaagtttgtgatacaggcaaggccctggtggccgtggtcgccggcaacagcacgaccccccggcgctgcgcgtgcacggctgggtaccactggagccaggactgcgagtgctgccgccgcaacaccgagtgcgcgccgggcctgggcgcccagcacccgttgcagctcaacaaggacacagtgtgcaaaccttgccttgcaggctacttctctgatgccttttcctccacggacaaatgcagaccctggaccaactgtaccttccttggaaagagagtagaacatcatgggacagagaaatccgatgcggtttgcagttcttctctgccagctagaaaaccaccaaatgaaccccatgtttacttgcccggtttaataattctgcttctcttcgcgtctgtggccctggtggctgccatcatctttggcgtttgctataggaaaaaagggaaagcactcacagctaatttgtggcactggatcaatgaggcttgtggccgcctaagtggagataaggagtcctcaggtgacagttgtgtcagtacacacacggcaaactttggtcagcagggagcatgtgaaggtgtcttactgctgactctggaggagaagacatttccagaagatatgtgctacccagatcaaggtggtgtctgtcagggcacgtgtgtaggaggtggtccctacgcacaaggcgaagatgccaggatgctctcattggtcagcaagaccgagatagaggaagacagcttcagacagatgcccacagaagatgaatacatggacaggccctcccagcccacagaccagttactgttcctcactgagcctggaagcaaatccacacctcctttctctgaacccctggaggtgggggagaatgacagtttaagccagtgcttcacggggacacagagcacagtgggttcagaaagctgcaactgcactgagcccctgtgcaggactgattggactcccatgtcctctgaaaactacttgcaaaaagaggtggacagtggccattgcccgcactgggcagccagccccagccccaactgggcagatgtctgcacaggctgccggaaccctcctggggaggactgtgaacccctcgtgggttccccaaaacgtggacccttgccccagtgcgcctatggcatgggccttccccctgaagaagaagccagcaggacggaggccagagaccagcccgaggatggggctgatgggaggctcccaagctcagcgagggcaggtgccgggtctggaagctcccctggtggccagtcccctgcatctggaaatgtgactggaaacagtaactccacgttcatctccagcgggcaggtgatgaacttcaagggcgacatcatcgtggtctacgtcagccagacctcgcaggagggcgcggcggcggctgcggagcccatgggccgcccggtgcaggaggagaccctggcgcgccgagactccttcgcggggaacggcccgcgcttcccggacccgtgcggcggccccgaggggctgcgggagccggagaaggcctcgaggccggtgcaggagcaaggcggggccaaggcttgagcgccccccatggctgggagcccgaagctcggagccagggctcgcgagggcagcaccgcagcctctgccccagccccggccacccagggatcgatcggtacagtcgaggaagaccacccggcattctctgcccactttgccttccaggaaatgggcttttcaggaagtgaattgatgaggactgtccccatgcccacggatgctcagcagcccgccgcactggggcagatgtctcccctgccactcctcaaactcgcagcagtaatttgtggcactatgacagctatttttatgactatcctgttctgtgggggggggggtctatgttttccccccatatttgtattccttttcataacttttcttgatatctttcctccctcttttttaatgtaaaggttttctcaaaaattctcctaaaggtgagggtctctttcttttctcttttccttttttttttctttttttggcaacctggctctggcccaggctagagtgcagtggtgcgattatagcccggtgcagcctctaactcctgggctcaagcaatccaagtgatcctcccacctcaaccttcggagtagctgggatcacagctgcaggccacgcccagcttcctccccccgactccccccccccagagacacggtcccaccatgttacccagcctggtctcaaactccccagctaaagcagtcctccagcctcggcctcccaaagtactgggattacaggcgtgagcccccacgctggcctgctttacgtattttcttttgtgcccctgctcacagtgttttagagatggctttcccagtgtgtgttcattgtaaacacttttgggaaagggctaaacatgtgaggcctggagatagttgctaagttgctaggaacatgtggtgggactttcatattctgaaaaatgttctatattctcatttttctaaaagaaagaaaaaaggaaacccgatttatttctcctgaatctttttaagtttgtgtcgttccttaagcagaactaagctcagtatgtgaccttacccgctaggtggttaatttatccatgctggcagaggcactcaggtacttggtaagcaaatttctaaaactccaagttgctgcagcttggcattcttcttattctagaggtctctctggaaaagatggagaaaatgaacaggacatggggctcctggaaagaaagggcccgggaagttcaaggaagaataaagttgaaattttaatttgcattttttttgtctagataagaatagcgtgaatagatcctcttttattcgtaaataatcgtgcatctgtgggttagccttgtagaagtggaaaacattccattttccaatgcatttaaatgtaaagccaaatctgcatgttgtgaatttaagaaaacttattatcctaaaggtgcctttctcttggcatcatcccgcttgtgagaagcctagaggacgctccaggtggaaggaaatcccctgggtggttttatcttttgttacccagtgagcactggttccccgcaaatactggggaaaagcaaaaatacacaagcaagttaaaattaattttgcacatctgggaggttataaaagaaagcactaatagtagtcactgcccagactttactggccacaaatgcccagctgaagagcatgactgtggatcactggtttttccctcctgctggaaatgctggggtggtagcggtcgattaggattttcagtggagaagcacaggacagttctgtaattatgggactccttagccaacataaagaactgcaggaaataactgcacagccaggaggatccgttggtgggaatttaccgtcattcctgcccttttatttaacatcatccacagagagatgttatacaaatggaggaaaccattataccttttgatatggaatatattacagagttacagttcacaaagtagaatgctgagctgaaaacccgagtttctgctgtgactgtcatctcactgagcacttcgcttttctttgcttttattttttccttctataaaaaggcaataatgataatttataatagtttccctacccagagatattagaagtatgctacagtgaatgttaaagtaccttgagatccttaaatcaaaggtgctatatacataagtaagactctactttcagaaaaaggtaatattatttcctgcactgatccctactaattctatattgatccaaaggcaactcaatgctaaaaaatgtatagaaaatataagtctgtgtctgtgtactgtagagatgtatgtgacaagtgtaaacaaaatgaactgaagcagtaatgaacagttattagggggaacatgataaagagattatattaagcttatgtttcaccataaaatcctttttatggcttactaaaaccgagctcactgtaaaatcatgatccaacttattgctaatctttatgatatgcttattcctaatctttatggtatggtgtcaaccgttcatttgtatcttattgctcattccctggaccacagactagggacagaaaatacttgctttaataatatatatgctgttgatttcacaaaaatttcttaaaatacagcctgggtacccagtgaaagagctgaaatgga

SEQ ID NO: 389416 - DNA, 4432 bp, Homo sapiens
ccccaagttgttctgccagaagtgtggctgagtatttctgcagccccagtgaaagccacagtccacggggcccgcactctctcatcattctggggaggggaaggaaagtacatgtcttctaaatgcactactacctctgacagtgtatgtctgccctgtggcccggatgaatacttggatagctggaatgaagaagataaatgcttgctgcataaagtttgtgatacaggcaaggccctggtggccgtggtcgccggcaacagcacgaccccccggcgctgcgcgtgcacggctgggtaccactggagccaggactgcgagtgctgccgccgcaacaccgagtgcgcgccgggcctgggcgcccagcacccgttgcagctcaacaaggacacagtgtgcaaaccttgccttgcaggctacttctctgatgccttttcctccacggacaaatgcagaccctggaccaactgtaccttccttggaaagagagtagaacatcatgggacagagaaatccgatgcggtttgcagttcttctctgccagctagaaaaccaccaaatgaaccccatgtttacttgcccggtttaataattctgcttctcttcgcgtctgtggccctggtggctgccatcatctttggcgtttgctataggaaaaaagggaaagcactcacagctaatttgtggcactggatcaatgaggcttgtggccgcctaagtggagataaggagtcctcaggtgacagttgtgtcagtacacacacggcaaactttggtcagcagggagcatgtgaaggtgtcttactgctgactctggaggagaagacatttccagaagatatgtgctacccagatcaaggtggtgtctgtcagggcacgtgtgtaggaggtggtccctacgcacaaggcgaagatgccaggatgctctcattggtcagcaagaccgagatagaggaagacagcttcagacagatgcccacagaagatgaatacatggacaggccctcccagcccacagaccagttactgttcctcactgagcctggaagcaaatccacacctcctttctctgaacccctggaggtgggggagaatgacagtttaagccagtgcttcacggggacacagagcacagtgggttcagaaagctgcaactgcactgagcccctgtgcaggactgattggactcccatgtcctctgaaaactacttgcaaaaagaggtggacagtggccattgcccgcactgggcagccagccccagccccaactgggcagatgtctgcacaggctgccggaaccctcctggggaggactgtgaacccctcgtgggttccccaaaacgtggacccttgccccagtgcgcctatggcatgggccttccccctgaagaagaagccagcaggacggaggccagagaccagcccgaggatggggctgatgggaggctcccaagctcagcgagggcaggtgccgggtctggaagctcccctggtggccagtcccctgcatctggaaatgtgactggaaacagtaactccacgttcatctccagcgggcaggtgatgaacttcaagggcgacatcatcgtggtctacgtcagccagacctcgcaggagggcgcggcggcggctgcggagcccatgggccgcccggtgcaggaggagaccctggcgcgccgagactccttcgcggggaacggcccgcgcttcccggacccgtgcggcggccccgaggggctgcgggagccggagaaggcctcgaggccggtgcaggagcaaggcggggccaaggcttgagcgccccccatggctgggagcccgaagctcggagccagggctcgcgagggcagcaccgcagcctctgccccagccccggccacccagggatcgatcggtacagtcgaggaagaccacccggcattctctgcccactttgccttccaggaaatgggcttttcaggaagtgaattgatgaggactgtccccatgcccacggatgctcagcagcccgccgcactggggcagatgtctcccctgccactcctcaaactcgcagcagtaatttgtggcactatgacagctatttttatgactatcctgttctgtgggggggggggtctatgttttccccccatatttgtattccttttcataacttttcttgatatctttcctccctcttttttaatgtaaaggttttctcaaaaattctcctaaaggtgagggtctctttcttttctcttttccttttttttttctttttttggcaacctggctctggcccaggctagagtgcagtggtgcgattatagcccggtgcagcctctaactcctgggctcaagcaatccaagtgatcctcccacctcaaccttcggagtagctgggatcacagctgcaggccacgcccagcttcctccccccgactccccccccccagagacacggtcccaccatgttacccagcctggtctcaaactccccagctaaagcagtcctccagcctcggcctcccaaagtactgggattacaggcgtgagcccccacgctggcctgctttacgtattttcttttgtgcccctgctcacagtgttttagagatggctttcccagtgtgtgttcattgtaaacacttttgggaaagggctaaacatgtgaggcctggagatagttgctaagttgctaggaacatgtggtgggactttcatattctgaaaaatgttctatattctcatttttctaaaagaaagaaaaaaggaaacccgatttatttctcctgaatctttttaagtttgtgtcgttccttaagcagaactaagctcagtatgtgaccttacccgctaggtggttaatttatccatgctggcagaggcactcaggtacttggtaagcaaatttctaaaactccaagttgctgcagcttggcattcttcttattctagaggtctctctggaaaagatggagaaaatgaacaggacatggggctcctggaaagaaagggcccgggaagttcaaggaagaataaagttgaaattttaatttgcattttttttgtctagataagaatagcgtgaatagatcctcttttattcgtaaataatcgtgcatctgtgggttagccttgtagaagtggaaaacattccattttccaatgcatttaaatgtaaagccaaatctgcatgttgtgaatttaagaaaacttattatcctaaaggtgcctttctcttggcatcatcccgcttgtgagaagcctagaggacgctccaggtggaaggaaatcccctgggtggttttatcttttgttacccagtgagcactggttccccgcaaatactggggaaaagcaaaaatacacaagcaagttaaaattaattttgcacatctgggaggttataaaagaaagcactaatagtagtcactgcccagactttactggccacaaatgcccagctgaagagcatgactgtggatcactggtttttccctcctgctggaaatgctggggtggtagcggtcgattaggattttcagtggagaagcacaggacagttctgtaattatgggactccttagccaacataaagaactgcaggaaataactgcacagccaggaggatccgttggtgggaatttaccgtcattcctgcccttttatttaacatcatccacagagagatgttatacaaatggaggaaaccattataccttttgatatggaatatattacagagttacagttcacaaagtagaatgctgagctgaaaacccgagtttctgctgtgactgtcatctcactgagcacttcgcttttctttgcttttattttttccttctataaaaaggcaataatgataatttataatagtttccctacccagagatattagaagtatgctacagtgaatgttaaagtaccttgagatccttaaatcaaaggtgctatatacataagtaagactctactttcagaaaaaggtaatattatttcctgcactgatccctactaattctatattgatccaaaggcaactcaatgctaaaaaatgtatagaaaatataagtctgtgtctgtgtactgtagagatgtatgtgacaagtgtaaacaaaatgaactgaagcagtaatgaacagttattagggggaacatgataaagagattatattaagcttatgtttcaccataaaatcctttttatggcttactaaaaccgagctcactgtaaaatcatgatccaacttattgctaatctttatgatatgcttattcctaatctttatggtatggtgtcaaccgttcatttgtatcttattgctcattccctggaccacagactagggacagaaaatacttgctttaataatatatatgctgttgatttcacaaaaatttcttaaaatacagcctgggtacccagtgaaagagctgaaatgga

SEQ ID NO: 389417 - DNA, 272 bp, Homo sapiens
ccccaaaagttgacatggtcaatgaagaaataggcaaacagcaaaaagttgcagtcatacaccaaatgaaagaagatcaaagcaaaatccctgaaggaatccaagttgactctgacgggctaatcaccataacaactcccaataaacttgccacgctcagtgttcgagccatgccccttccagaagaagtcacccagattctggaagaaaatagtgatttgattcgttctatggagcagttgacatcctctttgaatgagggtgaaaatact

SEQ ID NO: 389418 - DNA, 200 bp, Homo sapiens
gtgtggtcgcatgggtcagaattcccttcttttctaaggttgactaatattccagtgtatgtatataccatattttgtttatccattcatccatggattaacgcttgggtcgcttccacattttagctatgatgaataatgctactaggaacgtgggtgtgctgctatttcttcgagaccctgctctcagttcttttcgg

SEQ ID NO: 389419 - DNA, 503 bp, Homo sapiens
ttagcccttcagggtaggggatggacagggaatgggatagaaatgggggattaggtaggcaagtgtgtactacaattaaggagaatccttgagctagaactgttatccaaagtgtaatcgagaaccacatgtggctatttaaatttattaaaattaaatttaaaattcaattcctcagtcataatagccatgtttccagcgcttaataaccacatgtggctggtgactatcatgtcacagcacagatataaaacatttccatcactacagaaacttggacagaattttgtcacacatatttcttactttcatgcaatgtgagacacttctgtgacagatccgaagttgtatttttctttaatgaacacccatttggctaacaaaactacagtttcactcaggatgcctgtgttttgttgttattgtttgatacagggtcttactctgtcacccaggctggagtgcagtggtgtgatcaccgctcactgcagcctccacctccc

SEQ ID NO: 389420 - DNA, 556 bp, Homo sapiens
cccgcgctgtgaggccttgacctgccgtacgtagaggcgccaggccaggccgtgggccaccagcagttgtgcgccgccccgtaggtgccgccgccagagcggttgtagatgtcacttagccgttaggctcgttgatggtgatccagagcttcaccaggtccccccagctcctggaagcacagcccagcgtaggcctggaagcctcggccgtcgatgggttcagccacccgtcggcatgcaacagaggctcggggaggcctagagacaggattttgccacgttggccaggctggtcctgacaggccagacaggtcctgacctcaagtgatacgcccgcctcggcctcccaaagtgctaggattacaggtgtgagccatcgagcctggccagcatcagattacttcttaattaaaaatggaaaagttaccatatggcacatatcacctttttttttcttttttcttttttttggggggagtagggaggagggacagggtcttgccctgtcgcccacactagactgcatcctcgaccacctgggctcaagtgatctacc

SEQ ID NO: 389421 - DNA, 596 bp, Homo sapiens
ttccaatttaaaaaagggggtgttgtgttgcaggaaaggatttgtatgagaaagaagtgaggttgtccttgatcccttgaatttatttgctcgccaatgagggctggagtgttttctgtctttgttactgtctgcactttcaaggaaaagaaagtcttctcatcagtgatatcagagtgtaccaagaaagatcaggttgctgattttcagaatgatccaggtcccagtaaataccaatgatttttatcagattaagaagtcaggcagtctactaatatccttgtcagaatcaaatctaattccaaggttgcaaatagagctataagaaagaaaaaaaagagagatgtaatattgtggctggtaatttttgtccttttcactgtggacgtgaatattttgtttaaatatttagttgggcaacagcagcttcagagaattctgtgagatgggatttgtctctagaggccccttcagtattagctggctccctacttgctggttgggcagtgtcttcctgctcctgtccagggatcctcccattcccttcttgtaagtctgtcttctgaaaaacaactccatatctgatttccaccatc

SEQ ID NO: 389422 - DNA, 640 bp, Homo sapiens
tgtcttaaaaagtttaaagacaacagacataaatctgtaggactagatggggaagagatctgaggatcagagccagagtacattcagaatcactcctttgctaagatgtggaaatttcatatctaagtctccattgctgagtcttgccttaggatgaattctcttcccgaaagaaattcagttctttatgcagttagagttctgagaattctgccctgaacatgtctggattcccacataggcttcagccgggactcttgctattcaccattgcggtccagaagaagctaagttcagggatcctgggcattgaagataatacccatgctgtgggctgagaaattggtcttgactgcctgctgtctgggggaagacaccatgtagatgaggcaaactggttcttctgtaaatctctttgtacttggcttgcactgctggaatcaacctgaggaattaggattccatgactcttgtttcccccttagcaaacacatgttttgcattcttatcatgtccagccatcttctgttctacctttatgatttcttacctggaagtacaacatgcaggaaaatcaaatattcctaagtacagttggaatgtcccttgggaagctgcaggagtccaaggagatgtcata

SEQ ID NO: 389423 - DNA, 584 bp, Homo sapiens
tggggcagggcagggggagtatatgggagctctgtactttctgctccatttttctgtaaacctaaaactgctcttaaaaataaagtctattaattaaaaaaaaaaacaaggcaagatcaaagcatgactacagctagcatctctgctcactgagtccaatgttttcagggtgtgcctattttgggttttcagtttattagcatggcttatccgataatagatacgagtacttcatgtagtgtttagttaaattttgcaaaactgcattctgaggaagtcctgttctttcatttttaaagctacaggaagagagggggaagggacagaagggaaggaggaggaaaagaaggggggagcatgagggaatcaaatgccacagtcccatatttaacatttgcccttacaggaatagcaaatgtgcggcacgttgatttctcactatcagcaccaaagttttgtactctagatactgcaaataaggaatgtcagttaattggagttaagcaacacaggaacagagggttatatcttacttctctctgtgatcaaccctctttcccttttttgccccttctcacatagac

SEQ ID NO: 389424 - DNA, 802 bp, Homo sapiens
agcgcgttctcgtgtcccggccctgccttggcctctagtaaatggcggaggtggttttaatttttttgagggctgaggagatcacttccgaaggcggtaactgcagcctccctgcccctccaaggtggtgctggaaggacctccagtctttcctcgcctcatcccactccacggcgggactttgacagggttacctctcgaccctcatcccactccacggcgggactttgacagggtcgtgcagttaaccccgggggcgcaaagaggggagtcattcctttcgtgcatcctgacacacacaggttcttcccggagacgaatggtgccagtgatggttgcccgctcggatgcgtagtttccagtttacatttagaaccgacctgccagactccctcctctactctccccaccaccacgacccgcctgccccgttccccaagcctgagaagttgctggctacgtgtttctataaagaatgagtgaaaattctgccttttggggaagctaccgcagctggggtacccacaagtaatgttttagatgtattgatggccctgcccaagaatgaagacctcaagttagactccttggctgccttgtttccttgaattagcacagggaagttggacccaacactcttaagagtgaactcagctctgggagcagtgtttaacccggatatttatttgatcatttataacacgaggagacctagcaacatttcagaactgaagggatcagtgtaacagacaaagcaactctgtcacaaaaggaagccttcatctttttaaagtgggggtga

SEQ ID NO: 389425 - DNA, 685 bp, Homo sapiens
gcagtctgtagctcctggaagcccgttttgtccatgatttagcaggaatgcattacccttccatgaggaggagaccccattctataccaacacctattctgatttttcggtcaccctgaagtttatattcttatccaaccaggcttcggaataatctcccatattgtaacttactactccggaaaaaaagaaccatttggatacataggtatggtctgagctatgatatcaattggcttcctagggtttatcgtgtgagcacaccatatatttacagtaggaatagacgtagacacacgagcatatttcacctccgctaccataatcatcgctatccccaccggcgtcaaagtatttagctgactcgccacactccacggaagcaatatgaaatgatctgctgcagtgctctgaaccctaggattcatctttcttttcaccgtaggtggcctgactggcattgtattagcaaactcatcactagacatcgtactacacgacacgtactacgttgtagctcacttccactatgtcctatcaataggagctgtatttgccatcataggaggcttcattcactgatttcccctattctcaggctacaccctagaacaaacctacgccaaaatccatttcactatcatattcatcggcgtaaatctaactttcttccacaacatttctc

SEQ ID NO: 389426 - DNA, 560 bp, Homo sapiens
tactccaatatctgtagctttcaactgatgtctatttttggcttaagcctctctgtaaccaattatataattttacggtaaactgattttgtgatgtacaaagttcaaatgattcaagtataaattattaccaagcaatttattatgtcactcaataaaccaaaagcatgcacaggaatagatctcccagcataaaggatgtatttaatttatttgcatgtgtaactttttaaaaataaagaattgtggtataattttaaaaaaatagtagatttatgtcaccataaattgatgatttctattaaaagtaatggcaaaaaccgatatcattatttttgcactgacctaaataaaatcaactgggctttctctgctgcccagcaatctttcttaatttgttgtctgctctttccattttctacgactgcttaaaaagcgtaaaccgtctcctatctctctctctttctctctctgtctctcgctttttaagagataggttatcattctgtgacccaggctggaatgcaatggctagatcatagttcactgtaacctcaaac

SEQ ID NO: 389427 - DNA, 1620 bp, Homo sapiens
ctcgcttcctgtgagtcttcaggtcgccgcttgctctcgttcctagggtttggcctgcagtggacgagcatcgcatagcctgcggggctggatgctgaccgcccgggccagcacctaggcggacgcggagctgtgcagaccagggttcgcgcgggccgggtggaggctcaagcggggaccccggagcgtgagccccggagtcggcggcgctggggccagaggggccgggagggagtcggctgaggtggcggcggaggcgaagtggcggcggaggcgaaggggcggcgggacccgggcctggcccgtatgtgtccttggcggcctagactaggccgtcgctgtatggtgagccccagggaggcggatctgggcccccagaaggacacccgcctggatttgccccgtaggcccggcccgggcccctcgggagcagaacagccttggtgaggtggacaggaggggacctcgcgagcagacgcgcgcgccagcgacagcagccccgccccggcctctcgggagccggggggcagaggctgcggagccccaggagggtctatcagccacagtctctgcatgtttccaagagcaacaggaaatgaacacattgcaggggccagtgtcattcaaagatgtggctgtggatttcacccaggaggagtggtggcaactggaccctgatgagaagatagcatacggggatgtgatgttggagaactacagccatctagtttctgtggggtatgattatcaccaagccaaacatcatcatggagtggaggtgaaggaagtggagcagggagaggagccgtggataatggaaggtgaatttccatgtcaacatagtccagtacagaacctgctaaggccatcaaacctattgatcggaagtcagtccatcagatttgctctgggccagtggtactgagtctaagcactgcagtgaaggagttagtagaaaacagtctggatgctggtgccactaatattgatctaaagcttaaggactatggagtggatctcattgaagtttcagacaatggatgtggggtagaagaagaaaactttgaaggcttaatctctttcagctctgaaacatcacacatgtaagattcaagagtttgccgacctaactgaagttgaaactttcggttttcagggggaagctctgagctcactgtgtgcactgagcgatgtcaccatttctacctgccacgcgtcggtgaaggttgggactcgactggtgtttgatcacgatgggaaaatcatccaggaaaccccctacccccaccccagagggaccacagtcagcgtgaagcagttattttctacgctacctgtgcgccataaggaatttcaaaggaatattaagaaggtacagtaaattaatcttggttttcaagagtattggttaatgcacatgagcaaaagatttactaaagatgtttattcttcagttgattctcttgccataatctattgagaaatgctttatttgcatttctcgttaaagacttaacattaaagacttaactttagggtgatttacttttttcttttcatcacatagtgtttattaggactgggcaacatagtgagactctgtttctatgaaaaattaaa

SEQ ID NO: 389428 - DNA, 1555 bp, Homo sapiens
ctcgcttcctgtgagtcttcaggtcgccgcttgctctcgttcctagggtttggcctgcagtggacgagcatcgcatagcctgcggggctggatgctgaccgcccgggccagcacctaggcggacgcggagctgtgcagaccagggttcgcgcgggccgggtggaggctcaagcggggaccccggagcgtgagccccggagtcggcggcgctggggccagaggggccgggagggagtcggctgaggtggcggcggaggcgaagtggcggcggaggcgaaggggcggcgggacccgggcctggcccgtatgtgtccttggcggcctagactaggccgtcgctgtatggtgagccccagggaggcggatctgggcccccagaaggacacccgcctggatttgccccgtaggcccggcccgggcccctcgggagcagaacagccttggtgaggtggacaggaggggacctcgcgagcagacgcgcgcgccagcgacagcagccccgccccggcctctcgggagccggggggcagaggctgcggagccccaggagggtctatcagccacagtctctgcatgtttccaagagcaacaggaaatgaacacattgcaggggccagtgtcattcaaagatgtggctgtggatttcacccaggaggagtggtggcaactggaccctgatgagaagatagcatacggggatgtgatgttggagaactacagccatctagtttctgtggggtatgattatcaccaagccaaacatcatcatggagtggaggtgaaggaagtggagcagggagaggagccgtggataatggaaggtgaatttccatgtcaacatagtccagtacagaacctgctaaggccatcaaacctattgatcggaagtcagtccatcagatttgctctgggccagtggtactgagtctaagcactgcagtgaaggagttagtagaaaacagtctggatgctggtgccactaatattgatctaaagcttaaggactatggagtggatctcattgaagtttcagacaatggatgtggggtagaagaagaaaactttgaaggcttaatctctttcagctctgaaacatcacacatgtaagattcaagagtttgccgacctaactgaagttgaaactttcggttttcagggggaagctctgagctcactgtgtgcactgagcgatgtcaccatttctacctgccacgcgtcggtgaaggttgggactcgactggtgtttgatcacgatgggaaaatcatccaggaaaccccctacccccaccccagagggaccacagtcagcgtgaagcagttattttctacgctacctgtgcgccataaggaatttcaaaggaatattaagaagacgtgcctgcttccccttcgccttctgccgtgattgtcagtttcctgaggcctccccagccatgcttcctgtacagcctgcagaacttgatgcagttgaatacaacaatggctgtaggtatgctgcagaaatatcattcaagtgaaacagaagggctttcctggccagacacagtggccactc

SEQ ID NO: 389429 - DNA, 785 bp, Homo sapiens
ttcgacgggtctggcggctgttccgtgagggttcaccctgcctgggacgtacagtccgcatcctgtgttctcagccacttgagatcatttatggttttgcaattcaacctgaaaaatgaaatcaaagcttttatcaaaacaaagcatgtttagtgctctctgtctcactgtcttttagatgccaaaccttagattttataatgactcctcaaccgtttagatcttggttatctcagagggatcatcagctttttaagaaagttttgagagaaaagcaagtgaagaaaagcatagtcaatgctcaacatcacgggtctctcactgaacacaccacgcctggtattctctcacagcgatgtcaccatttctacctgccacgcgtcggtgaaggttgggactcgactggtgtttgatcacgatgggaaaatcatccaggaaaccccctacccccaccccagagggaccacagtcagcgtgaagcagttattttctacgctacctgtgcgccataaggaatttcaaaggaatattaagaaggtacagtaaattaatcttggttttcaagagtattggttaatgcacatgagcaaaagatttactaaagatgtttattcttcagttgattctcttgccataatctattgagaaatgctttatttgcatttctcgttaaagacttaacattaaagacttaactttagggtgatttacttttttcttttcatcacatagtgtttattaggactgggcaacatagtgagactctgtttctatgaaaaattaaa

SEQ ID NO: 389430 - DNA, 313 bp, Homo sapiens
gggagccggggggcagaggctgcggagccccaggagggtaagtctgggattttcgggcccagagcgagaagggcctgggtgaagtcaccgtgtgttggggacctttgagtgtggggcagggggagggtcccgatcgcttgcaggagagacgtgtgtttgggttcgagggcagggtccggctgcacggaacaggcgctgcatgggaagatctgggaggacgaggcttacgggggcgtggagggtgtcaccaccctcagctgcggacgtcgtctccactccccgctaacccctaacagcccttcctcctcctctc

SEQ ID NO: 389431 - DNA, 290 bp, Homo sapiens
tactttggagattctgaagccaagcagcttgcccaagtccttcttcttttcccattaacagggtatgattatcaccaagccaaacatcatcatggagtggaggtgaaggaagtggagcagggagaggagccgtggataatggaaggtgaatttccatgtcaacatagtccaggtaagttagtagattatcacatgttaaaaaacactcatcccagacctttgggagtgactaaagagttgtttatatgtactcggtaccctcagtaacacctcccaacccccaaatatca

SEQ ID NO: 389432 - DNA, 1492 bp, Homo sapiens
ctcgcttcctgtgagtcttcaggtcgccgcttgctctcgttcctagggtttggcctgcagtggacgagcatcgcatagcctgcggggctggatgctgaccgcccgggccagcacctaggcggacgcggagctgtgcagaccagggttcgcgcgggccgggtggaggctcaagcggggaccccggagcgtgagccccggagtcggcggcgctggggccagaggggccgggagggagtcggctgaggtggcggcggaggcgaagtggcggcggaggcgaaggggcggcgggacccgggcctggcccgtatgtgtccttggcggcctagactaggccgtcgctgtatggtgagccccagggaggcggatctgggcccccagaaggacacccgcctggatttgccccgtaggcccggcccgggcccctcgggagcagaacagccttggtgaggtggacaggaggggacctcgcgagcagacgcgcgcgccagcgacagcagccccgccccggcctctcgggagccggggggcagaggctgcggagccccaggagggtctatcagccacagtctctgcatgtttccaagagcaacaggaaatgaacacattgcaggggccagtgtcattcaaagatgtggctgtggatttcacccaggaggagtggtggcaactggaccctgatgagaagatagcatacggggatgtgatgttggagaactacagccatctagtttctgtggggtatgattatcaccaagccaaacatcatcatggagtggaggtgaaggaagtggagcagggagaggagccgtggataatggaaggtgaatttccatgtcaacatagtccagtacagaacctgctaaggccatcaaacctattgatcggaagtcagtccatcagatttgctctgggccagtggtactgagtctaagcactgcagtgaaggagttagtagaaaacagtctggatgctggtgccactaatattgatctaaagcttaaggactatggagtggatctcattgaagtttcagacaatggatgtggggtagaagaagaaaactttgaaggcttaatctctttcagctctgaaacatcacacatgtaagattcaagagtttgccgacctaactgaagttgaaactttcggttttcagggggaagctctgagctcactgtgtgcactgagcgatgtcaccatttctacctgccacgcgtcggtgaaggttgggactcgactggtgtttgatcacgatgggaaaatcatccaggaaaccccctacccccaccccagagggaccacagtcagcgtgaagcagttattttctacgctacctgtgcgccataaggaatttcaaaggaatattaagaagacgtgcctgcttccccttcgccttctgccgtgattgtcagtttcctgaggcctccccagccatgcttcctgtacagcctgcagaactgtgagtcaattaaacctcttttcttcataaatt

SEQ ID NO: 389433 - DNA, 1719 bp, Homo sapiens
ctcgcttcctgtgagtcttcaggtcgccgcttgctctcgttcctagggtttggcctgcagtggacgagcatcgcatagcctgcggggctggatgctgaccgcccgggccagcacctaggcggacgcggagctgtgcagaccagggttcgcgcgggccgggtggaggctcaagcggggaccccggagcgtgagccccggagtcggcggcgctggggccagaggggccgggagggagtcggctgaggtggcggcggaggcgaagtggcggcggaggcgaaggggcggcgggacccgggcctggcccgtatgtgtccttggcggcctagactaggccgtcgctgtatggtgagccccagggaggcggatctgggcccccagaaggacacccgcctggatttgccccgtaggcccggcccgggcccctcgggagcagaacagccttggtgaggtggacaggaggggacctcgcgagcagacgcgcgcgccagcgacagcagccccgccccggcctctcgggagccggggggcagaggctgcggagccccaggagggtctatcagccacagtctctgcatgtttccaagagcaacaggaaatgaacacattgcaggggccagtgtcattcaaagatgtggctgtggatttcacccaggaggagtggtggcaactggaccctgatgagaagatagcatacggggatgtgatgttggagaactacagccatctagtttctgtggggtatgattatcaccaagccaaacatcatcatggagtggaggtgaaggaagtggagcagggagaggagccgtggataatggaaggtgaatttccatgtcaacatagtccagtacagaacctgctaaggccatcaaacctattgatcggaagtcagtccatcagatttgctctgggccagtggtactgagtctaagcactgcagtgaaggagttagtagaaaacagtctggatgctggtgccactaatattgatctaaagcttaaggactatggagtggatctcattgaagtttcagacaatggatgtggggtagaagaagaaaactttgaaggcttaatctctttcagctctgaaacatcacacatgtaagattcaagagtttgccgacctaactgaagttgaaactttcggttttcagggggaagctctgagctcactgtgtgcactgagcgatgtcaccatttctacctgccacgcgtcggtgaaggttgggactcgactggtgtttgatcacgatgggaaaatcatccaggaaaccccctacccccaccccagagggaccacagtcagcgtgaagcagttattttctacgctacctgtgcgccataaggaatttcaaaggaatattaagaagacgtgcctgcttccccttcgccttctgccgtgattgtcagtttcctgaggcctccccagccatgcttcctgtacagcctgcagaactgtgagtcaattaaacctcttttcttcataaattacccagtttctcatagttctttatagcagtgtgaaaacagactaatggcccttctggttgaaggaatgcagccattctgcttgtttgactatgtcctttctattcatctctatttcctgggaggtgtttatccaagtgcaataggaggtattggtgaccgcacagtcccctcagtgttctgctagtaaatagttgaaggttgatcattgatctcctgcgttttcagt

SEQ ID NO: 389434 - DNA, 558 bp, Homo sapiens
aaaaaaagaagtatgactaaatatatgttttcaacataaatatgaatggactaaactattataatttttaagggagggtttcagattgagtcaaaaaatgaaatccattgtctgctgtacaaaagatacatatcaaatagcagaaatgtaaatgataaaggagtgaatgtgcaaagaaacaattaagcaaatgtaacggaaggaagaacaggacagggtcaaaggtttaggggcctagtttacacaaaaagcccaatccacagtgaagacatcacagtagaaaacttttttttgtgttgagtaacatactgtacactgcaaatagcaacaccgtatttgaatgtatttaaatatctgaagcaaaaacagctgggggaatcttagtctgttttttctgctaaacagattacctgagactgggtcatttataatgaacacagatttatttctctcacatctggaagctgggaagtccaagatcaaggcaccagcatttggtgaagccttctttctgtgtcatcccatggcagaagacagaagggcaagagagggtgagag

SEQ ID NO: 389435 - DNA, 360 bp, Homo sapiens
gatgcagagaagggtacatttgttctgtggcattttcagttgtaaaatgagtaaatcataagtttcattataagcttggtcttgtgttcttccatttaaagtgtggtgaatcagatattgccattagtgaattaagaggagaatatttgaaggacaaattaatctcagttggagactattccttaaaatgttcattagtgtgctagaaagatttgggagaaggtataatcactacctcccgcttcccagcatacaattgaaattaaactcctgtggataagtcactcaaaacagctgggctctgcctaggagtatctcaaaagctgggccctagatccatgtaaaatacaaggtgtttaa

SEQ ID NO: 389436 - DNA, 548 bp, Homo sapiens
ggcctcattagaccacgggttgcagccggagcggctgggaggttcgcgcgtttctcagggttcggtcggaggcggggaggccggagctgcgggcgtagggacctggcggctcctgaagcgcacgcgggcgggcggcaggtgtgcgcggcatccctgtcacgtggccgaagagcctggggcgcgcggaccctggcagggggcggggcgcacgcaggccacacccacttcaggctcccacccggtcgctggagaggggccaaggcctctggaaggtccaacctggagggtggttcaaaggggtgttgggcaccctcaaattaggggaaaattggggagtacgctctccttccccagggtggaggttactacaatcataagcggggagccggtgcccctgaggaaggagaccctgagggagataagatggaggggctcgggattccggggagccccaagtcccagcttgaaacggtggagtccgggcaaatgagctctgaggacggcttctgggcctggccgtgacccagattgcagtgagagttcccgca

SEQ ID NO: 389437 - DNA, 390 bp, Homo sapiens
gtcactagccagaattgttatgtatgatagaattgcctgggacttcttcatgggccagacagattacaaggtagattctgtgtaattgccaatgcatcttcctatacctggattaatgctttagtttaagtggaaaggtcaacacagaaacatgaggaggaagccagttgaatttctaaggtagactttgatggtttatgggatttgtttagctgattttgtccaagaccctagaggacctagtggaagtcagtactgtagattgacctcaccttgctgctcagagttcctgtttgtagtagccttaattacataattcataaggcaaattaaatacatttggtcctccctttgttggtcagattaatcagcttggttgatagaatggca

SEQ ID NO: 389438 - DNA, 709 bp, Homo sapiens
tagattttcatgttgcttcacatttattaaccttcacccattaggctgttgttggggtcatttgtatgatcttcaaatattcaggccttctgtagaagccttctaactcgagcggaaatggatggctttctcctagagggaaattaaggggtccaaagatacttaacagtgcatacagtaaagagagaaaaaacaggaaaaagtcgaggattggaatctccagcttatagagctccattctgctccagaacaaactctgttttattcagttacttagttacacagcacatcagagagactaaactattgacccttgaggtacagaaaagaagtgagccaaagactttacgagattatttcctagcagaaaattaaaataaaatctcactgatttctccatctcttccatcataaggtgaacagtaagtaaaggaagtggagagtttaagggacagcgttaggaaaaacttctgagctcctacatgtgacctggataatcataactttaaccctcaactgcctttccaccacctatgatgttggggtttcagaaaaggtggaattggaggaggatggattttcttgtcaagatcttgggcaaatgatatgctgaaagaaccacagctggagtccaggggttacatagaagtcactggtattacaggatatttggaggtcaaaactttaaagtattatccataatacttga

SEQ ID NO: 389439 - DNA, 127 bp, Homo sapiens
ggaccgcggttactgaagtggggtggagaactgacttcagctgctctagttttccagtcttctcctcgatctcaccacctggttctttctccagttcagccaacaacagccttgtgatatccagcac

SEQ ID NO: 389440 - DNA, 446 bp, Homo sapiens
  misc_feature (94)..(94): n is a, c, g, or t
gttcacaatatctatggagtgagtaatttgttgagtgggcctgggctcagaaggtaggactacatgcagtatagtacagttgtgcagtgcaatncctgaacagtcatacatgataactctggcatagtaagaaagaatgtgggaaaagaaaatagtagctgggctataaagtgctttgcgagccaggttacttgttcttatggagggatgagggtagaagtaaaagagaaggtatcagaattgctgtcaaattttccacattatgtatgcttctgaccacgatggggatgctgatgtcctccccttacccctactactttcccaggatcttcgccacattgccaatttactgtaagtcatatttctcaggtgagctgtagctaaggaatgtctgaggaaacactaggacaatgggagagccctcacaggttttttaagaaggcggt

SEQ ID NO: 389441 - DNA, 449 bp, Homo sapiens
tgggggtgggaggtgggagaggagtgagggaagggaattcccaagtgttggtattgctcaagctccccaggtgattcaatgcgtttcctaactttgtgcatcaaaatcacttaggatatcttattaaaatgcggattttgatttaataagcctgaagtgggagctgagattctgcatttttaaaaagttcccaggtgatgcccatggtagtggtgggggccaggctctgagtagcgattcatggcatttacagtatttttactagagaacgaggagaattcaatggagtcaatgagttttcactacagacatttatcttcaagatccttaaagctgcacgttgtgttaaaagatgcccaagctctcaacgccacatgctaagtggccatcctgagaaataataacctagagcttgactttattttttatttttttgggacagagtctca

SEQ ID NO: 389442 - DNA, 226 bp, Homo sapiens
ttcatttggaaatttctctgcagtctctcaataatttacacatggagataattgaatatatgacatgttttgaagggtaacttctaattgagtagatacatatctccttttttgaaaccctttcttctctaagccatcacattttcctccagattttatctgattttcctctggcttcccttttcagacctttgcttgttctggaaagggaaaccagtgaggtagg

SEQ ID NO: 389443 - DNA, 783 bp, Homo sapiens
agggagaacttactgtggttgtgagctggacaccacagccctgaagcctgagcaggagcagtgaaaggagggggtttaccatatcatcgcaagctgagaggaaggctgttgggggatacatgcagctggaggaagaatgcttagggcatacgtgtagcttgtttgttctttacaaagcatttgggagatttgccctgagggaaaggtgaacatgggaaaccttacccccttactgaagaggaccatgatgactcagcttacagggaaaatggttttaatattttcgtcagcaacaatattgctctagagaggtctctgccagatattcgtcatgctaactgtaagcataagatgtatctggaaaggctgccaaacaccagcatcattatcccatttcataatgaaggttggacttcactcctgcggaccatacacagtataattaaccgaaccccagggagtctgatagcagaaatcattctagtagatgacttcagtgagagagattggtggaaatcaacaagctgaaaaaactaaagttcaacatatttaaacacttgggaagcaggacctgctcagatccagcatggtgccagcacgttgtaggcctttgctaaaagcatggtgaatggatgaatgaataaactccagatgatggggagtcacagtccacttgcactccaaagtttgagaaagcactagtctacgctgtatttgcaggtcttgtggactccagcaagaattgtgtcactattggcttctaatgaaaagcactggatgccg

SEQ ID NO: 389444 - DNA, 476 bp, Homo sapiens
tgtaattccagctacttgggaggctaaggcacaagaatcccttgaacccgggagtcagaggtttcagtgagccaagatcgtgccactgcactccagcctgggtgacagagtgagactctgactcaaaagaaaaaaaaaatgttttaaagctatgtcttaacagataaatataggaagaacacaatggggtttgtgatcttgaaaacttgaatggatccaagaaagtgtttaaattttaatttggctcagatatgtaggactgagaaccataaactctcccacctaaaagacaccccccacaccaccacccctgtccggtgtcaggacttagccatattatttggtacagtgggcctatagtagtctttgacacattgatcaatgtcacctctaagctttttgggggtggcttatacctctttgaggtatcaatcttagcagtgaaataaagagggtggcagtagtcattatagaag

SEQ ID NO: 389445 - DNA, 229 bp, Homo sapiens
agtgtgccatggtggcccattgtgtttcttgcctttctcctttcctagatcggtgaaccttccttccttcctgtctttacatgggcttttctttctgtctggagcaccatctcttttatgcatattctttacctgatgatattctcattttccaggtctggtgcagatgtcctttgtgaaaggtcctctgacccttccaggtagattttattttcttcttccctccctt

SEQ ID NO: 389446 - DNA, 785 bp, Homo sapiens
  misc_feature (1)..(1): n is a, c, g, or t
nctcaggcacacgttatagttgctgtaggttcagcagcgaagaagtacctgcactcatgaagcttagaatataaacttgtggattctcatgaagtcccttccccaccagagcggttaaagaattaccagccggcaagaatcagtgcataaagacagaatcccttatggtgaacatgtagaggagaataaagacggcacttggaaactcagtatgtgagaatctcagaacgtggctttattttggaagaaggttgttatagatgtagttagctaagatgagactatcgtggcaggacaaacatcacattgaacagagtcagagattaacataaacccagggatgctgaagaatgtcaccagcgaccagaagctcggagggaaggaaggagcagattctccccagtgcctgctacaggaaccagccctgccgacaccttgattttggattttcagcttccaaactaggactgagacagaacaaatttctgttgttttaagtggcctactttgtggtactttgttgcagctgccctagaaaacaaatacatgtgttgactgtagcttttactaagggaagatgacgtctttagggctctaaagatattcttcatcaagtttaggaaatatccctctattcctcttttacataaagtttatactatgtttgttaactagaatcacttctcagcaggtataattaatatgatcctactgttattttctcctttattaatattgtgacagattgcaagaacctcaataaaaacctctctttccttcctgta

SEQ ID NO: 389447 - DNA, 370 bp, Homo sapiens
agggaagattgaggtcaagagttagagaccagcctggccaacgtggtgaaaccctctctactaaaaatacaaaaattgatttggctgatctggctggctaaaccggtgtccccttactccctcaatgctccaagtgtgtccctcccgaccctcccgaagctgtgcagtgtgtcgaagaggacaaccatcaccaatagaggaccggtcttcctttaagggtatatgtgtagctgggtttccattaaaacctccaatctctcaaaaatgcaaattatcagtactcatcccaaacttaggaaattagaaaacctggcagggagccagcaatgctttaacctgtaggtaattttgatgtatgcaaacatttgaa

SEQ ID NO: 389448 - DNA, 3592 bp, Homo sapiens
tttggaaagttaacgccatgcgccaagatgaagctattactccaagcccctcttcatcagagggctcgagttggggttgagactggggctgaggctgtggtccgtccccctttccaggtccttgtcttcctcccgtcggcctgggggcgcccgctcacgcggcctctctattgcagagctcttctctatggttttccctcccggaccgtgaaggcgggagggcgtggccagcacgccttttccgctagtcgccccgctctatcccatagtctcgctgccctgagcctcccgtgccggccggccggccgggggaacaggcgggcgctcggggggcgctcggggggcggggggagttccggttccggttctttgtgcggctgcatcggcggctccgggaagatggcggcccgggcgggtttccagtctgtggctccaagcggcggcgccggagcctcaggaggggcgggcgcggctgctgccttgggcccgggcggaactccggggcctcctgtgcgaatgggcccggctccgggtcaagggctgtaccgctccccgatgcccggagcggcctatccgagaccaggtatgttgccaggcagccgaatgacacctcagggaccttccatgggaccccctggctatggggggaacccttcagtccgacctggcctggcccagtcagggatggatcagtcccgcaagagacctgcccctcagcagatccagcaggtccagcagcaggcggtccaaaatcgaaaccacaatgcaaagaaaaagaagatggctgacaaaattctacctcaaaggattcgtgaactggtaccagaatcccaggcctatatggatctcttggcttttgaaaggaaactggaccagactatcatgaggaaacggctagatatccaagaggccttgaaacgtcccatcaagcaaaaacggaagctgcgaattttcatttctaacactttcaatccggctaagtcagatgccgaggatggggaagggacggtggcttcctgggagcttcgggtagaaggacggctcctggaggattcagccttgtccaaatatgatgccactaaacaaaagaggaagttctcttccttttttaagtccttggtgattgaactggacaaagacctgtatgggccagacaaccatctggtagaatggcacaggaccgccactacccaggagaccgatggctttcaggtgaagcggccgggagacgtgaatgtacggtgtactgtcctactgatgctggattaccagcctccccagtttaaattagacccccgcctagctcgactcctgggcatccatacccagactcgtccagtgatcatccaagcactgtggcaatatattaagacacataagctccaggaccctcacgagcgggagtttgtcatctgtgacaagtacctgcagcagatctttgagtctcaacgtatgaagttttcagagatccctcagcggctccatgccttgcttatgccaccagaacctatcatcattaatcatgtcatcagtgttgacccgaatgatcagaaaaagacagcttgttatgacattgatgttgaagtggatgacaccttgaagacccagatgaattcttttctgctgtccactgccagccaacaggagattgctactctagacaacaagatccatgagacaatagaaaccatcaaccagctgaagactcagcgggagttcatgctgagctttgccagagaccctcagggtttcatcaatgactggcttcagtcccagtgcagggacctcaagacaatgactgatgtggtgggtaacccagaggaggagcgccgagctgagttctacttccagccctgggctcaggaggctgtgtgccgatacttctactccaaggtgcagcagagacgacaagaattagagcaagccctgggaatccggaatacatagggcctctcccacagccctgattcgactgcaccaattcttgatttgggccctgtgctgcctgcctcatagtatctgccttggtcttgcttggggcgttccaggggatgctgttggttcaaggacaacaccagaatgaagagggtctcacaagacacctgttatcctcttctttcaccctatctcttcccacccccagcttccctttgccccacaaagttcccatgtgcctgtaccctcccctggtctacataggacctctagatagtgttagagagagaacatgtagtggtaatgagtgcttggaatggattgggcctcaggccaggtggtcttcaaggggaccagctaactgatcctgcccttcagagacccaggagttgggagctttcgctccttctccaagactcaggcctgtgggcactctataagctagttgatcttggctctcctgataacagaatccaatttccttccttccctccacaggtttggaacaaactctcccttcacttgttgccctgtagcactacagaaaccctggttcttgggctccactgagccccaggtcagtccccagccctctgggttggcctgctgtcagtgcttctctcactccttagttggggtccacatcagtattggagttttgttctttattgctccctcccagacactccctgtggctgccctttgtgattccctcagatctgccctaatcccgggcatttgggtgggggaatcttgcctttccctttcagagccccagggatctcatctggggaactgtcattgccagcagaggctgttccttcctgctgtttggagatgtgactcattcattcactcactccaccctgcctctgcatcccttaatggagaaacgggcctaaaaccaaacgggtaaaaagccctgggccatccctgtcttcctgtcccttgtctgcccagttgacacctactggtgacttctagggcactgaggagtgaaagcgcctagggctggagaatagcgctgagttgggtttgtgactcttccctctccctgcctcacaggattgtgactccccagcccctgccctcaaagcttcagacccctcaggtagcagcaggaccttgtgatcttggccccttggatctgagatggtttttgcatctttccaggagagcctcacattcttcttccaggttgtatcacccccgagttagcatatcccaggctcgcagactcaacacagcaagggtgggagacagctgggcacaaagggggaattccgttcagcatgggctctaaacccacagaactgacaaagcccctgcttccccaccccctcctcaggctcctgcgagcacacccccacccccaaatccctccctgttctacactggggacagcagaattttctccccgtcttccccttcctgccattttccctcccttgaaaggttgacactggacaaccttggggcagctgagccctggccgcctcctggctggaaccatgagaaggaagctcagtacttcccacagtgtccctgttgataactgtttttattaactgaattgtttttttcatggaccaaacttttttttgtactgtccccttattgatgttacccagttttaataaaagaatcttctgaagga

SEQ ID NO: 389449 - DNA, 3665 bp, Homo sapiens
tttggaaagttaacgccatgcgccaagatgaagctattactccaagcccctcttcatcagagggctcgagttggggttgagactggggctgaggctgtggtccgtccccctttccaggtccttgtcttcctcccgtcggcctgggggcgcccgctcacgcggcctctctattgcagagctcttctctatggttttccctcccggaccgtgaaggcgggagggcgtggccagcacgccttttccgctagtcgccccgctctatcccatagtctcgctgccctgagcctcccgtgccggccggccggccgggggaacaggcgggcgctcggggggcgctcggggggcggggggagttccggttccggttctttgtgcggctgcatcggcggctccgggaagatggcggcccgggcgggtttccagtctgtggctccaagcggcggcgccggagcctcaggaggggcgggcgcggctgctgccttgggcccgggcggaactccggggcctcctgtgcgaatgggcccggctccgggtcaagggctgtaccgctccccgatgcccggagcggcctatccgagaccaggtatgttgccaggcagccgaatgacacctcagggaccttccatgggaccccctggctatggggggaacccttcagtccgacctggcctggcccagtcagggatggatcagtcccgcaagagacctgcccctcagcagatccagcaggtccagcagcaggcggtccaaaatcgaaaccacaatgcaaagaaaaagaagatggctgacaaaattctacctcaaaggattcgtgaactggtaccagaatcccaggcctatatggatctcttggcttttgaaaggaaactggaccagactatcatgaggaaacggctagatatccaagaggccttgaaacgtcccatcaagcaaaaacggaagctgcgaattttcatttctaacactttcaatccggctaagtcagatgccgaggatggggaagggacggtggcttcctgggagcttcgggtagaaggacggctcctggaggattcagccttgtccaaatatgatgccactaaacaaaagaggaagttctcttccttttttaagtccttggtgattgaactggacaaagacctgtatgggccagacaaccatctggtagaatggcacaggaccgccactacccaggagaccgatggctttcaggtgaagcggccgggagacgtgaatgtacggtgtactgtcctactgatgctggattaccagcctccccagtttaaattagacccccgcctagctcgactcctgggcatccatacccagactcgtccagtgatcatccaagcactgtggcaatatattaagacacataagctccaggaccctcacgagcgggagtttgtcatctgtgacaagtacctgcagcagatctttgagtctcaacgtatgaagttttcagagatccctcagcggctccatgccttgcttatgccaccagaacctatcatcattaatcatgtcatcagtgttgacccgaatgatcagaaaaagacagcttgttatgacattgatgttgaagtggatgacaccttgaagacccagatgaattcttttctgctgtccactgccagccaacaggagattgctactctagacaacaagatccatgagacaatagaaaccatcaaccagctgaagactcagcgggagttcatgctgagctttgccagagaccctcagggtttcatcaatgactggcttcagtcccagtgcagggacctcaagacaatgactgatgtggtgggtaacccagaggaggagcgccgagctgagttctacttccagccctgggctcaggaggctgtgtgccgatacttctactccaaggtgcagcagagacgacaagaattagagcaagccctgggaatccggaatacatagggcctctcccacagccctgattcgactgcaccaattcttgatttgggccctgtgctgcctgcctcatagtatctgccttggtcttgcttggggcgttccaggggatgctgttggttcaaggacaacaccagaatgaagagggtctcacaagacacctgttatcctcttctttcaccctatctcttcccacccccagcttccctttgccccacaaagttcccatgtgcctgtaccctcccctggtctacataggacctctagatagtgttagagagagaacatgtagtggtaatgagtgcttggaatggattgggcctcaggccaggtggtcttcaaggggaccagctaactgatcctgcccttcagagacccaggagttgggagctttcgctccttctccaagactcaggcctgtgggcactctataagctagttgatcttggctctcctgataacagaatccaatttccttccttccctccacaggtttggaacaaactctcccttcacttgttgccctgtagcactacagaaaccctggttcttgggctccactgagccccaggtcagtccccagccctctgggttggcctgctgtcagtgcttctctcactccttagttggggtccacatcagtattggagttttgttctttattgctccctcccagacactccctgtggctgccctttgtgattccctcagatctgccctaatcccgggcatttgggtgggggaatcttgcctttccctttcagagccccagggatctcatctggggaactgtcattgccagcagaggctgttccttcctgctgtttggagatgtgactcattcattcactcactccaccctgcctctgcatcccttaatggagaaacgggcctaaaaccaaacgggtaaaaagccctgggccatccctgtcttcctgtcccttgtctgcccagttgacacctactggtgacttctagggcactgaggagtgaaagcgcctagggctggagaatagcgctgagttgggtttgtgactcttccctctccctgcctcacaggattgtgactccccagcccctgccctcaaagcttcagacccctcaggtagcagcaggaccttgtgatcttggccccttggatctgagatggtttttgcatctttccaggagagcctcacattcttcttccaggttgtatcacccccgagttagcatatcccaggctcgcagactcaacacagcaagggtgggagacagctgggcacaaagggggaattccgttcagcatgggctctaaacccacagaactgacaaagcccctgcttccccaccccctcctcaggctcctgcgagcacacccccacccccaaatccctccctgttctacactggggacagcagaattttctccccgtcttccccttcctgccattttccctcccttgaaaggttgacactggacaaccttggggcagctgagccctggccgcctcctggctggaaccatgagaaggaagctcagtacttcccacagtgtccctgttgataactgtttttattaactgaattgtttttttcatggaccaaacttttttttgtactgtccccttattgatgttacccagttttaataaaagaatcttctgaaggatgggtcctcctacctactgtgagagagctcttccctgagctcttcttccttcaataccattaaaaaacttgta

SEQ ID NO: 389450 - DNA, 2699 bp, Homo sapiens
ggagtcaccttctcacactggctctctccacactggccaaaaacggaagctgcgaattttcatttctaacactttcaatccggctaagtcagatgccgaggatggggaagggacggtggcttcctgggagcttcgggtagaaggacggctcctggaggattcagccttgtccaaatatgatgccactaaacaaaagaggaagttctcttccttttttaagtccttggtgattgaactggacaaagacctgtatgggccagacaaccatctggtagaatggcacaggaccgccactacccaggagaccgatggctttcaggtgaagcggccgggagacgtgaatgtacggtgtactgtcctactgatgctggattaccagcctccccagtttaaattagacccccgcctagctcgactcctgggcatccatacccagactcgtccagtgatcatccaagcactgtggcaatatattaagacacataagctccaggaccctcacgagcgggagtttgtcatctgtgacaagtacctgcagcagatctttgagtctcaacgtatgaagttttcagagatccctcagcggctccatgccttgcttatgccaccagaacctatcatcattaatcatgtcatcagtgttgacccgaatgatcagaaaaagacagcttgttatgacattgatgttgaagtggatgacaccttgaagacccagatgaattcttttctgctgtccactgccagccaacaggagattgctactctagacaacaagatccatgagacaatagaaaccatcaaccagctgaagactcagcgggagttcatgctgagctttgccagagaccctcagggtttcatcaatgactggcttcagtcccagtgcagggacctcaagacaatgactgatgtggtgggtaacccagaggaggagcgccgagctgagttctacttccagccctgggctcaggaggctgtgtgccgatacttctactccaaggtgcagcagagacgacaagaattagagcaagccctgggaatccggaatacatagggcctctcccacagccctgattcgactgcaccaattcttgatttgggccctgtgctgcctgcctcatagtatctgccttggtcttgcttggggcgttccaggggatgctgttggttcaaggacaacaccagaatgaagagggtctcacaagacacctgttatcctcttctttcaccctatctcttcccacccccagcttccctttgccccacaaagttcccatgtgcctgtaccctcccctggtctacataggacctctagatagtgttagagagagaacatgtagtggtaatgagtgcttggaatggattgggcctcaggccaggtggtcttcaaggggaccagctaactgatcctgcccttcagagacccaggagttgggagctttcgctccttctccaagactcaggcctgtgggcactctataagctagttgatcttggctctcctgataacagaatccaatttccttccttccctccacaggtttggaacaaactctcccttcacttgttgccctgtagcactacagaaaccctggttcttgggctccactgagccccaggtcagtccccagccctctgggttggcctgctgtcagtgcttctctcactccttagttggggtccacatcagtattggagttttgttctttattgctccctcccagacactccctgtggctgccctttgtgattccctcagatctgccctaatcccgggcatttgggtgggggaatcttgcctttccctttcagagccccagggatctcatctggggaactgtcattgccagcagaggctgttccttcctgctgtttggagatgtgactcattcattcactcactccaccctgcctctgcatcccttaatggagaaacgggcctaaaaccaaacgggtaaaaagccctgggccatccctgtcttcctgtcccttgtctgcccagttgacacctactggtgacttctagggcactgaggagtgaaagcgcctagggctggagaatagcgctgagttgggtttgtgactcttccctctccctgcctcacaggattgtgactccccagcccctgccctcaaagcttcagacccctcaggtagcagcaggaccttgtgatcttggccccttggatctgagatggtttttgcatctttccaggagagcctcacattcttcttccaggttgtatcacccccgagttagcatatcccaggctcgcagactcaacacagcaagggtgggagacagctgggcacaaagggggaattccgttcagcatgggctctaaacccacagaactgacaaagcccctgcttccccaccccctcctcaggctcctgcgagcacacccccacccccaaatccctccctgttctacactggggacagcagaattttctccccgtcttccccttcctgccattttccctcccttgaaaggttgacactggacaaccttggggcagctgagccctggccgcctcctggctggaaccatgagaaggaagctcagtacttcccacagtgtccctgttgataactgtttttattaactgaattgtttttttcatggaccaaacttttttttgtactgtccccttattgatgttacccagttttaataaaagaatcttctgaagga

SEQ ID NO: 389451 - DNA, 3197 bp, Homo sapiens
tttggaaagttaacgccatgcgccaagatgaagctattactccaagcccctcttcatcagagggctcgagttggggttgagactggggctgaggctgtggtccgtccccctttccaggtccttgtcttcctcccgtcggcctgggggcgcccgctcacgcggcctctctattgcagagctcttctctatggttttccctcccggaccgtgaaggcgggagggcgtggccagcacgccttttccgctagtcgccccgctctatcccatagtctcgctgccctgagcctcccgtgccggccggccggccgggggaacaggcgggcgctcggggggcgctcggggggcggggggagttccggttccggttctttgtgcggctgcatcggcggctccgggaagatggcggcccgggcgggtttccagtctgtggctccaagcggcggcgccggagcctcaggaggggcgggcgcggctgctgccttgggcccgggcggaactccggggcctcctgtgcgaatgggcccggctccgggtcaagggctgtaccgctccccgatgcccggagcggcctatccgagaccaggtatgttgccaggcagccgaatgacacctcagggaccttccatgggaccccctggctatggggggaacccttcagtccgacctggcctggcccagtcagggatggatcagtcccgcaagagacctgcccctcagcagatccagcaggtccagcagcaggcggtccaaaatcgaaaccacaatgcaaagaaaaagaagatggctgacaaaattctacctcaaaggattcgtgaactggtaccagaatcccaggcctatatggatctcttggcttttgaaaggaaactggaccagactatcatgaggaaacggctagatatccaagaggccttgaaacgtcccatcaagcaaaaacggaagctgcgaattttcatttctaacactttcaatccggctaagtcagatgccgaggatggggaagggacggtggcttcctgggagcttcgggtagaaggacggctcctggaggattcagccttgtccaaatatgatgccactaaacaaaagaggaagttctcttccttttttaagtccttggtgattgaactggacaaagacctgtatgggccagacaaccatctggtagaatggcacaggaccgccactacccaggagaccgatggctttcaggtgaagcggccgggagacgtgaatgtacggtgtactgtcctactgatgctggattaccagcctccccagtttaaattagacccccgcctagctcgactcctgggcatccatacccagactcgtccagtgatcatccaagcactgtggcaatatattaagacacataagctccaggaccctcacgagcgggagtttgtcatctgtgacaagtacctgcagcagatctttgagtctcaacgtatgaagttttcagagatccctcagcggctccatgccttgcttatgccaccagaacctatcatcattaatcatgtcatcagtgttgacccgaatgatcagaaaaagacagcttgttatgacattgatgttgaagtggatgacaccttgaagacccagatgaattcttttctgctgtccactgccagccaacaggagattgctactctagacaacaagatccatgagacaatagaaaccatcaaccagctgaagactcagcgggagttcatgctgagctttgccagagaccctcagggtttcatcaatgactggcttcagtcccagtgcagggacctcaagacaatgactgatgtggtgggtaacccagaggaggagcgccgagctgagttctacttccagccctgggctcaggaggctgtgtgccgatacttctactccaaggtgcagcagagacgacaagaattagagcaagccctgggaatccggaatacatagggcctctcccacagccctgattcgactgcaccaattcttgatttgggccctgtgctgcctgcctcatagtatctgccttggtcttgcttggggcgttccaggggatgctgttggttcaaggacaacaccagaatgaagagggtctcacaagacacctgttatcctcttctttcaccctatctcttcccacccccagcttccctttgccccacaaagttcccatgtgcctgtaccctcccctggtctacataggacctctagatagtgttagagagagaacatgtagtggtaatgagtgcttggaatggattgggcctcaggccaggtggtcttcaaggggaccagctaactgatcctgcccttcagagacccaggagttgggagctttcgctccttctccaagactcaggcctgtgggcactctataagctagttgatcttggctctcctgataacagaatccaatttccttccttccctccacaggtttggaacaaactctcccttcacttgttgccctgtagcactacagaaaccctggttcttgggctccactgagccccaggtcagtccccagccctctgggttggcctgctgtcagtgcttctctcactccttagttggggtccacatcagtattggagttttgttctttattgctccctcccagacactccctgtggctgccctttgtgattccctcagatctgccctaatcccgggcatttgggtgggggaatcttgcctttccctttcagagccccagggatctcatctggggaactgtcattgccagcagaggctgttccttcctgctgtttggagatgtgactcattcattcactcactccaccctgcctctgcatcccttaatggagaaacgggcctaaaaccaaacgggtaaaaagccctgggccatccctgtcttcctgtcccttgtctgcccagttgacacctactggtgacttctagggcactgaggagtgaaagcgcctagggctggagaatagcgctgagttgggtttgtgactcttccctctccctgcctcacaggattgtgactccccagcccctgccctcaaagcttcagacccctcaggtagcagcaggaccttgtgatcttggccccttggatctgagatggtttttgcatctttccaggagagcctcacattcttcttccaggttgtatcacccccaggcgtgttaggacgttacggagggtgttacggagggtcgttacggaggcg

SEQ ID NO: 389452 - DNA, 3104 bp, Homo sapiens
tttggaaagttaacgccatgcgccaagatgaagctattactccaagcccctcttcatcagagggctcgagttggggttgagactggggctgaggctgtggtccgtccccctttccaggtccttgtcttcctcccgtcggcctgggggcgcccgctcacgcggcctctctattgcagagctcttctctatggttttccctcccggaccgtgaaggcgggagggcgtggccagcacgccttttccgctagtcgccccgctctatcccatagtctcgctgccctgagcctcccgtgccggccggccggccgggggaacaggcgggcgctcggggggcgctcggggggcggggggagttccggttccggttctttgtgcggctgcatcggcggctccgggaagatggcggcccgggcgggtttccagtctgtggctccaagcggcggcgccggagcctcaggaggggcgggcgcggctgctgccttgggcccgggcggaactccggggcctcctgtgcgaatgggcccggctccgggtcaagggctgtaccgctccccgatgcccggagcggcctatccgagaccaggtatgttgccaggcagccgaatgacacctcagggaccttccatgggaccccctggctatggggggaacccttcagtccgacctggcctggcccagtcagggatggatcagtcccgcaagagacctgcccctcagcagatccagcaggtccagcagcaggcggtccaaaatcgaaaccacaatgcaaagaaaaagaagatggctgacaaaattctacctcaaaggattcgtgaactggtaccagaatcccaggcctatatggatctcttggcttttgaaaggaaactggaccagactatcatgaggaaacggctagatatccaagaggccttgaaacgtcccatcaagcaaaaacggaagctgcgaattttcatttctaacactttcaatccggctaagtcagatgccgaggatggggaagggacggtggcttcctgggagcttcgggtagaaggacggctcctggaggattcagccttgtccaaatatgatgccactaaacaaaagaggaagttctcttccttttttaagtccttggtgattgaactggacaaagacctgtatgggccagacaaccatctggtagaatggcacaggaccgccactacccaggagaccgatggctttcaggtgaagcggccgggagacgtgaatgtacggtgtactgtcctactgatgctggattaccagcctccccagtttaaattagacccccgcctagctcgactcctgggcatccatacccagactcgtccagtgatcatccaagcactgtggcaatatattaagacacataagctccaggaccctcacgagcgggagtttgtcatctgtgacaagtacctgcagcagatctttgagtctcaacgtatgaagttttcagagatccctcagcggctccatgccttgcttatgccaccagaacctatcatcattaatcatgtcatcagtgttgacccgaatgatcagaaaaagacagcttgttatgacattgatgttgaagtggatgacaccttgaagacccagatgaattcttttctgctgtccactgccagccaacaggagattgctactctagacaacaagatccatgagacaatagaaaccatcaaccagctgaagactcagcgggagttcatgctgagctttgccagagaccctcagggtttcatcaatgactggcttcagtcccagtgcagggacctcaagacaatgactgatgtggtgggtaacccagaggaggagcgccgagctgagttctacttccagccctgggctcaggaggctgtgtgccgatacttctactccaaggtgcagcagagacgacaagaattagagcaagccctgggaatccggaatacatagggcctctcccacagccctgattcgactgcaccaattcttgatttgggccctgtgctgcctgcctcatagtatctgccttggtcttgcttggggcgttccaggggatgctgttggttcaaggacaacaccagaatgaagagggtctcacaagacacctgttatcctcttctttcaccctatctcttcccacccccagcttccctttgccccacaaagttcccatgtgcctgtaccctcccctggtctacataggacctctagatagtgttagagagagaacatgtagtggtaatgagtgcttggaatggattgggcctcaggccaggtggtcttcaaggggaccagctaactgatcctgcccttcagagacccaggagttgggagctttcgctccttctccaagactcaggcctgtgggcactctataagctagttgatcttggctctcctgataacagaatccaatttccttccttccctccacaggtttggaacaaactctcccttcacttgttgccctgtagcactacagaaaccctggttcttgggctccactgagccccaggattgtgactccccagcccctgccctcaaagcttcagacccctcaggtagcagcaggaccttgtgatcttggccccttggatctgagatggtttttgcatctttccaggagagcctcacattcttcttccaggttgtatcacccccgagttagcatatcccaggctcgcagactcaacacagcaagggtgggagacagctgggcacaaagggggaattccgttcagcatgggctctaaacccacagaactgacaaagcccctgcttccccaccccctcctcaggctcctgcgagcacacccccacccccaaatccctccctgttctacactggggacagcagaattttctccccgtcttccccttcctgccattttccctcccttgaaaggttgacactggacaaccttggggcagctgagccctggccgcctcctggctggaaccatgagaaggaagctcagtacttcccacagtgtccctgttgataactgtttttattaactgaattgtttttttcatggaccaaacttttttttgtactgtccccttattgatgttacccagttttaataaaagaatcttctgaagga

SEQ ID NO: 389453 - DNA, 2777 bp, Homo sapiens
tttggaaagttaacgccatgcgccaagatgaagctattactccaagcccctcttcatcagagggctcgagttggggttgagactggggctgaggctgtggtccgtccccctttccaggtccttgtcttcctcccgtcggcctgggggcgcccgctcacgcggcctctctattgcagagctcttctctatggttttccctcccggaccgtgaaggcgggagggcgtggccagcacgccttttccgctagtcgccccgctctatcccatagtctcgctgccctgagcctcccgtgccggccggccggccgggggaacaggcgggcgctcggggggcgctcggggggcggggggagttccggttccggttctttgtgcggctgcatcggcggctccgggaagatggcggcccgggcgggtttccagtctgtggctccaagcggcggcgccggagcctcaggaggggcgggcgcggctgctgccttgggcccgggcggaactccggggcctcctgtgcgaatgggcccggctccgggtcaagggctgtaccgctccccgatgcccggagcggcctatccgagaccaggtatgttgccaggcagccgaatgacacctcagggaccttccatgggaccccctggctatggggggaacccttcagtccgacctggcctggcccagtcagggatggatcagtcccgcaagagacctgcccctcagcagatccagcaggtccagcagcaggcggtccaaaatcgaaaccacaatgcaaagaaaaagaagatggctgacaaaattctacctcaaaggattcgtgaactggtaccagaatcccaggcctatatggatctcttggcttttgaaaggaaactggaccagactatcatgaggaaacggctagatatccaagaggccttgaaacgtcccatcaagcaaaaacggaagctgcgaattttcatttctaacactttcaatccggctaagtcagatgccgaggatggggaagggacggtggcttcctgggagcttcgggtagaaggacggctcctggaggattcagccttgtccaaatatgatgccactaaacaaaagaggaagttctcttccttttttaagtccttggtgattgaactggacaaagacctgtatgggccagacaaccatctggtagaatggcacaggaccgccactacccaggagaccgatggctttcaggtgaagcggccgggagacgtgaatgtacggtgtactgtcctactgatgctggattaccagcctccccagtttaaattagacccccgcctagctcgactcctgggcatccatacccagactcgtccagtgatcatccaagcactgtggcaatatattaagacacataagctccaggaccctcacgagcgggagtttgtcatctgtgacaagtacctgcagcagatctttgagtctcaacgtatgaagttttcagagatccctcagcggctccatgccttgcttatgccaccagaacctatcatcattaatcatgtcatcagtgttgacccgaatgatcagaaaaagacagcttgttatgacattgatgttgaagtggatgacaccttgaagacccagatgaattcttttctgctgtccactgccagccaacaggagattgctactctagacaacaagatccatgagacaatagaaaccatcaaccagctgaagactcagcgggagttcatgctgagctttgccagagaccctcagggtttcatcaatgactggcttcagtcccagtgcagggacctcaagacaatgactgatgtggtgggtaacccagaggaggagcgccgagctgagttctacttccagccctgggctcaggaggctgtgtgccgatacttctactccaaggtgcagcagagacgacaagaattagagcaagccctgggaatccggaatacatagggcctctcccacagccctgattcgactgcaccaattcttgatttgggccctgtgctgcctgcctcatagtatctgccttggtcttgcttggggcgttccaggggatgctgttggttcaaggacaacaccagaatgaagagggtctcacaagacacctgttatcctcttctttcaccctatctcttcccacccccagcttccctttgccccacaaagttcccatgtgcctgtaccctcccctggtctacataggacctctagatagtgttagagagagaacatgtagtggtaatgagtgcttggaatggattgggcctcaggccaggtggtcttcaaggggaccagctaactgatcctgcccttcagagacccaggagttgggagctttcgctccttctccaagactcaggcctgtgggcactctataagctagttgatcttggctctcctgataacagaatccaatttccttccttccctccacaggtttggaacaaactctcccttcacttgttgccctgtagcactacagaaaccctggttcttgggctccactgagccccaggtcagtccccagccctctgggttggcctgctgtcagtgcttctctcactccttagttggggtccacatcagtattggagttttgttctttattgctccctcccagacactccctgtggctgccctttgtgattccctcagatctgccctaatcccgagtcattagtgtttggtggtgatcatatgcattattccgctcacgagccattataaaacagataacagctatgatacatgattactatcagctcgctataccggatacc

SEQ ID NO: 389454 - DNA, 2759 bp, Homo sapiens
tttggaaagttaacgccatgcgccaagatgaagctattactccaagcccctcttcatcagagggctcgagttggggttgagactggggctgaggctgtggtccgtccccctttccaggtccttgtcttcctcccgtcggcctgggggcgcccgctcacgcggcctctctattgcagagctcttctctatggttttccctcccggaccgtgaaggcgggagggcgtggccagcacgccttttccgctagtcgccccgctctatcccatagtctcgctgccctgagcctcccgtgccggccggccggccgggggaacaggcgggcgctcggggggcgctcggggggcggggggagttccggttccggttctttgtgcggctgcatcggcggctccgggaagatggcggcccgggcgggtttccagtctgtggctccaagcggcggcgccggagcctcaggaggggcgggcgcggctgctgccttgggcccgggcggaactccggggcctcctgtgcgaatgggcccggctccgggtcaagggctgtaccgctccccgatgcccggagcggcctatccgagaccaggtatgttgccaggcagccgaatgacacctcagggaccttccatgggaccccctggctatggggggaacccttcagtccgacctggcctggcccagtcagggatggatcagtcccgcaagagacctgcccctcagcagatccagcaggtccagcagcaggcggtccaaaatcgaaaccacaatgcaaagaaaaagaagatggctgacaaaattctacctcaaaggattcgtgaactggtaccagaatcccaggcctatatggatctcttggcttttgaaaggaaactggaccagactatcatgaggaaacggctagatatccaagaggccttgaaacgtcccatcaagcaaaaacggaagctgcgaattttcatttctaacactttcaatccggctaagtcagatgccgaggatggggaagggacggtggcttcctgggagcttcgggtagaaggacggctcctggaggattcagccttgtccaaatatgatgccactaaacaaaagaggaagttctcttccttttttaagtccttggtgattgaactggacaaagacctgtatgggccagacaaccatctggtagaatggcacaggaccgccactacccaggagaccgatggctttcaggtgaagcggccgggagacgtgaatgtacggtgtactgtcctactgatgctggattaccagcctccccagtttaaattagacccccgcctagctcgactcctgggcatccatacccagactcgtccagtgatcatccaagcactgtggcaatatattaagacacataagctccaggaccctcacgagcgggagtttgtcatctgtgacaagtacctgcagcagatctttgagtctcaacgtatgaagttttcagagatccctcagcggctccatgccttgcttatgccaccagaacctatcatcattaatcatgtcatcagtgttgacccgaatgatcagaaaaagacagcttgttatgacattgatgttgaagtggatgacaccttgaagacccagatgaattcttttctgctgtccactgccagccaacaggagattgctactctagacaacaagatccatgagacaatagaaaccatcaaccagctgaagactcagcgggagttcatgctgagctttgccagagaccctcagggtttcatcaatgactggcttcagtcccagtgcagggacctcaagacaatgactgatgtggtgggtaacccagaggaggagcgccgagctgagttctacttccagccctgggctcaggaggctgtgtgccgatacttctactccaaggtgcagcagagacgacaagaattagagcaagccctgggaatccggaatacatagggcctctcccacagccctgattcgactgcaccaattcttgatttgggccctgtgctgcctgcctcatagtatctgccttggtcttgcttggggcgttccaggggatgctgttggttcaaggacaacaccagaatgaagagggtttggaacaaactctcccttcacttgttgccctgtagcactacagaaaccctggttcttgggctccactgagccccaggattgtgactccccagcccctgccctcaaagcttcagacccctcaggtagcagcaggaccttgtgatcttggccccttggatctgagatggtttttgcatctttccaggagagcctcacattcttcttccaggttgtatcacccccgagttagcatatcccaggctcgcagactcaacacagcaagggtgggagacagctgggcacaaagggggaattccgttcagcatgggctctaaacccacagaactgacaaagcccctgcttccccaccccctcctcaggctcctgcgagcacacccccacccccaaatccctccctgttctacactggggacagcagaattttctccccgtcttccccttcctgccattttccctcccttgaaaggttgacactggacaaccttggggcagctgagccctggccgcctcctggctggaaccatgagaaggaagctcagtacttcccacagtgtccctgttgataactgtttttattaactgaattgtttttttcatggaccaaacttttttttgtactgtccccttattgatgttacccagttttaataaaagaatcttctgaagga

SEQ ID NO: 389455 - DNA, 1914 bp, Homo sapiens
tttggaaagttaacgccatgcgccaagatgaagctattactccaagcccctcttcatcagagggctcgagttggggttgagactggggctgaggctgtggtccgtccccctttccaggtccttgtcttcctcccgtcggcctgggggcgcccgctcacgcggcctctctattgcagagctcttctctatggttttccctcccggaccgtgaaggcgggagggcgtggccagcacgccttttccgctagtcgccccgctctatcccatagtctcgctgccctgagcctcccgtgccggccggccggccgggggaacaggcgggcgctcggggggcgctcggggggcggggggagttccggttccggttctttgtgcggctgcatcggcggctccgggaagatggcggcccgggcgggtttccagtctgtggctccaagcggcggcgccggagcctcaggaggggcgggcgcggctgctgccttgggcccgggcggaactccggggcctcctgtgcgaatgggcccggctccgggtcaagggctgtaccgctccccgatgcccggagcggcctatccgagaccaggtatgttgccaggcagccgaatgacacctcagggaccttccatgggaccccctggctatggggggaacccttcagtccgacctggcctggcccagtcagggatggatcagtcccgcaagagacctgcccctcagcagatccagcaggtccagcagcaggcggtccaaaatcgaaaccacaatgcaaagaaaaagaagatggctgacaaaattctacctcaaaggattcgtgaactggtaccagaatcccaggcctatatggatctcttggcttttgaaaggaaactggaccagactatcatgaggaaacggctagatatccaagaggccttgaaacgtcccatcaagcaaaaacggaagctgcgaattttcatttctaacactttcaatccggctaagtcagatgccgaggatggggaagggacggtggcttcctgggagcttcgggtagaaggacggctcctggaggattcagccttgtccaaatatgatgccactaaacaaaagaggaagttctcttccttttttaagtccttggtgattgaactggacaaagacctgtatgggccagacaaccatctggtagaatggcacaggaccgccactacccaggagaccgatggctttcaggtgaagcggccgggagacgtgaatgtacggtgtactgtcctactgatgctggattaccagcctccccagtttaaattagacccccgcctagctcgactcctgggcatccatacccagactcgtccagtgatcatccaagcactgtggcaatatattaagacacataagctccaggaccctcacgagcgggagtttgtcatctgtgacaagtacctgcagcagatctttgagtctcaacgtatgaagttttcagagatccctcagcggctccatgccttgcttatgccaccagaacctatcatcattaatcatgtcatcagtgttgacccgaatgatcagaaaaagacagcttgttatgacattgatgttgaagtggatgacaccttgaagacccagatgaattcttttctgctgtccactgccagccaacaggagattgctactctagacaacaagatccatgagacaatagaaaccatcaaccagctgaagactcagcgggagttcatgctgagctttgccagagaccctcagggtttcatcaatgactggcttcagtcccagtgcagggacctcaagacaatgactgatgtggtgggtaacccagaggaggagcgccgagctgagttctacttccagccctgggctcaggaggctgtgtgccgatacttctactccaagctcaacaacacaacaaaacaa

SEQ ID NO: 389456 - DNA, 1858 bp, Homo sapiens
tttggaaagttaacgccatgcgccaagatgaagctattactccaagcccctcttcatcagagggctcgagttggggttgagactggggctgaggctgtggtccgtccccctttccaggtccttgtcttcctcccgtcggcctgggggcgcccgctcacgcggcctctctattgcagagctcttctctatggttttccctcccggaccgtgaaggcgggagggcgtggccagcacgccttttccgctagtcgccccgctctatcccatagtctcgctgccctgagcctcccgtgccggccggccggccgggggaacaggcgggcgctcggggggcgctcggggggcggggggagttccggttccggttctttgtgcggctgcatcggcggctccgggaagatggcggcccgggcgggtttccagtctgtggctccaagcggcggcgccggagcctcaggaggggcgggcgcggctgctgccttgggcccgggcggaactccggggcctcctgtgcgaatgggcccggctccgggtcaagggctgtaccgctccccgatgcccggagcggcctatccgagaccaggtatgttgccaggcagccgaatgacacctcagggaccttccatgggaccccctggctatggggggaacccttcagtccgacctggcctggcccagtcagggatggatcagtcccgcaagagacctgcccctcagcagatccagcaggtccagcagcaggcggtccaaaatcgaaaccacaatgcaaagaaaaagaagatggctgacaaaattctacctcaaaggattcgtgaactggtaccagaatcccaggcctatatggatctcttggcttttgaaaggaaactggaccagactatcatgaggaaacggctagatatccaagaggccttgaaacgtcccatcaagcaaaaacggaagctgcgaattttcatttctaacactttcaatccggctaagtcagatgccgaggatggggaagggacggtggcttcctgggagcttcgggtagaaggacggctcctggaggattcagccttgtccaaatatgatgccactaaacaaaagaggaagttctcttccttttttaagtccttggtgattgaactggacaaagacctgtatgggccagacaaccatctggtagaatggcacaggaccgccactacccaggagaccgatggctttcaggtgaagcggccgggagacgtgaatgtacggtgtactgtcctactgatgctggattaccagcctccccagtttaaattagacccccgcctagctcgactcctgggcatccatacccagactcgtccagtgatcatccaagcactgtggcaatatattaagacacataagctccaggaccctcacgagcgggagtttgtcatctgtgacaagtacctgcagcagatctttgagtctcaacgtatgaagttttcagagatccctcagcggctccatgccttgcttatgccaccagaacctatcatcattaatcatgtcatcagtgttgacccgaatgatcagaaaaagacagcttgttatgacattgatgttgaagtggatgacaccttgaagacccagaattttctccccgtcttccccttcctgccattttccctcccttgaaaggttgacactggacaaccttggggcagctgagccctggccgcctcctggctggaaccatgagaaggaagctcagtacttcccacagtgtccctgttgataactgtttttattaactgaattgtttttttcatggaccaaacttttttttgtactgtccccttattgatgttacccagttttaataaaagaatcttctgaagga

SEQ ID NO: 389457 - DNA, 3469 bp, Homo sapiens
tttggaaagttaacgccatgcgccaagatgaagctattactccaagcccctcttcatcagagggctcgagttggggttgagactggggctgaggctgtggtccgtccccctttccaggtccttgtcttcctcccgtcggcctgggggcgcccgctcacgcggcctctctattgcagagctcttctctatggttttccctcccggaccgtgaaggcgggagggcgtggccagcacgccttttccgctagtcgccccgctctatcccatagtctcgctgccctgagcctcccgtgccggccggccggccgggggaacaggcgggcgctcggggggcgctcggggggcggggggagttccggttccggttctttgtgcggctgcatcggcggctccgggaagatggcggcccgggcgggtttccagtctgtggctccaagcggcggcgccggagcctcaggaggggcgggcgcggctgctgccttgggcccgggcggaactccggggcctcctgtgcgaatgggcccggctccgggtcaagggctgtaccgctccccgatgcccggagcggcctatccgagaccaggtatgttgccaggcagccgaatgacacctcagggaccttccatgggaccccctggctatggggggaacccttcagtccgacctggcctggcccagtcagggatggatcagtcccgcaagagacctgcccctcagcagatccagcaggtccagcagcaggcggtccaaaatcgaaaccacaatgcaaagaaaaagaagatggctgacaaaattctacctcaaaggattcgtgaactggtaccagaatcccaggcctatatggatctcttggcttttgaaaggaaactggaccagactatcatgaggaaacggctagatatccaagaggccttgaaacgtcccatcaagcaaaaacggaagctgcgaattttcatttctaacactttcaatccggctaagtcagatgccgaggatggggaagggacggtggcttcctgggagcttcgggtagaaggacggctcctggaggattcagccttgtccaaatatgatgccactaaacaaaagaggaagttctcttccttttttaagtccttggtgattgaactggacaaagacctgtatgggccagacaaccatctggtagaatggcacaggaccgccactacccaggagaccgatggctttcaggtgaagcggccgggagacgtgaatgtacggtgtactgtcctactgatgctggattaccagcctccccagtttaaattagacccccgcctagctcgactcctgggcatccatacccagactcgtccagtgatcatccaagcactgtggcaatatattaagacacataagctccaggaccctcacgagcgggagtttgtcatctgtgacaagtacctgcagcagatctttgagtctcaacgtatgaagttttcagagatccctcagcggctccatgccttgcttatgccaccagaacctatcatcattaatcatgtcatcagtgttgacccgaatgatcagaaaaagacagcttgttatgacattgatgttgaagtggatgacaccttgaagacccagatgaattcttttctgctgtccactgccagccaacaggagattgctactctagacaacaagacaatgactgatgtggtgggtaacccagaggaggagcgccgagctgagttctacttccagccctgggctcaggaggctgtgtgccgatacttctactccaaggtgcagcagagacgacaagaattagagcaagccctgggaatccggaatacatagggcctctcccacagccctgattcgactgcaccaattcttgatttgggccctgtgctgcctgcctcatagtatctgccttggtcttgcttggggcgttccaggggatgctgttggttcaaggacaacaccagaatgaagagggtctcacaagacacctgttatcctcttctttcaccctatctcttcccacccccagcttccctttgccccacaaagttcccatgtgcctgtaccctcccctggtctacataggacctctagatagtgttagagagagaacatgtagtggtaatgagtgcttggaatggattgggcctcaggccaggtggtcttcaaggggaccagctaactgatcctgcccttcagagacccaggagttgggagctttcgctccttctccaagactcaggcctgtgggcactctataagctagttgatcttggctctcctgataacagaatccaatttccttccttccctccacaggtttggaacaaactctcccttcacttgttgccctgtagcactacagaaaccctggttcttgggctccactgagccccaggtcagtccccagccctctgggttggcctgctgtcagtgcttctctcactccttagttggggtccacatcagtattggagttttgttctttattgctccctcccagacactccctgtggctgccctttgtgattccctcagatctgccctaatcccgggcatttgggtgggggaatcttgcctttccctttcagagccccagggatctcatctggggaactgtcattgccagcagaggctgttccttcctgctgtttggagatgtgactcattcattcactcactccaccctgcctctgcatcccttaatggagaaacgggcctaaaaccaaacgggtaaaaagccctgggccatccctgtcttcctgtcccttgtctgcccagttgacacctactggtgacttctagggcactgaggagtgaaagcgcctagggctggagaatagcgctgagttgggtttgtgactcttccctctccctgcctcacaggattgtgactccccagcccctgccctcaaagcttcagacccctcaggtagcagcaggaccttgtgatcttggccccttggatctgagatggtttttgcatctttccaggagagcctcacattcttcttccaggttgtatcacccccgagttagcatatcccaggctcgcagactcaacacagcaagggtgggagacagctgggcacaaagggggaattccgttcagcatgggctctaaacccacagaactgacaaagcccctgcttccccaccccctcctcaggctcctgcgagcacacccccacccccaaatccctccctgttctacactggggacagcagaattttctccccgtcttccccttcctgccattttccctcccttgaaaggttgacactggacaaccttggggcagctgagccctggccgcctcctggctggaaccatgagaaggaagctcagtacttcccacagtgtccctgttgataactgtttttattaactgaattgtttttttcatggaccaaacttttttttgtactgtccccttattgatgttacccagttttaataaaagaatcttctgaagga

SEQ ID NO: 389458 - DNA, 3469 bp, Homo sapiens
tttggaaagttaacgccatgcgccaagatgaagctattactccaagcccctcttcatcagagggctcgagttggggttgagactggggctgaggctgtggtccgtccccctttccaggtccttgtcttcctcccgtcggcctgggggcgcccgctcacgcggcctctctattgcagagctcttctctatggttttccctcccggaccgtgaaggcgggagggcgtggccagcacgccttttccgctagtcgccccgctctatcccatagtctcgctgccctgagcctcccgtgccggccggccggccgggggaacaggcgggcgctcggggggcgctcggggggcggggggagttccggttccggttctttgtgcggctgcatcggcggctccgggaagatggcggcccgggcgggtttccagtctgtggctccaagcggcggcgccggagcctcaggaggggcgggcgcggctgctgccttgggcccgggcggaactccggggcctcctgtgcgaatgggcccggctccgggtcaagggctgtaccgctccccgatgcccggagcggcctatccgagaccaggtatgttgccaggcagccgaatgacacctcagggaccttccatgggaccccctggctatggggggaacccttcagtccgacctggcctggcccagtcagggatggatcagtcccgcaagagacctgcccctcagcagatccagcaggtccagcagcaggcggtccaaaatcgaaaccacaatgcaaagaaaaagaagatggctgacaaaattctacctcaaaggattcgtgaactggtaccagaatcccaggcctatatggatctcttggcttttgaaaggaaactggaccagactatcatgaggaaacggctagatatccaagaggccttgaaacgtcccatcaagtcagccttgtccaaatatgatgccactaaacaaaagaggaagttctcttccttttttaagtccttggtgattgaactggacaaagacctgtatgggccagacaaccatctggtagaatggcacaggaccgccactacccaggagaccgatggctttcaggtgaagcggccgggagacgtgaatgtacggtgtactgtcctactgatgctggattaccagcctccccagtttaaattagacccccgcctagctcgactcctgggcatccatacccagactcgtccagtgatcatccaagcactgtggcaatatattaagacacataagctccaggaccctcacgagcgggagtttgtcatctgtgacaagtacctgcagcagatctttgagtctcaacgtatgaagttttcagagatccctcagcggctccatgccttgcttatgccaccagaacctatcatcattaatcatgtcatcagtgttgacccgaatgatcagaaaaagacagcttgttatgacattgatgttgaagtggatgacaccttgaagacccagatgaattcttttctgctgtccactgccagccaacaggagattgctactctagacaacaagatccatgagacaatagaaaccatcaaccagctgaagactcagcgggagttcatgctgagctttgccagagaccctcagggtttcatcaatgactggcttcagtcccagtgcagggacctcaagacaatgactgatgtggtgggtaacccagaggaggagcgccgagctgagttctacttccagccctgggctcaggaggctgtgtgccgatacttctactccaaggtgcagcagagacgacaagaattagagcaagccctgggaatccggaatacatagggcctctcccacagccctgattcgactgcaccaattcttgatttgggccctgtgctgcctgcctcatagtatctgccttggtcttgcttggggcgttccaggggatgctgttggttcaaggacaacaccagaatgaagagggtctcacaagacacctgttatcctcttctttcaccctatctcttcccacccccagcttccctttgccccacaaagttcccatgtgcctgtaccctcccctggtctacataggacctctagatagtgttagagagagaacatgtagtggtaatgagtgcttggaatggattgggcctcaggccaggtggtcttcaaggggaccagctaactgatcctgcccttcagagacccaggagttgggagctttcgctccttctccaagactcaggcctgtgggcactctataagctagttgatcttggctctcctgataacagaatccaatttccttccttccctccacaggtttggaacaaactctcccttcacttgttgccctgtagcactacagaaaccctggttcttgggctccactgagccccaggtcagtccccagccctctgggttggcctgctgtcagtgcttctctcactccttagttggggtccacatcagtattggagttttgttctttattgctccctcccagacactccctgtggctgccctttgtgattccctcagatctgccctaatcccgggcatttgggtgggggaatcttgcctttccctttcagagccccagggatctcatctggggaactgtcattgccagcagaggctgttccttcctgctgtttggagatgtgactcattcattcactcactccaccctgcctctgcatcccttaatggagaaacgggcctaaaaccaaacgggtaaaaagccctgggccatccctgtcttcctgtcccttgtctgcccagttgacacctactggtgacttctagggcactgaggagtgaaagcgcctagggctggagaatagcgctgagttgggtttgtgactcttccctctccctgcctcacaggattgtgactccccagcccctgccctcaaagcttcagacccctcaggtagcagcaggaccttgtgatcttggccccttggatctgagatggtttttgcatctttccaggagagcctcacattcttcttccaggttgtatcacccccgagttagcatatcccaggctcgcagactcaacacagcaagggtgggagacagctgggcacaaagggggaattccgttcagcatgggctctaaacccacagaactgacaaagcccctgcttccccaccccctcctcaggctcctgcgagcacacccccacccccaaatccctccctgttctacactggggacagcagaattttctccccgtcttccccttcctgccattttccctcccttgaaaggttgacactggacaaccttggggcagctgagccctggccgcctcctggctggaaccatgagaaggaagctcagtacttcccacagtgtccctgttgataactgtttttattaactgaattgtttttttcatggaccaaacttttttttgtactgtccccttattgatgttacccagttttaataaaagaatcttctgaagga

SEQ ID NO: 389459 - DNA, 3352 bp, Homo sapiens
tttggaaagttaacgccatgcgccaagatgaagctattactccaagcccctcttcatcagagggctcgagttggggttgagactggggctgaggctgtggtccgtccccctttccaggtccttgtcttcctcccgtcggcctgggggcgcccgctcacgcggcctctctattgcagagctcttctctatggttttccctcccggaccgtgaaggcgggagggcgtggccagcacgccttttccgctagtcgccccgctctatcccatagtctcgctgccctgagcctcccgtgccggccggccggccgggggaacaggcgggcgctcggggggcgctcggggggcggggggagttccggttccggttctttgtgcggctgcatcggcggctccgggaagatggcggcccgggcgggtttccagtctgtggctccaagcggcggcgccggagcctcaggaggggcgggcgcggctgctgccttgggcccgggcggaactccggggcctcctgtgcgaatgggcccggctccgggtcaagggctgtaccgctccccgatgcccggagcggcctatccgagaccaggtatgttgccaggcagccgaatgacacctcagggaccttccatgggaccccctggctatggggggaacccttcagtccgacctggcctggcccagtcagggatggatcagtcccgcaagagacctgcccctcagcagatccagcaggtccagcagcaggcggtccaaaatcgaaaccacaatgcaaagaaaaagaagatggctgacaaaattctacctcaaaggattcgtgaactggtaccagaatcccaggcctatatggatctcttggcttttgaaaggaaactggaccagactatcatgaggaaacggctagatatccaagaggccttgaaacgtcccatcaagtggcacaggaccgccactacccaggagaccgatggctttcaggtgaagcggccgggagacgtgaatgtacggtgtactgtcctactgatgctggattaccagcctccccagtttaaattagacccccgcctagctcgactcctgggcatccatacccagactcgtccagtgatcatccaagcactgtggcaatatattaagacacataagctccaggaccctcacgagcgggagtttgtcatctgtgacaagtacctgcagcagatctttgagtctcaacgtatgaagttttcagagatccctcagcggctccatgccttgcttatgccaccagaacctatcatcattaatcatgtcatcagtgttgacccgaatgatcagaaaaagacagcttgttatgacattgatgttgaagtggatgacaccttgaagacccagatgaattcttttctgctgtccactgccagccaacaggagattgctactctagacaacaagatccatgagacaatagaaaccatcaaccagctgaagactcagcgggagttcatgctgagctttgccagagaccctcagggtttcatcaatgactggcttcagtcccagtgcagggacctcaagacaatgactgatgtggtgggtaacccagaggaggagcgccgagctgagttctacttccagccctgggctcaggaggctgtgtgccgatacttctactccaaggtgcagcagagacgacaagaattagagcaagccctgggaatccggaatacatagggcctctcccacagccctgattcgactgcaccaattcttgatttgggccctgtgctgcctgcctcatagtatctgccttggtcttgcttggggcgttccaggggatgctgttggttcaaggacaacaccagaatgaagagggtctcacaagacacctgttatcctcttctttcaccctatctcttcccacccccagcttccctttgccccacaaagttcccatgtgcctgtaccctcccctggtctacataggacctctagatagtgttagagagagaacatgtagtggtaatgagtgcttggaatggattgggcctcaggccaggtggtcttcaaggggaccagctaactgatcctgcccttcagagacccaggagttgggagctttcgctccttctccaagactcaggcctgtgggcactctataagctagttgatcttggctctcctgataacagaatccaatttccttccttccctccacaggtttggaacaaactctcccttcacttgttgccctgtagcactacagaaaccctggttcttgggctccactgagccccaggtcagtccccagccctctgggttggcctgctgtcagtgcttctctcactccttagttggggtccacatcagtattggagttttgttctttattgctccctcccagacactccctgtggctgccctttgtgattccctcagatctgccctaatcccgggcatttgggtgggggaatcttgcctttccctttcagagccccagggatctcatctggggaactgtcattgccagcagaggctgttccttcctgctgtttggagatgtgactcattcattcactcactccaccctgcctctgcatcccttaatggagaaacgggcctaaaaccaaacgggtaaaaagccctgggccatccctgtcttcctgtcccttgtctgcccagttgacacctactggtgacttctagggcactgaggagtgaaagcgcctagggctggagaatagcgctgagttgggtttgtgactcttccctctccctgcctcacaggattgtgactccccagcccctgccctcaaagcttcagacccctcaggtagcagcaggaccttgtgatcttggccccttggatctgagatggtttttgcatctttccaggagagcctcacattcttcttccaggttgtatcacccccgagttagcatatcccaggctcgcagactcaacacagcaagggtgggagacagctgggcacaaagggggaattccgttcagcatgggctctaaacccacagaactgacaaagcccctgcttccccaccccctcctcaggctcctgcgagcacacccccacccccaaatccctccctgttctacactggggacagcagaattttctccccgtcttccccttcctgccattttccctcccttgaaaggttgacactggacaaccttggggcagctgagccctggccgcctcctggctggaaccatgagaaggaagctcagtacttcccacagtgtccctgttgataactgtttttattaactgaattgtttttttcatggaccaaacttttttttgtactgtccccttattgatgttacccagttttaataaaagaatcttctgaagga

SEQ ID NO: 389460 - DNA, 2198 bp, Homo sapiens
aaggctaaggtcgagccggggtgtagtcggccgaggcaacatctttgagtctcaacgtatgaagttttcagagatccctcagcggctccatgccttgcttatgccaccagaacctatcatcattaatcatgtcatcagtgttgacccgaatgatcagaaaaagacagcttgttatgacattgatgttgaagtggatgacaccttgaagacccagatgaattcttttctgctgtccactgccagccaacaggagattgctactctagacaacaagatccatgagacaatagaaaccatcaaccagctgaagactcagcgggagttcatgctgagctttgccagagaccctcagggtttcatcaatgactggcttcagtcccagtgcagggacctcaagacaatgactgatgtggtgggtaacccagaggaggagcgccgagctgagttctacttccagccctgggctcaggaggctgtgtgccgatacttctactccaaggtgcagcagagacgacaagaattagagcaagccctgggaatccggaatacatagggcctctcccacagccctgattcgactgcaccaattcttgatttgggccctgtgctgcctgcctcatagtatctgccttggtcttgcttggggcgttccaggggatgctgttggttcaaggacaacaccagaatgaagagggtctcacaagacacctgttatcctcttctttcaccctatctcttcccacccccagcttccctttgccccacaaagttcccatgtgcctgtaccctcccctggtctacataggacctctagatagtgttagagagagaacatgtagtggtaatgagtgcttggaatggattgggcctcaggccaggtggtcttcaaggggaccagctaactgatcctgcccttcagagacccaggagttgggagctttcgctccttctccaagactcaggcctgtgggcactctataagctagttgatcttggctctcctgataacagaatccaatttccttccttccctccacaggtttggaacaaactctcccttcacttgttgccctgtagcactacagaaaccctggttcttgggctccactgagccccaggtcagtccccagccctctgggttggcctgctgtcagtgcttctctcactccttagttggggtccacatcagtattggagttttgttctttattgctccctcccagacactccctgtggctgccctttgtgattccctcagatctgccctaatcccgggcatttgggtgggggaatcttgcctttccctttcagagccccagggatctcatctggggaactgtcattgccagcagaggctgttccttcctgctgtttggagatgtgactcattcattcactcactccaccctgcctctgcatcccttaatggagaaacgggcctaaaaccaaacgggtaaaaagccctgggccatccctgtcttcctgtcccttgtctgcccagttgacacctactggtgacttctagggcactgaggagtgaaagcgcctagggctggagaatagcgctgagttgggtttgtgactcttccctctccctgcctcacaggattgtgactccccagcccctgccctcaaagcttcagacccctcaggtagcagcaggaccttgtgatcttggccccttggatctgagatggtttttgcatctttccaggagagcctcacattcttcttccaggttgtatcacccccgagttagcatatcccaggctcgcagactcaacacagcaagggtgggagacagctgggcacaaagggggaattccgttcagcatgggctctaaacccacagaactgacaaagcccctgcttccccaccccctcctcaggctcctgcgagcacacccccacccccaaatccctccctgttctacactggggacagcagaattttctccccgtcttccccttcctgccattttccctcccttgaaaggttgacactggacaaccttggggcagctgagccctggccgcctcctggctggaaccatgagaaggaagctcagtacttcccacagtgtccctgttgataactgtttttattaactgaattgtttttttcatggaccaaacttttttttgtactgtccccttattgatgttacccagttttaataaaagaatcttctgaagga

SEQ ID NO: 389461 - DNA, 2287 bp, Homo sapiens
tttggaaagttaacgccatgcgccaagatgaagctattactccaagcccctcttcatcagagggctcgagttggggttgagactggggctgaggctgtggtccgtccccctttccaggtccttgtcttcctcccgtcggcctgggggcgcccgctcacgcggcctctctattgcagagctcttctctatggttttccctcccggaccgtgaaggcgggagggcgtggccagcacgccttttccgctagtcgccccgctctatcccatagtctcgctgccctgagcctcccgtgccggccggccggccgggggaacaggcgggcgctcggggggcgctcggggggcggggggagttccggttccggttctttgtgcggctgcatcggcggctccgggaagatggcggcccgggcgggtttccagtctgtggctccaagcggcggcgccggagcctcaggaggggcgggcgcggctgctgccttgggcccgggcggaactccggggcctcctgtgcgaatgggcccggctccgggtcaagggctgtaccgctccccgatgcccggagcggcctatccgagaccaggtatgttgccaggcagccgaatgacacctcagggaccttccatgggaccccctggctatggggggaacccttcagtccgacctggcctggcccagtcagggatggatcagtcccgcaagagacctgcccctcagcagatccagcaggtccagcagcaggcggtccaaaatcgaaaccacaatgcaaagaaaaagaagatggctgacaaaattctacctcaaaggattcgtgaactggtaccagaatcccaggcctatatggatctcttggcttttgaaaggaaactggaccagactatcatgaggaaacggctagatatccaagaggccttgaaacgtcccatcaagcaaaaacggaagctgcgaattttcatttctaacactttcaatccggctaagtcagatgccgaggatggggaagggacggtggcttcctgggagcttcgggtagaaggacggctcctggaggattcagccttgtccaaatatgatgccactaaacaaaagaggaagttctcttccttttttaagtccttggtgattgaactggacaaagacctgtatgggccagacaaccatctggtagaatggcacaggaccgccactacccaggagaccgatggctttcaggtgaagcggccgggagacgtgaatgtacggtgtactgtcctactgatgctggattaccagcctccccagtttaaattagacccccgcctagctcgactcctgggcatccatacccagactcgtccagtgatcatccaagcactgtggcaatatattaagacacataagctccaggaccctcacgagcgggagtttgtcatctgtgacaagtacctgcagcagatctttgagtctcaacgtatgaagttttcagagatccctcagcggctccatgccttgcttatgccaccagaacctatcatcattaatcatgtcatcagtgttgacccgaatgatcagaaaaagacagcttgttatgacattgatgttgaagtggatgacaccttgaagacccagatgaattcttttctgctgtccactgccagccaactggagaatagcgctgagttgggtttgtgactcttccctctccctgcctcacaggattgtgactccccagcccctgccctcaaagcttcagacccctcaggtagcagcaggaccttgtgatcttggccccttggatctgagatggtttttgcatctttccaggagagcctcacattcttcttccaggttgtatcacccccgagttagcatatcccaggctcgcagactcaacacagcaagggtgggagacagctgggcacaaagggggaattccgttcagcatgggctctaaacccacagaactgacaaagcccctgcttccccaccccctcctcaggctcctgcgagcacacccccacccccaaatccctccctgttctacactggggacagcagaattttctccccgtcttccccttcctgccattttccctcccttgaaaggttgacactggacaaccttggggcagctgagccctggccgcctcctggctggaaccatgagaaggaagctcagtacttcccacagtgtccctgttgataactgtttttattaactgaattgtttttttcatggaccaaacttttttttgtactgtccccttattgatgttacccagttttaataaaagaatcttctgaagga

SEQ ID NO: 389462 - DNA, 1931 bp, Homo sapiens
tttggaaagttaacgccatgcgccaagatgaagctattactccaagcccctcttcatcagagggctcgagttggggttgagactggggctgaggctgtggtccgtccccctttccaggtccttgtcttcctcccgtcggcctgggggcgcccgctcacgcggcctctctattgcagagctcttctctatggttttccctcccggaccgtgaaggcgggagggcgtggccagcacgccttttccgctagtcgccccgctctatcccatagtctcgctgccctgagcctcccgtgccggccggccggccgggggaacaggcgggcgctcggggggcgctcggggggcggggggagttccggttccggttctttgtgcggctgcatcggcggctccgggaagatggcggcccgggcgggtttccagtctgtggctccaagcggcggcgccggagcctcaggaggggcgggcgcggctgctgccttgggcccgggcggaactccggggcctcctgtgcgaatgggcccggctccgggtcaagggctgtaccgctccccgatgcccggagcggcctatccgagaccaggtatgttgccaggcagccgaatgacacctcagggaccttccatgggaccccctggctatggggggaacccttcagtccgacctggcctggcccagtcagggatggatcagtcccgcaagagacctgcccctcagcagatccagcaggtccagcagcaggcggtccaaaatcgaaaccacaatgcaaagaaaaagaagatggctgacaaaattctacctcaaaggattcgtgaactggtaccagaatcccaggcctatatggatctcttggcttttgaaaggaaactggaccagactatcatgaggaaacggctagatatccaagaggccttgaaacgtcccatcaagcaaaaacggaagctgcgaattttcatttctaacactttcaatccggctaagtcagatgccgaggatggggaagggacggtggcttcctgggagcttcgggtagaaggacggctcctggaggattcagccttgtccaaatatgatgccactaaacaaaagaggaagttctcttccttttttaagtccttggtgattgaactggacaaagacctgtatgggccagacaaccatctggtagaatggcacaggaccgccactacccaggagaccgatggctttcaggtgaagcggccgggagacgtgaatgtacggtgtactgtcctactgatgctggattaccagcctccccagtttaaattagacccccgcctagctcgactcctgggcatccatacccagactcgtccagtgatcatccaagcactgtggcaatatattaagacacataagctccaggaccctcacgagcgggagtttgtcatctgtgacaagtacctgcagcagatctttgagtctcaacgtatgaagttttcagagatccctcagcggctccatgccttgcttatgccaccagaacctatcatcattaatcatgtcatcagtgttgacccgaatgatcagaaaaagacagcttgttatgacattgatgttgaagtggatgacaccttgaagacccagaattttctccccgtcttccccttcctgccattttccctcccttgaaaggttgacactggacaaccttggggcagctgagccctggccgcctcctggctggaaccatgagaaggaagctcagtacttcccacagtgtccctgttgataactgtttttattaactgaattgtttttttcatggaccaaacttttttttgtactgtccccttattgatgttacccagttttaataaaagaatcttctgaaggatgggtcctcctacctactgtgagagagctcttccctgagctcttcttccttcaataccattaaaaaacttgta

SEQ ID NO: 389463 - DNA, 279 bp, Homo sapiens
ccacaccctaggccccatcaccactgatcctcccttagacgatggcaaacgcctggctccaggacccattcttcacctgccagggaccatcctaaatgtgatcactgccctcccctgctctaagctcccaggggcccctgcatccagactgaagcccacaatctttttctttttgagattgggtcttgctatgttgtccaggctggatttgaactcctaggctcaagtaatcctcctacttcagcctcctgagtagctgagacacacaatctttaatga

SEQ ID NO: 389464 - DNA, 565 bp, Homo sapiens
gagggaggatctgtgggcaaaggagaatttgaaatccccacaggttctgggaaacaatggaagtcacagggtggggcccttgcatgagaatacattcttttgattttgttttgtctttctgattggctgccagtttcttaatgcaatatgagagcaagagggagctaattctcttcagagcctaaaatccctcgagccgagctggcacttgaacgaagacaaagcttattgagattgggcagggaagttgtcactgtgtgatttgggagtctttcatttggccaatataactccattagattttggaagtgaacccaggtagcagggagggttctggaagtaacattctccaaccagcttgtaattaaaatggaaccctttgaagaactggtcctctctcaattgctccagcctctctctgtcagattgaatgccaggaagccgctgccttaagctttggctagttttctgccaaggcgtttaactctcagttttgtgttgcttgtcaaagtgtccttagagagcataagacactcactttatatttggtgcccacagtatcctt

SEQ ID NO: 389465 - DNA, 609 bp, Homo sapiens
gcaattctcctgcctcagcctcctggatagctaggattacaggtttgcaccaccatgcccgacaaatttttgtatttttagtagaaacagggtttcatcatgttggccaagctggtcttgaactcctgaccttaagtgatccgcccaccttggcctcccaaagtgctgggattacgggcatgagccaccgtgaggcaggggccataaaagaccatttaaaaagaatgcagggagaggccaataaccaagaacaaatatcaaagagagagacagaatcccatcagaaaagtgtcaggaagcctggaatccagggtgagctggatagtaagtataataatacttaataagtattaagtactggataataagtataaattaagtataatatataaaaaaatcctaaaaacaaccaaagacataaaaagctggtaagaaacaatcctacagaaaataatggtgacagaataatccagatatggaagactggaatcctagtgatgtcgagttttgtgcattttttaataatgatgtagttatttctgtcaagactgcgatattatttttatcttttttattatacagatttgttttagtttcgtaaaaaaaaaa

SEQ ID NO: 389466 - DNA, 359 bp, Homo sapiens
atatatataggcacttttgttaagtattaacttgtacagtcacagggtcccacaataggctgtctgcaagttgaggagcaaggagagccagtctgagtcccaaaactgaagaacttggagtccaatgtttgagggcagaaagcatccagcacaggagaaagatgtaggctgggaggctaggagatacatatatatgtgtatatatatgtatacacattatacatatatattatatatataatattataatatacatataatatatattatatgtataatattataatataatattatatatataatattataatatacatataatatatatgatatgtatattatcatattatacatat

SEQ ID NO: 389467 - DNA, 155 bp, Homo sapiens
taaactagccctaaccctaacactgcccaggcctaaagttcagctgcagctgaaaatgtctataaaactgccccccaaccattatcatcaagcaaatccatcccctgtcccaaatacatttcctcttgtatttcttctggcagaatgtttccttt

SEQ ID NO: 389468 - DNA, 273 bp, Homo sapiens
ctggttctataacttgcttaggggaaaaacaggggtggaagacagaagggcaggagaaggtcagagagggactttgtttctgaggctgcttctgaagccttccaatctccttcagattaaagtactcagcatgccacagcgccacacttggggtattattttctgagcccccaaaataaaggcttcaaagatgacatgaaaatattaacagaggtgtttgtgatgggatggtagaacaatgggtattttttctatctagttacatgtgttttc

SEQ ID NO: 389469 - DNA, 499 bp, Homo sapiens
catgaaaagacctggtcctattcttagtagagaatccggagtttttggtttcatcagccatagtgaagttcacatttatgtgcagctctcttatcactgtgtcactgcttatggcattgcatttacctgccctgcttttctgttcactggttgactgatgaatcctacttaaccctttaagttgcagctcaaatgttatctttactcttctacttttcccaacctctcttctggattaaggatccttttatctgagtttccttagcactttaccaaaagctgtattacagcacttatcacactattaaaaaaaatgtttctctttgccctattcgtttcagtgtttcatgaaagggcgggggccatatttaattaatcatcatattcccgtaacctgggacagtgtttgagacatagttagtacttagtgagcatcttataaattgtttggccttatctttattatagaacgtgtatctttagtgacttttttttggta

SEQ ID NO: 389470 - DNA, 178 bp, Homo sapiens
ggaaaacaaatgtaaggagggaattcaaatacctagttaatctattaactactaataactcattaaataaattaataatattaaatggtctgtgtgttccatgtaaataatagaatgatttccactgaatagtcatgatggtttaaaatattactctaataccaataacaacacgtaa

SEQ ID NO: 389471 - DNA, 395 bp, Homo sapiens
agacatcatgattctgctttacacataaatattttaacatgtatcacctaaagttaaggacattttcctagatatccagaataccattattatatctaagaaagtcaacaataattctgtagtatcatgtaatatttagtccctatttcagtatccccatttgtccccaaaatgcttgcttttttgggacacaaagctagcattttaatgaacatttttattagcatttcttttggtacctacagattgatccagtgggcttctcctatttaaaaggattttttggctgggcgctgtggctcacacctgtaatcccagcactttgggaggcctaggtgggaggatcacctgaggtcaggactttgagaccagcctggccaacatggtgaaaccct

SEQ ID NO: 389472 - DNA, 300 bp, Homo sapiens
aaaacagaaaaaaaaatagcagcataagcatgttatttagaaaatatttagataaatttcagaataaaaaattaaaagatcaaaaagttaaaataaattttacttgggttagatatgctgaaaaaaaaaaaaaaaaaacaaagaaacttgtttctgagagcttaacaaacctggaagattaggccaggagcagtggctcacacctgtaatcccagatcacgaggtcaggagatcctgacctggctaaccatcctggctaacacagtgaaaccgcatctctactaaaaatacaaaaagtta

SEQ ID NO: 389473 - DNA, 575 bp, Homo sapiens
tctattttgcacaatatttccttcttgggttgtgtccggggaccttgttcatggcactgaccttccacatgtgcttggtgattcttgtgaaatccttttccataacccagttctcccatcaacatcactccctttgtctctctctttttgatcattgccttctagatattaatttttgttttcatgtttctcctctctcccctggtagtacacagaggccgggcttggccagtgttcattgctgcatatggaagctttctttctcatctttcaaaaagctactgtggttggaattttcgttgcacaaccatttctggcttgttttccttctgggtggagaattgcacttctctgccccttggccttgagttgtgccacacgagtggaagtggcatatgtgacttctgggtggcagcatttaattactggggtgagatcctccggggcttttttttttccccctgaatgaggcaagctctgaagcatctgttgagatggagcctcatgaggtggaagcaaagtggagaactcagccagcacacaaaggagggtggctgcctgtcctagaaagctgc

SEQ ID NO: 389474 - DNA, 141 bp, Homo sapiens
ctcgttgcactcgttcggacgctctacatcgtactgtgactgtgaagaaccctggagtgatccttttaaaattagtcaaattatgtcaattctctattcatacccctccattgacctcctttcttgctcagagtgaaactc

SEQ ID NO: 389475 - DNA, 1992 bp, Homo sapiens
cccataagaatgtacagtctagtgaggcagatgtatatgaaactaatctgtacatgtgtatacttacacatacacacatgttcgtataacatgatttacaaaaagggttaggatgcaagagtcagagtgagggatctgtccctggatggggacaataaggggtcagttcagggggacttccttgagctctgaagtttcacctgagaatgggagattcagaacttggtgacagagtttgtggagctcactgtgtctttgctgatccttcagcaaaggaagtgagattgtttctagcttttctgtttggggtgcttctctgtcaactaaaagtcttcatcctttaaatattgcatcatttgtgtatacttcattcattcacttactcatgacccactcctcgagtgcctgcaatgggcaagcgtctgtcctaggagccgtgtgctgggccacagttaaatctgagagatcatgtgtggcatttctcatggattgagatgtctgagtgtcattgttttgagagagctagtggcatggtttataaagctgtttttcattttctccatacaggacaacagctttgagcagttcattattaattattgtaacgaaaagctgcaacaaatcttcattgaacttactcttaaagaagagcaggaggagtatatacgggaggatatagaatggactcacattgactacttcaataatgctatcatttgtgacctaatagaaaataacacaaatggaatcctggccatgctggatgaagagtgcctcagacctggcacagtcactgatgagaccttcttagaaaagctgaaccaagtatgtgccacccaccagcattttgaaagcaggatgagcaagtgctctcggttcctcaatgacacgtctctgcctcacagctgcttcaggatccagcattatgctggaaaggtgctgtaccaggtggaaggattcgttgacaaaaacaatgaccttctctatcgagacctgtcccaagccatgtggaaggccagccatgccctcatcaagtctttgttccccgaagggaatcccgccaagatcaacctgaaaaggcctcctacagcaggctcacagttcaaggcatccgtggccactctgatgaaaaacctacagaccaagaacccaaactatattaggtggtatttttggcacatgaaactttcacagttcaaatgtgagagcaccccgaaggaatatcatttttccctttgcttcaatctgagtgtagcccaagcagagggtaactaaaatacttacagattaaataataccttatctgggattggcttaaaaaatgctccactatcctttcccctaaaataagaaagtaaaaaagtaaagtgtggtggagaagatagtagatatttaatgaagctcagtggttgagacctaggggttttcaactttctgtatgtttattattatttttttaacggcaagttaaaaaacaaaatgcaagtgttttttctggtcagtgttttgcagaaaactcttgttggcttcatttgggattcttgttctattagcttagagcacagcattgaagcaagtgctttagttaactgctctggcacttcttaggagacatgcacttttttcttccctgtgagaggtgtaggcctggagaaagtaatgattcctaaagcaatctgaattttttccaaggcagtagaaagaccttcttaaaaagggctgggcgtggtggctcacacctataatcccaacacttagggaggcggaggcaggtggatcacctcaggtcaggaattcgagactagcctggccaacatggcaaaaccctgtctctactaaaaatataaaaattagctgggcgtggtggcagggacctataatcccaactacttgggaggctgaggcaggagaatcgcttggaggcagaggttgcagtgagccgaggtcacgccactgcactccagcccgggtgacaatacaagactccatctc

SEQ ID NO: 389476 - DNA, 686 bp, Homo sapiens
gaggataatgtatatacattggtattatttaacataataccaatgtatatacattggtattatgttaaataataaaattgttctaatttggtgccatttcctgaatcacaactgtatttttgtatctcaagctattttcatatgttatgtgtcaatgtatcatctctcagaaaggttttacaatccaaacattatatgttctctgtgtaactgaatttcacttatcttttataaaccagaaacattaattgaaaatattttctggggattttctcttgacttgtatttttaaaaattgctcacataaagaagttctcagaaaaaaaaaaaaaaaaaaaaaaaaaaaaaaaaaagggggggggggaaaaaattcccccggaggggcgcccaagtttacccgctatcccccggtttttttgtaccaaaggtgggccccatttagggggaggtcctttattaggccaagggaccggggggcggcgtttttacccactgcctggcgcgggggaacctgggctcttggggcgcttttggggagagagccctactttccggcgcgtgcgcctctgggcccattcacctaagagagttaaggctcagggaacttaacatttcaccggttcctggtgaccccaccggatttcgtgcccggagacgttggctccgctctgttccacattttcagg

SEQ ID NO: 389477 - DNA, 812 bp, Homo sapiens
  misc_feature (179)..(179): n is a, c, g, or t
cagggtcaagaaccagagggagagttcacggaccattcaaatcgctagtgaccaagagaactttactctcggtgacacttctgactagactctactgctctatacgacacctagtgttgggctgcgattcttgggagcgtgcctggatgattacatactcctgtgtataaaaaacatanactatgccttatgaagatatgatcgtcattgctgtagaggctaacatatgaaaccgggctattgggaagagatcctctttaatttatctcttagccgtctgttagcgacgtcttggtagccatatgtctgaacataattacgacgcggactcactggaggatgggaccttggtctcagtgaactcacatgttgagcgctgttctgactttcaccgaaatgaggggtttaaagcagctctctctggagactttctcttcagcagtgatcacctgattgaaatggccaccaagctctatcgcacaactctcagccaaaccaaacagaagctcaatattgagatttccgatgagtacgttcatgtattgtttgaaaaccctttttctctttcagcttttttgttttagttcagctctcgatctcattcattaatacaactacttattaagtaccaggtatgtgtctagtagttgttccacatgataaatgggcagtgaatgacactgaccaagtctccaacctcatgtacctgacatcctagtggaagagaccagtatgtacaaataaaatgatgaaatagttgataagattttggctaacaagtgtttatggaggaaaaaaagggttaagagtca

SEQ ID NO: 389478 - DNA, 4704 bp, Homo sapiens
ggaaaaatagaggacagtacgcttgtcatgtcctatgtggcagctggttgtggaaaaggagcaaagttaatcaagtaagaacagcttttacagtccaacccggtcctggaagcttttggaaatgccaaaactgtaaggaatgacaactcctctagatttggcaaatatatggatattgaatttgactttaaaggcgatccactaggaggagtaataagtaactatcttttagagaaatctcgggttgttaaacagccaagaggtgaaagaaacttccatgtgttctatcagctgctctctggtgcctctgaagagctcctcaataaacttaagcttgagagggatttcagcaggtataactacctgagtctggattcggccaaagtgaatggagtggatgatgcagcaaattttagaaccgtgcggaatgccatgcagattgtgggctttatggatcatgaagctgagtctgtcttggcggtggtggcagcagtgttgaaactggggaacattgagttcaagcccgaatctcgagtgaatggtctagatgaaagcaaaatcaaagataaaaatgagttaaaagaaatttgtgaattgaccggcattgatcaatcagttctagaacgagcattcagtttccgaacagttgaggccaaacaggagaaagtttcaactacactgaatgtggctcaggcttattatgcccgtgatgctctggctaaaaacctctacagcaggttgttttcatggttggtaaatcgaatcaatgaaagcattaaggtactgaatttctatgagcaaaatcagttgtaataaatggtattcacagtataaacattaagttgaagaaagtttaaatttataatcaaataattgattgccacttacaaagattattccttaaaaagagtgtaccatgtataagattgaaatttgtcagggattttgtttattttgttttgccatgtgtgttgcttctgactggtgaatagtctgatggtctttgtggagttactctgggagtcggcgtcccaggttttggcctggctcacctggtaactagtggtacacactttgctgaaaaggtcactttacttcactaggtcatgatctaatcattactaaaatgagagtgttggactaggtgattttgaaaggcaccactaatgccttctttaaatatatcacctattattaaaatttctaaaagagttctataccaatgcctcatctcatacattttttaaaaaacaactaaattagttattttcttacttaagaaacataattaatttgtaatatatatctatgttccttggatgcttgtagtgttatatttcatgccttaattaaccctttaatttgaaactttttaaaggcacaaacaaaagtgagaaagaaggtcatgggtgttctggacatttatggctttgagattttcgaggacaacagctttgagcagttcattattaattattgtaacgaaaagctgcaacaaatcttcattgaacttactcttaaagaagagcaggaggagtatatacgggaggatatagaatggactcacattgactacttcaataatgctatcatttgtgacctaatagaaaataacacaaatggaatcctggccatgctggatgaagagtgcctcagacctggcacagtcactgatgagaccttcttagaaaagctgaaccaagtatgtgccacccaccagcattttgaaagcaggatgagcaagtgctctcggttcctcaatgacacgtctctgcctcacagctgcttcaggatccagcattatgctggaaaggtgctgtaccaggtggaaggattcgttgacaaaaacaatgaccttctctatcgagacctgtcccaagccatgtggaaggccagccatgccctcatcaagtctttgttccccgaagggaatcccgccaagatcaacctgaaaaggcctcctacagcaggctcacagttcaaggcatccgtggccactctgatgaaaaacctacagaccaagaacccaaactatattaggtgtatcaaaccgaatgataaaaaagcagcacacatcttcaacgaggctctagtgtgtcatcagatcaggtacctggggcttttggagaacgtccgagtgcggagggcaggctacgccttcaggcaggcctatgaaccttgcctagaaagatacaaaatgctttgtaaacaaacatggcctcattggaaaggaccagccaggtctggtgtggaggtcctatttaatgaattagaaattcccgtggaagaatactcctttggtagatcaaagatattcatccgaaacccaagaacattattcaaattagaagacctgaggaagcaacgcctggaggacttggccactctcattcagaagatatatcgggggtggaaatgccgcacacacttcctgctaatgaaaaaaagccaaattgtgattgccgcctggtacaggagatatgcgcaacaaaagaggtaccagcagacaaagagttccgccttagtaattcagtcttatatccggggttggaaggctcgaaaaattctgcgggaactgaagcatcaaaagcgctgtaaggaagcagtcacgaccattgctgcatattggcatgggacccaggtacgtagagaatacaggaaattcttcagagccaatgctggaaagaaaatctatgagtttacgcttcagagaattgtgcaaaaatacttcttggaaatgaaaaataagatgccttccttatctccaatagacaagaattggccctcaagaccttacttattcttggattctactcacaaggagctaaaaaggattttccacttgtggaggtgtaaaaaatacagggaccaattcacagaccagcagaaacttatttatgaagagaaactagaagccagtgaactcttcaaagacaagaaggctttatacccatctagtgttgggcgaccatttcaaggggcttacctggaaatcaacaagaaccccaagtataagaaactcaaagatgccattgaagaaaagatcatcattgctgaagtcgtgaacaaaattaaccgtgctaatgggaagagtacatctcggattttcctcttaacaaacaataatctccttcttgctgaccaaaagtctggacaaatcaagtcagaggttccactggtggatgtgaccaaggtatcaatgagctcacaaaatgatggcttcttcgccgtccacctcaaagagggctcagaagcagctagtaaaggagactttctcttcagcagtgatcacctgattgaaatggccaccaagctctatcgcacaactctcagccaaaccaaacagaagctcaatattgagatttccgatgagttcctggtacagttcagacaggacaaagtatgtgtgaagtttattcagggaaaccagaaaaatgggagtgtcccaacatgtaaacgaaaaaacaaccgtctccttgaagttgctgtcccttaactggcgcctcctctctactttcatggacttgttcctttgtaatagtgcaatttggttttgttttatttggggttcattgtatgtttgggaatcaccaaaggcttttagagttctttggcaaaataaaaatatttgactaatcaatttttattattggaatagttttaacctttcaaatacatgttctgtcctggagcaggattgtagaaactaacagtgtctattttcatgtctgatgtgttcttcctttagtcatcatgttaggtctgtgtaccctaaatcagcatattactcataaatcattaattaatataagcataggaaatggtcttaaaagatactgcattcattcatcagatatttattccatgcctactctatgctaggcactgtgctagatggtatgaaaacttattaggaacctttttgtttttgagaccattgcattctggctggtttgtgctggtttaacgacatctaagaaggtttagaaatggtgagaccaaaacaataactgttaatgatggacagcattattaggaaccctgtagtatgatatttaacaatataggcttcaagaagggctggtcctaagagggggcagaaatgaatgaccaggttaaatccctctacatgtggtttctgtttgaaaaaaagaaaactgacatttgaacaggacttttaatttgtttaaaactctggtaattacttgtaacagtagaaaatagaagtcattcttattttagaaaaagtgacagaagcagtccagtaagattatatgtttctgtttctggtaaataccatatatgatcctcgaaatgataatatctccagaatattgttttcacccaaatttgagtagatattttaaacacctaacaaagtaaagggctaaaagccattcagatagcagtaaaacattctgtatgatgtgcaataaaacatccaagatcttttttgaaagttttatttataatatacatttttgtatgagaaaggtgattggtacagggtgcctattttagtcatggatcaaaatttgtgtaacttgcagggctttctttctttttcttcaaatttacaagggttcattttggaaactacattttaaactttggaatcaaattgtttcttatttgggaggataatgtatatacattggtattatgttaaataataaaattgttctaatttggtgccatttcctg

SEQ ID NO: 389479 - DNA, 4650 bp, Homo sapiens
ggaaaaatagaggacagtacgcttgtcatgtcctatgtggcagctggttgtggaaaaggagcaaagttaatcaagtaagaacagcttttacagtccaacccggtcctggaagcttttggaaatgccaaaactgtaaggaatgacaactcctctagatttggcaaatatatggatattgaatttgactttaaaggcgatccactaggaggagtaataagtaactatcttttagagaaatctcgggttgttaaacagccaagaggtgaaagaaacttccatgtgttctatcagctgctctctggtgcctctgaagagctcctcaataaacttaagcttgagagggatttcagcaggtataactacctgagtctggattcggccaaagtgaatggagtggatgatgcagcaaattttagaaccgtgcggaatgccatgcagattgtgggctttatggatcatgaagctgagtctgtcttggcggtggtggcagcagtgttgaaactggggaacattgagttcaagcccgaatctcgagtgaatggtctagatgaaagcaaaatcaaagataaaaatgagttaaaagaaatttgtgaattgaccggcattgatcaatcagttctagaacgagcattcagtttccgaacagttgaggccaaacaggagaaagtttcaactacactgaatgtggctcaggcttattatgcccgtgatgctctggctaaaaacctctacagcaggttgttttcatggttggtaaatcgaatcaatgaaagcattaaggtactgaatttctatgagcaaaatcagttgtaataaatggtattcacagtataaacattaagttgaagaaagtttaaatttataatcaaataattgattgccacttacaaagattattccttaaaaagagtgtaccatgtataagattgaaatttgtcagggattttgtttattttgttttgccatgtgtgttgcttctgactggtgaatagtctgatggtctttgtggagttactctgggagtcggcgtcccaggttttggcctggctcacctggtaactagtggtacacactttgctgaaaaggtcactttacttcactaggtcatgatctaatcattactaaaatgagagtgttggactaggtgattttgaaaggcaccactaatgccttctttaaatatatcacctattattaaaatttctaaaagagttctataccaatgcctcatctcatacattttttaaaaaacaactaaattagttattttcttacttaagaaacataattaatttgtaatatatatctatgttccttggatgcttgtagtgttatatttcatgccttaattaaccctttaatttgaaactttttaaaggcacaaacaaaagtgagaaagaaggtcatgggtgttctggacatttatggctttgagattttcgaggacaacagctttgagcagttcattattaattattgtaacgaaaagctgcaacaaatcttcattgaacttactcttaaagaagagcaggaggagtatatacgggaggatatagaatggactcacattgactacttcaataatgctatcatttgtgacctaatagaaaataacacaaatggaatcctggccatgctggatgaagagtgcctcagacctggcacagtcactgatgagaccttcttagaatgctctcggttcctcaatgacacgtctctgcctcacagctgcttcaggatccagcattatgctggaaaggtgctgtaccaggtggaaggattcgttgacaaaaacaatgaccttctctatcgagacctgtcccaagccatgtggaaggccagccatgccctcatcaagtctttgttccccgaagggaatcccgccaagatcaacctgaaaaggcctcctacagcaggctcacagttcaaggcatccgtggccactctgatgaaaaacctacagaccaagaacccaaactatattaggtgtatcaaaccgaatgataaaaaagcagcacacatcttcaacgaggctctagtgtgtcatcagatcaggtacctggggcttttggagaacgtccgagtgcggagggcaggctacgccttcaggcaggcctatgaaccttgcctagaaagatacaaaatgctttgtaaacaaacatggcctcattggaaaggaccagccaggtctggtgtggaggtcctatttaatgaattagaaattcccgtggaagaatactcctttggtagatcaaagatattcatccgaaacccaagaacattattcaaattagaagacctgaggaagcaacgcctggaggacttggccactctcattcagaagatatatcgggggtggaaatgccgcacacacttcctgctaatgaaaaaaagccaaattgtgattgccgcctggtacaggagatatgcgcaacaaaagaggtaccagcagacaaagagttccgccttagtaattcagtcttatatccggggttggaaggctcgaaaaattctgcgggaactgaagcatcaaaagcgctgtaaggaagcagtcacgaccattgctgcatattggcatgggacccaggtacgtagagaatacaggaaattcttcagagccaatgctggaaagaaaatctatgagtttacgcttcagagaattgtgcaaaaatacttcttggaaatgaaaaataagatgccttccttatctccaatagacaagaattggccctcaagaccttacttattcttggattctactcacaaggagctaaaaaggattttccacttgtggaggtgtaaaaaatacagggaccaattcacagaccagcagaaacttatttatgaagagaaactagaagccagtgaactcttcaaagacaagaaggctttatacccatctagtgttgggcgaccatttcaaggggcttacctggaaatcaacaagaaccccaagtataagaaactcaaagatgccattgaagaaaagatcatcattgctgaagtcgtgaacaaaattaaccgtgctaatgggaagagtacatctcggattttcctcttaacaaacaataatctccttcttgctgaccaaaagtctggacaaatcaagtcagaggttccactggtggatgtgaccaaggtatcaatgagctcacaaaatgatggcttcttcgccgtccacctcaaagagggctcagaagcagctagtaaaggagactttctcttcagcagtgatcacctgattgaaatggccaccaagctctatcgcacaactctcagccaaaccaaacagaagctcaatattgagatttccgatgagttcctggtacagttcagacaggacaaagtatgtgtgaagtttattcagggaaaccagaaaaatgggagtgtcccaacatgtaaacgaaaaaacaaccgtctccttgaagttgctgtcccttaactggcgcctcctctctactttcatggacttgttcctttgtaatagtgcaatttggttttgttttatttggggttcattgtatgtttgggaatcaccaaaggcttttagagttctttggcaaaataaaaatatttgactaatcaatttttattattggaatagttttaacctttcaaatacatgttctgtcctggagcaggattgtagaaactaacagtgtctattttcatgtctgatgtgttcttcctttagtcatcatgttaggtctgtgtaccctaaatcagcatattactcataaatcattaattaatataagcataggaaatggtcttaaaagatactgcattcattcatcagatatttattccatgcctactctatgctaggcactgtgctagatggtatgaaaacttattaggaacctttttgtttttgagaccattgcattctggctggtttgtgctggtttaacgacatctaagaaggtttagaaatggtgagaccaaaacaataactgttaatgatggacagcattattaggaaccctgtagtatgatatttaacaatataggcttcaagaagggctggtcctaagagggggcagaaatgaatgaccaggttaaatccctctacatgtggtttctgtttgaaaaaaagaaaactgacatttgaacaggacttttaatttgtttaaaactctggtaattacttgtaacagtagaaaatagaagtcattcttattttagaaaaagtgacagaagcagtccagtaagattatatgtttctgtttctggtaaataccatatatgatcctcgaaatgataatatctccagaatattgttttcacccaaatttgagtagatattttaaacacctaacaaagtaaagggctaaaagccattcagatagcagtaaaacattctgtatgatgtgcaataaaacatccaagatcttttttgaaagttttatttataatatacatttttgtatgagaaaggtgattggtacagggtgcctattttagtcatggatcaaaatttgtgtaacttgcagggctttctttctttttcttcaaatttacaagggttcattttggaaactacattttaaactttggaatcaaattgtttcttatttgggaggataatgtatatacattggtattatgttaaataataaaattgttctaatttggtgccatttcctg

SEQ ID NO: 389480 - DNA, 4052 bp, Homo sapiens
ggaaaaatagaggacagtacgcttgtcatgtcctatgtggcagctggttgtggaaaaggagcaaagttaatcaagtaagaacagcttttacagtccaacccggtcctggaagcttttggaaatgccaaaactgtaaggaatgacaactcctctagatttggcaaatatatggatattgaatttgactttaaaggcgatccactaggaggagtaataagtaactatcttttagagaaatctcgggttgttaaacagccaagaggtgaaagaaacttccatgtgttctatcagctgctctctggtgcctctgaagagctcctcaataaacttaagcttgagagggatttcagcaggtataactacctgagtctggattcggccaaagtgaatggagtggatgatgcagcaaattttagaaccgtgcggaatgccatgcagattgtgggctttatggatcatgaagctgagtctgtcttggcggtggtggcagcagtgttgaaactggggaacattgagttcaagcccgaatctcgagtgaatggtctagatgaaagcaaaatcaaagataaaaatgagttaaaagaaatttgtgaattgaccggcattgatcaatcagttctagaacgagcattcagtttccgaacagttgaggccaaacaggagaaagtttcaactacactgaatgtggctcaggcttattatgcccgtgatgctctggctaaaaacctctacagcaggttgttttcatggttggtaaatcgaatcaatgaaagcattaaggcacaaacaaaagtgagaaagaaggtcatgggtgttctggacatttatggctttgagattttcgaggacaacagctttgagcagttcattattaattattgtaacgaaaagctgcaacaaatcttcattgaacttactcttaaagaagagcaggaggagtatatacgggaggatatagaatggactcacattgactacttcaataatgctatcatttgtgacctaatagaaaataacacaaatggaatcctggccatgctggatgaagagtgcctcagacctggcacagtcactgatgagaccttcttagaaaagctgaaccaagtatgtgccacccaccagcattttgaaagcaggatgagcaagtgctctcggttcctcaatgacacgtctctgcctcacagctgcttcaggatccagcattatgctggaaaggtgctgtaccaggtggaaggattcgttgacaaaaacaatgaccttctctatcgagacctgtcccaagccatgtggaaggccagccatgccctcatcaagtctttgttccccgaagggaatcccgccaagatcaacctgaaaaacctacagaccaagaacccaaactatattaggtgtatcaaaccgaatgataaaaaagcagcacacatcttcaacgaggctctagtgtgtcatcagatcaggtacctggggcttttggagaacgtccgagtgcggagggcaggctacgccttcaggcaggcctatgaaccttgcctagaaagatacaaaatgctttgtaaacaaacatggcctcattggaaaggaccagccaggtctggtgtggaggtcctatttaatgaattagaaattcccgtggaagaatactcctttggtagatcaaagatattcatccgaaacccaagaacattattcaaattagaagacctgaggaagcaacgcctggaggacttggccactctcattcagaagatatatcgggggtggaaatgccgcacacacttcctgctaatgaaaaaaagccaaattgtgattgccgcctggtacaggagatatgcgcaacaaaagaggtaccagcagacaaagagttccgccttagtaattcagtcttatatccggggttggaaggctcgaaaaattctgcgggaactgaagcatcaaaagcgctgtaaggaagcagtcacgaccattgctgcatattggcatgggacccaggtacgtagagaatacaggaaattcttcagagccaatgctggaaagaaaatctatgagtttacgcttcagagaattgtgcaaaaatacttcttggaaatgaaaaataagatgccttccttatctccaatagacaagaattggccctcaagaccttacttattcttggattctactcacaaggagctaaaaaggattttccacttgtggaggtgtaaaaaatacagggaccaattcacagaccagcagaaacttatttatgaagagaaactagaagccagtgaactcttcaaagacaagaaggctttatacccatctagtgttgggcgaccatttcaaggggcttacctggaaatcaacaagaaccccaagtataagaaactcaaagatgccattgaagaaaagatcatcattgctgaagtcgtgaacaaaattaaccgtgctaatgggaagagtacatctcggattttcctcttaacaaacaataatctccttcttgctgaccaaaagtctggacaaatcaagtcagaggttccactggtggatgtgaccaaggtatcaatgagctcacaaaatgatggcttcttcgccgtccacctcaaagagggctcagaagcagctagtaaaggagactttctcttcagcagtgatcacctgattgaaatggccaccaagctctatcgcacaactctcagccaaaccaaacagaagctcaatattgagatttccgatgagttcctggtacagttcagacaggacaaagtatgtgtgaagtttattcagggaaaccagaaaaatgggagtgtcccaacatgtaaacgaaaaaacaaccgtctccttgaagttgctgtcccttaactggcgcctcctctctactttcatggacttgttcctttgtaatagtgcaatttggttttgttttatttggggttcattgtatgtttgggaatcaccaaaggcttttagagttctttggcaaaataaaaatatttgactaatcaatttttattattggaatagttttaacctttcaaatacatgttctgtcctggagcaggattgtagaaactaacagtgtctattttcatgtctgatgtgttcttcctttagtcatcatgttaggtctgtgtaccctaaatcagcatattactcataaatcattaattaatataagcataggaaatggtcttaaaagatactgcattcattcatcagatatttattccatgcctactctatgctaggcactgtgctagatggtatgaaaacttattaggaacctttttgtttttgagaccattgcattctggctggtttgtgctggtttaacgacatctaagaaggtttagaaatggtgagaccaaaacaataactgttaatgatggacagcattattaggaaccctgtagtatgatatttaacaatataggcttcaagaagggctggtcctaagagggggcagaaatgaatgaccaggttaaatccctctacatgtggtttctgtttgaaaaaaagaaaactgacatttgaacaggacttttaatttgtttaaaactctggtaattacttgtaacagtagaaaatagaagtcattcttattttagaaaaagtgacagaagcagtccagtaagattatatgtttctgtttctggtaaataccatatatgatcctcgaaatgataatatctccagaatattgttttcacccaaatttgagtagatattttaaacacctaacaaagtaaagggctaaaagccattcagatagcagtaaaacattctgtatgatgtgcaataaaacatccaagatcttttttgaaagttttatttataatatacatttttgtatgagaaaggtgattggtacagggtgcctattttagtcatggatcaaaatttgtgtaacttgcagggctttctttctttttcttcaaatttacaagggttcattttggaaactacattttaaactttggaatcaaattgtttcttatttgggaggataatgtatatacattggtattatgttaaataataaaattgttctaatttggtgccatttcctg

SEQ ID NO: 389481 - DNA, 4193 bp, Homo sapiens
ggaaaaatagaggacagtacgcttgtcatgtcctatgtggcagctggttgtggaaaaggagcaaagttaatcaagtaagaacagcttttacagtccaacccggtcctggaagcttttggaaatgccaaaactgtaaggaatgacaactcctctagatttggcaaatatatggatattgaatttgactttaaaggcgatccactaggaggagtaataagtaactatcttttagagaaatctcgggttgttaaacagccaagaggtgaaagaaacttccatgtgttctatcagctgctctctggtgcctctgaagagctcctcaataaacttaagcttgagagggatttcagcaggtataactacctgagtctggattcggccaaagtgaatggagtggatgatgcagcaaattttagaaccgtgcggaatgccatgcagattgtgggctttatggatcatgaagctgagtctgtcttggcggtggtggcagcagtgttgaaactggggaacattgagttcaagcccgaatctcgagtgaatggtctagatgaaagcaaaatcaaagataaaaatgagttaaaagaaatttgtgaattgaccggcattgatcaatcagttctagaacgagcattcagtttccgaacagttgaggccaaacaggagaaagtttcaactacactgaatgtggctcaggcttattatgcccgtgatgctctggctaaaaacctctacagcaggttgttttcatggttggtaaatcgaatcaatgaaagcattaaggcacaaacaaaagtgagaaagaaggtcatgggtgttctggacatttatggctttgagattttcgaggacaacagctttgagcagttcattattaattattgtaacgaaaagctgcaacaaatcttcattgaacttactcttaaagaagagcaggaggagtatatacgggaggatatagaatggactcacattgactacttcaataatgctatcatttgtgacctaatagaaaataacacaaatggaatcctggccatgctggatgaagagtgcctcagacctggcacagtcactgatgagaccttcttagaaaagctgaaccaagtatgtgccacccaccagcattttgaaagcaggatgagcaagtgctctcggttcctcaatgacacgtctctgcctcacagctgcttcaggatccagcattatgctggaaaggtgctgtaccaggtggaaggattcgttgacaaaaacaatgaccttctctatcgagacctgtcccaagccatgtggaaggccagccatgccctcatcaagtctttgttccccgaagggaatcccgccaagatcaacctgaaaaggcctcctacagcaggctcacagttcaaggcatccgtggccactctgatgaaaaacctacagaccaagaacccaaactatattaggtgtatcaaaccgaatgataaaaaagcagcacacatcttcaacgaggctctagtgtgtcatcagatcaggtacctggggcttttggagaacgtccgagtgcggagggcaggctacgccttcaggcaggcctatgaaccttgcctagaaagatacaaaatgctttgtaaacaaacatggcctcattggaaaggaccagccaggtctggtgtggaggtcctatttaatgaattagaaattcccgtggaagaatactcctttggtagatcaaagatattcatccgaaacccaagaacattattcaaattagaagacctgaggaagcaacgcctggaggacttggccactctcattcagaagatatatcgggggtggaaatgccgcacacacttcctgctaatgaaaaaaagccaaattgtgattgccgcctggtacaggagatatgcgcaacaaaagaggtaccagcagacaaagagttccgccttagtaattcagtcttatatccggggttggaaggctcgaaaaattctgcgggaactgaagcatcaaaagcgctgtaaggaagcagtcacgaccattgctgcatattggcatgggacccaggctcgaagggaattgaaacgcttgaaggaggaggctaggcgtaagcatgcagttgctgtcatttgggcttactggcttggactgaaggtacgtagagaatacaggaaattcttcagagccaatgctggaaagaaaatctatgagtttacgcttcagagaattgtgcaaaaatacttcttggaaatgaaaaataagatgccttccttatctccaatagacaagaattggccctcaagaccttacttattcttggattctactcacaaggagctaaaaaggattttccacttgtggaggtgtaaaaaatacagggaccaattcacagaccagcagaaacttatttatgaagagaaactagaagccagtgaactcttcaaagacaagaaggctttatacccatctagtgttgggcgaccatttcaaggggcttacctggaaatcaacaagaaccccaagtataagaaactcaaagatgccattgaagaaaagatcatcattgctgaagtcgtgaacaaaattaaccgtgctaatgggaagagtacatctcggattttcctcttaacaaacaataatctccttcttgctgaccaaaagtctggacaaatcaagtcagaggttccactggtggatgtgaccaaggtatcaatgagctcacaaaatgatggcttcttcgccgtccacctcaaagagggctcagaagcagctagtaaaggagactttctcttcagcagtgatcacctgattgaaatggccaccaagctctatcgcacaactctcagccaaaccaaacagaagctcaatattgagatttccgatgagttcctggtacagttcagacaggacaaagtatgtgtgaagtttattcagggaaaccagaaaaatgggagtgtcccaacatgtaaacgaaaaaacaaccgtctccttgaagttgctgtcccttaactggcgcctcctctctactttcatggacttgttcctttgtaatagtgcaatttggttttgttttatttggggttcattgtatgtttgggaatcaccaaaggcttttagagttctttggcaaaataaaaatatttgactaatcaatttttattattggaatagttttaacctttcaaatacatgttctgtcctggagcaggattgtagaaactaacagtgtctattttcatgtctgatgtgttcttcctttagtcatcatgttaggtctgtgtaccctaaatcagcatattactcataaatcattaattaatataagcataggaaatggtcttaaaagatactgcattcattcatcagatatttattccatgcctactctatgctaggcactgtgctagatggtatgaaaacttattaggaacctttttgtttttgagaccattgcattctggctggtttgtgctggtttaacgacatctaagaaggtttagaaatggtgagaccaaaacaataactgttaatgatggacagcattattaggaaccctgtagtatgatatttaacaatataggcttcaagaagggctggtcctaagagggggcagaaatgaatgaccaggttaaatccctctacatgtggtttctgtttgaaaaaaagaaaactgacatttgaacaggacttttaatttgtttaaaactctggtaattacttgtaacagtagaaaatagaagtcattcttattttagaaaaagtgacagaagcagtccagtaagattatatgtttctgtttctggtaaataccatatatgatcctcgaaatgataatatctccagaatattgttttcacccaaatttgagtagatattttaaacacctaacaaagtaaagggctaaaagccattcagatagcagtaaaacattctgtatgatgtgcaataaaacatccaagatcttttttgaaagttttatttataatatacatttttgtatgagaaaggtgattggtacagggtgcctattttagtcatggatcaaaatttgtgtaacttgcagggctttctttctttttcttcaaatttacaagggttcattttggaaactacattttaaactttggaatcaaattgtttcttatttgggaggataatgtatatacattggtattatgttaaataataaaattgttctaatttggtgccatttcctg

SEQ ID NO: 389482 - DNA, 4620 bp, Homo sapiens
ggaaaaatagaggacagtacgcttgtcatgtcctatgtggcagctggttgtggaaaaggagcaaagttaatcaagtaagaacagcttttacagtccaacccggtcctggaagcttttggaaatgccaaaactgtaaggaatgacaactcctctagatttggcaaatatatggatattgaatttgactttaaaggcgatccactaggaggagtaataagtaactatcttttagagaaatctcgggttgttaaacagccaagaggtgaaagaaacttccatgtgttctatcagctgctctctggtgcctctgaagagctcctcaataaacttaagcttgagagggatttcagcaggtataactacctgagtctggattcggccaaagtgaatggagtggatgatgcagcaaattttagaaccgtgcggaatgccatgcagattgtgggctttatggatcatgaagctgagtctgtcttggcggtggtggcagcagtgttgaaactggggaacattgagttcaagcccgaatctcgagtgaatggtctagatgaaagcaaaatcaaagataaaaatgagttaaaagaaatttgtgaattgaccggcattgatcaatcagttctagaacgagcattcagtttccgaacagttgaggccaaacaggagaaagtttcaactacactgaatgtggctcaggcttattatgcccgtgatgctctggctaaaaacctctacagcaggttgttttcatggttggtaaatcgaatcaatgaaagcattaaggcacaaacaaaagtgagaaagaaggtcatgggtgttctggacatttatggctttgagattttcgaggacaacagctttgagcagttcattattaattattgtaacgaaaagctgcaacaaatcttcattgaacttactcttaaagaagagcaggaggagtatatacgggaggatatagaatggactcacattgactacttcaataatgctatcatttgtgacctaatagaaaataacacaaatggaatcctggccatgctggatgaagagtgcctcagacctggcacagtcactgatgagaccttcttagaaaagctgaaccaagtatgtgccacccaccagcattttgaaagcaggatgagcaagtgctctcggttcctcaatgacacgtctctgcctcacagctgcttcaggatccagcattatgctggaaaggtgctgtaccaggtggaaggattcgttgacaaaaacaatgaccttctctatcgagacctgtcccaagccatgtggaaggccagccatgccctcatcaagtctttgttccccgaagggaatcccgccaagatcaacctgaaaaggcctcctacagcaggctcacagttcaaggcatccgtggccactctgatgaaaaacctacagaccaagaacccaaactatattaggtgtatcaaaccgaatgataaaaaagcagcacacatcttcaacgaggctctagtgtgtcatcagatcaggtacctggggcttttggagaacgtccgagtgcggagggcaggctacgccttcaggcaggcctatgaaccttgcctagaaagatacaaaatgctttgtaaacaaacatggcctcattggaaaggaccagccaggtctggtgtggaggtcctatttaatgaattagaaattcccgtggaagaatactcctttggtagatcaaagatattcatccgaaacccaagaacattattcaaattagaagacctgaggaagcaacgcctggaggacttggccactctcattcagaagatatatcgggggtggaaatgccgcacacacttcctgctaatgaaaaaaagccaaattgtgattgccgcctggtacaggagatatgcgcaacaaaagaggtaccagcagacaaagagttccgccttagtaattcagtcttatatccggggttggaaggctcgaaaaattctgcgggaactgaagcatcaaaagcgctgtaaggaagcagtcacgaccattgctgcatattggcatgggacccaggtacgtagagaatacaggaaattcttcagagccaatgctggaaagaaaatctatgagtttacgcttcagagaattgtgcaaaaatacttcttggaaatgaaaaataagatgccttccttatctccaatagacaagaattggccctcaagaccttacttattcttggattctactcacaaggagctaaaaaggattttccacttgtggaggtgtaaaaaatacagggaccaattcacagaccagcagaaacttatttatgaagagaaactagaagccagtgaactcttcaaagacaagaaggctttatacccatctagtgttgggcgaccatttcaaggggcttacctggaaatcaacaagaaccccaagtataagaaactcaaagatgccattgaagaaaagatcatcattgctgaagtcgtgaacaaaattaaccgtgctaatgggaagagtacatctcggattttcctcttaacaaacaataatctccttcttgctgaccaaaagtctggacaaatcaagtcagaggttccactggtggatgtgaccaaggtatcaatgagctcacaaaatgatggcttcttcgccgtccacctcaaagagggctcagaagcagctagtaaaggagactttctcttcagcagtgatcacctgattgaaatggccaccaagctctatcgcacaactctcagccaaaccaaacagaagctcaatattgagatttccgatgagttcctggtacagttcagacaggacaaagtatgtgtgaagtttattcagggaaaccagaaaaatgggagtgtcccaacatgtaaacgaaaaaacaaccgtctccttgaagttgctgtcccttaactggcgcctcctctctactttcatggacttgttcctttgtaatagtgcaatttggttttgttttatttggggttcattgtatgtttgggaatcaccaaaggcttttagagttctttggcaaaataaaaatatttgactaatcaatttttattattggaatagttttaacctttcaaatacatgttctgtcctggagcaggattgtagaaactaacagtgtctattttcatgtctgatgtgttcttcctttagtcatcatgttaggtctgtgtaccctaaatcagcatattactcataaatcattaattaatataagcataggaaatggtcttaaaagatactgcattcattcatcagatatttattccatgcctactctatgctaggcactgtgctagatggtatgaaaacttattaggaacctttttgtttttgagaccattgcattctggctggtttgtgctggtttaacgacatctaagaaggtttagaaatggtgagaccaaaacaataactgttaatgatggacagcattattaggaaccctgtagtatgatatttaacaatataggcttcaagaagggctggtcctaagagggggcagaaatgaatgaccaggttaaatccctctacatgtggtttctgtttgaaaaaaagaaaactgacatttgaacaggacttttaatttgtttaaaactctggtaattacttgtaacagtagaaaatagaagtcattcttattttagaaaaagtgacagaagcagtccagtaagattatatgtttctgtttctggtaaataccatatatgatcctcgaaatgataatatctccagaatattgttttcacccaaatttgagtagatattttaaacacctaacaaagtaaagggctaaaagccattcagatagcagtaaaacattctgtatgatgtgcaataaaaaggtgattggtacagggtgcctattttagtcatggatcaaaatttgtgtaacttgcagggctttctttctttttcttcaaatttacaagggttcattttggaaactacattttaaactttggaatcaaattgtttcttatttgggaggataatgtatatacattggtattatgttaaataataaaattgttctaatttggtgccatttcctgaatcacaactgtatttttgtatctcaagctattttcatatgttatgtgtcaatgtatcatctctcagaaaggttttacaatccaaacattatatgttctctgtgtaactgaatttcacttatcttttataaaccagaaacattaattgaaaatattttctggggattttctcttgacttgtatttttaaaaattgctcacataaagaagttctcagaagtctttgtgtttattggtgcaggtagaggatgtaattacttagattcttcttgccttgtgcctaaagtggtagattaatagttcctgatactggtgagtagaaatttgggaatgagagggtgtggtgttttaaataacatgcagtatgttcacattgttcagcatgtaagtaagtgttaaaatatatacattacaaattctccatcctatcaaccagctatctgcttagttcccaccctccccgaaacattaacgcattgttgttagttgcttttgtattactttgtccatatgtttgcaaaaggaaatcaaaatagattcttacgttcttctgctttagtagacaaaag

SEQ ID NO: 389483 - DNA, 1909 bp, Homo sapiens
gttcggtctaagatcagtgtctgggtcggcggtcaaaacaaaatgtggcatgtcagtgtaaaaaatacagggaccaattcacagaccagcagaaacttatttatgaagagaaactagaagccagtgaactcttcaaagacaagaaggctttatacccatctagtgttgggcgaccatttcaaggggcttacctggaaatcaacaagaaccccaagtataagaaactcaaagatgccattgaagaaaagatcatcattgctgaagtcgtgaacaaaattaaccgtgctaatgggaagagtacatctcggattttcctcttaacaaacaataatctccttcttgctgaccaaaagtctggacaaatcaagtcagaggttccactggtggatgtgaccaaggtatcaatgagctcacaaaatgatggcttcttcgccgtccacctcaaagagggctcagaagcagctagtaaaggagactttctcttcagcagtgatcacctgattgaaatggccaccaagctctatcgcacaactctcagccaaaccaaacagaagctcaatattgagatttccgatgagttcctggtacagttcagacaggacaaagtatgtgtgaagtttattcagggaaaccagaaaaatgggagtgtcccaacatgtaaacgaaaaaacaaccgtctccttgaagttgctgtcccttaactggcgcctcctctctactttcatggacttgttcctttgtaatagtgcaatttggttttgttttatttggggttcattgtatgtttgggaatcaccaaaggcttttagagttctttggcaaaataaaaatatttgactaatcaatttttattattggaatagttttaacctttcaaatacatgttctgtcctggagcaggattgtagaaactaacagtgtctattttcatgtctgatgtgttcttcctttagtcatcatgttaggtctgtgtaccctaaatcagcatattactcataaatcattaattaatataagcataggaaatggtcttaaaagatactgcattcattcatcagatatttattccatgcctactctatgctaggcactgtgctagatggtatgaaaacttattaggaacctttttgtttttgagaccattgcattctggctggtttgtgctggtttaacgacatctaagaaggtttagaaatggtgagaccaaaacaataactgttaatgatggacagcattattaggaaccctgtagtatgatatttaacaatataggcttcaagaagggctggtcctaagagggggcagaaatgaatgaccaggttaaatccctctacatgtggtttctgtttgaaaaaaagaaaactgacatttgaacaggacttttaatttgtttaaaactctggtaattacttgtaacagtagaaaatagaagtcattcttattttagaaaaagtgacagaagcagtccagtaagattatatgtttctgtttctggtaaataccatatatgatcctcgaaatgataatatctccagaatattgttttcacccaaatttgagtagatattttaaacacctaacaaagtaaagggctaaaagccattcagatagcagtaaaacattctgtatgatgtgcaataaaacatccaagatcttttttgaaagttttatttataatatacatttttgtatgagaaaggtgattggtacagggtgcctattttagtcatggatcaaaatttgtgtaacttgcagggctttctttctttttcttcaaatttacaagggttcattttggaaactacattttaaactttggaatcaaattgtttcttatttgggaggataatgtatatacattggtattatgttaaataataaaattgttctaatttggtgccatttcctg

SEQ ID NO: 389484 - DNA, 4052 bp, Homo sapiens
ggaaaaatagaggacagtacgcttgtcatgtcctatgtggcagctggttgtggaaaaggagcaaagttaatcaagtaagaacagcttttacagtccaacccggtcctggaagcttttggaaatgccaaaactgtaaggaatgacaactcctctagatttggcaaatatatggatattgaatttgactttaaaggcgatccactaggaggagtaataagtaactatcttttagagaaatctcgggttgttaaacagccaagaggtgaaagaaacttccatgtgttctatcagctgctctctggtgcctctgaagagctcctcaataaacttaagcttgagagggatttcagcaggtataactacctgagtctggattcggccaaagtgaatggagtggatgatgcagcaaattttagaaccgtgcggaatgccatgcagattgtgggctttatggatcatgaagctgagtctgtcttggcggtggtggcagcagtgttgaaactggggaacattgagttcaagcccgaatctcgagtgaatggtctagatgaaagcaaaatcaaagataaaaatgagttaaaagaaatttgtgaattgaccggcattgatcaatcagttctagaacgagcattcagtttccgaacagttgaggccaaacaggagaaagtttcaactacactgaatgtggctcaggcttattatgcccgtgatgctctggctaaaaacctctacagcaggttgttttcatggttggtaaatcgaatcaatgaaagcattaaggcacaaacaaaagtgagaaagaaggtcatgggtgttctggacatttatggctttgagattttcgaggacaacagctttgagcagttcattattaattattgtaacgaaaagctgcaacaaatcttcattgaacttactcttaaagaagagcaggaggagtatatacgggaggatatagaatggactcacattgactacttcaataatgctatcatttgtgacctaatagaaaataacacaaatggaatcctggccatgctggatgaagagtgcctcagacctggcacagtcactgatgagaccttcttagaaaagctgaaccaagtatgtgccacccaccagcattttgaaagcaggatgagcaagtgctctcggttcctcaatgacacgtctctgcctcacagctgcttcaggatccagcattatgctggaaaggtgctgtaccaggtggaaggattcgttgacaaaaacaatgaccttctctatcgagacctgtcccaagccatgtggaaggccagccatgccctcatcaagtctttgttccccgaagggaatcccgccaagatcaacctgaaaaggcctcctacagcaggctcacagttcaaggcatccgtggccactctgatgaaaaacctacagaccaagaacccaaactatattaggtgtatcaaaccgaatgataaaaaagcagcacacatcttcaacgaggctctagtgtgtcatcagatcaggtacctggggcttttggagaacgtccgagtgcggagggcaggctacgccttcaggcaggcctatgaaccttgcctagaaagatacaaaatgctttgtaaacaaacatggcctcattggaaaggaccagccaggtctggtgtggaggtcctatttaatgaattagaaattcccgtggaagaatactcctttggtagatcaaagatattcatccgaaacccaagaacattattcaaattagaagacctgaggaagcaacgcctggaggacttggccactctcattcagaagatatatcgggggtggaaatgccgcacacacttcctgctaatgaaaaaaagccaaattgtgattgccgcctggtacaggagatatgcgcaacaaaagaggtaccagcagacaaagagttccgccttagtaattcagtcttatatccggggttggaaggctcgaaaaattctgcgggaactgaagcatcaaaagcgctgtaaggaagcagtcacgaccattgctgcatattggcatgggacccaggtacgtagagaatacaggaaattcttcagagccaatgctggaaagaaaatctatgagtttacgcttcagagaattgtgcaaaaatacttcttggaaatgaaaaataagatgccttccttatctccaatagacaagaattggccctcaagaccttacttattcttggattctactcacaaggagctaaaaaggattttccacttgtggaggtgtaaaaaatacagggaccaattcacagaccagcagaaacttatttatgaagagaaactagaagccagtgaactcttcaaagacaagaaggctttatacccatctagtgttgggcgaccatttcaaggggcttacctggaaatcaacaagaaccccaagtataagaaactcaaagatgccattgaagaaaagatcatcattgctgaagtcgtgaacaaaattaaccgtgctaatgggaagagtacatctcggattttcctcttaacaaacaataatctccttcttgctgaccaaaagtctggacaaatcaagtcagaggttccactggtggatgtgaccaaggtatcaatgagctcacaaaatgatggcttcttcgccgtccacctcaaagagggctcagaagcagctagtaaaggagactttctcttcagcagtgatcacctgattgaaatggccaccaagctctatcgcacaactctcagccaaaccaaacagaagctcaatattgagatttccgatgagttcctggtacagttcagacaggacaaagtatgtgtgaagtttattcagggaaaccagaaaaatgggagtgtcccaacatgtaaacgaaaaaacaaccgtctccttgaagttgctgtcccttaactggcgcctcctctctactttcatggacttgttcctttgtaatagtgcaatttggttttgttttatttggggttcattgtatgtttgggaatcaccaaaggcttttagagttctttggcaaaataaatgttctgtcctggagcaggattgtagaaactaacagtgtctattttcatgtctgatgtgttcttcctttagtcatcatgttaggtctgtgtaccctaaatcagcatattactcataaatcattaattaatataagcataggaaatggtcttaaaagatactgcattcattcatcagatatttattccatgcctactctatgctaggcactgtgctagatggtatgaaaacttattaggaacctttttgtttttgagaccattgcattctggctggtttgtgctggtttaacgacatctaagaaggtttagaaatggtgagaccaaaacaataactgttaatgatggacagcattattaggaaccctgtagtatgatatttaacaatataggcttcaagaagggctggtcctaagagggggcagaaatgaatgaccaggttaaatccctctacatgtggtttctgtttgaaaaaaagaaaactgacatttgaacaggacttttaatttgtttaaaactctggtaattacttgtaacagtagaaaatagaagtcattcttattttagaaaaagtgacagaagcagtccagtaagattatatgtttctgtttctggtaaataccatatatgatcctcgaaatgataatatctccagaatattgttttcacccaaatttgagtagatattttaaacacctaacaaagtaaagggctaaaagccattcagatagcagtaaaacattctgtatgatgtgcaataaaacatccaagatcttttttgaaagttttatttataatatacatttttgtatgagaaaggtgattggtacagggtgcctattttagtcatggatcaaaatttgtgtaacttgcagggctttctttctttttcttcaaatttacaagggttcattttggaaactacattttaaactttggaatcaaattgtttcttatttgggaggataatgtatatacattggtattatgttaaataataaaattgttctaatttggtgccatttcctg

SEQ ID NO: 389485 - DNA, 3057 bp, Homo sapiens
ggaaaaatagaggacagtacgcttgtcatgtcctatgtggcagctggttgtggaaaaggagcaaagttaatcaagtaagaacagcttttacagtccaacccggtcctggaagcttttggaaatgccaaaactgtaaggaatgacaactcctctagatttggcaaatatatggatattgaatttgactttaaaggcgatccactaggaggagtaataagtaactatcttttagagaaatctcgggttgttaaacagccaagaggtgaaagaaacttccatgtgttctatcagctgctctctggtgcctctgaagagctcctcaataaacttaagcttgagagggatttcagcaggtataactacctgagtctggattcggccaaagtgaatggagtggatgatgcagcaaattttagaaccgtgcggaatgccatgcagattgtgggctttatggatcatgaagctgagtctgtcttggcggtggtggcagcagtgttgaaactggggaacattgagttcaagcccgaatctcgagtgaatggtctagatgaaagcaaaatcaaagataaaaatgagttaaaagaaatttgtgaattgaccggcattgatcaatcagttctagaacgagcattcagtttccgaacagttgaggccaaacaggagaaagtttcaactacactgaatgtggctcaggcttattatgcccgtgatgctctggctaaaaacctctacagcaggttgttttcatggttggtaaatcgaatcaatgaaagcattaaggcacaaacaaaagtgagaaagaaggtcatgggtgttctggacatttatggctttgagattttcgaggacaacagctttgagcagttcattattaattattgtaacgaaaagctgcaacaaatcttcattgaacttactcttaaagaagagcaggaggagtatatacgggaggatatagaatggactcacattgactacttcaataatgctatcatttgtgacctaatagaaaataacacaaatggaatcctggccatgctggatgaagagtgcctcagacctggcacagtcactgatgagaccttcttagaaaagctgaaccaagtatgtgccacccaccagcattttgaaagcaggatgagcaagtgctctcggttcctcaatgacacgtctctgcctcacagctgcttcaggatccagcattatgctggaaaggtgctgtaccaggtggaaggattcgttgacaaaaacaatgaccttctctatcgagacctgtcccaagccatgtggaaggccagccatgccctcatcaagtctttgttccccgaagggaatcccgccaagatcaacctgaaaaggcctcctacagcaggctcacagttcaaggcatccgtggccactctgatgaaaaacctacagaccaagaacccaaactatattaggtgtatcaaaccgaatgataaaaaagcagcacacatcttcaacgaggctctagtgtgtcatcagatcaggtacctggggcttttggagaacgtccgagtgcggagggcaggctacgccttcaggcaggcctatgaaccttgcctagaaagatacaaaatgctttgtaaacaaacatggcctcattggaaaggaccagccaggtctggtgtggaggtcctatttaatgaattagaaattcccgtggaagaatactcctttggtagatcaaagatattcatccgaaacccaagaacattattcaaattagaagacctgaggaagcaacgcctggaggacttggccactctcattcagaagatatatcgggggtggaaatgccgcacacacttcctgctaatgaaaaaaagccaaattgtgattgccgcctggtacaggagatatgcgcaacaaaagaggtaccagcagacaaagagttccgccttagtaattcagtcttatatccggggttggaaggctcgaaaaattctgcgggaactgaagcatcaaaagcgctgtaaggaagcagtcacgaccattgctgcatattggcatgggacccaggtacgtagagaatacaggaaattcttcagagccaatgctggaaagaaaatctatgagtttacgcttcagagaattgtgcaaaaatacttcttggaaatgaaaaataagatgccttccttatctccaatagacaagaattggccctcaagaccttacttattcttggattctactcacaaggagctaaaaaggattttccacttgtggaggtgtaaaaaatacagggaccaattcacagaccagcagaaacttatttatgaagagaaactagaagccagtgaactcttcaaagacaagaaggctttatacccatctagtgttgggcgaccatttcaaggggcttacctggaaatcaacaagaaccccaagtataagaaactcaaagatgccattgaagaaaagatcatcattgctgaagtcgtgaacaaaattaaccgtgctaatgggaagagtacatctcggattttcctcttaacaaacaataatctccttcttgctgaccaaaagtctggacaaatcaagtcagaggttccactggtggatgtgaccaaggtatcaatgagctcacaaaatgatggcttcttcgccgtccacctcaaagagggctcagaagcagctagtaaaggagactttctcttcagcagtgatcacctgattgaaatggccaccaagctctatcgcacaactctcagccaaaccaaacagaagctcaatattgagatttccgatgagtacgttcatgtattgtttgaaaaccctttttctctttcagcttttttgttttagttcagctctcgatctcattcattaatacaactacttattaagtaccaggtatgtgtctagtagttgttccacatgataaatgggcagtgaatgacactgaccaagtctccaacctcatgtacctgacatcctagtggaagagaccagtatgtacaaataaaatgatgaaatagttgataagattttggctaacaagtgtttatggaggaaaaaaagggttaagagtca

SEQ ID NO: 389486 - DNA, 3978 bp, Homo sapiens
ggaaaaatagaggacagtacgcttgtcatgtcctatgtggcagctggttgtggaaaaggagcaaagttaatcaagtaagaacagcttttacagtccaacccggtcctggaagcttttggaaatgccaaaactgtaaggaatgacaactcctctagatttggcaaatatatggatattgaatttgactttaaaggcgatccactaggaggagtaataagtaactatcttttagagaaatctcgggttgttaaacagccaagaggtgaaagaaacttccatgtgttctatcagctgctctctggtgcctctgaagagctcctcaataaacttaagcttgagagggatttcagcaggtataactacctgagtctggattcggccaaagtgaatggagtggatgatgcagcaaattttagaaccgtgcggaatgccatgcagattgtgggctttatggatcatgaagctgagtctgtcttggcggtggtggcagcagtgttgaaactggggaacattgagttcaagcccgaatctcgagtgaatggtctagatgaaagcaaaatcaaagataaaaatgagttaaaagaaatttgtgaattgaccggcattgatcaatcagttctagaacgagcattcagtttccgaacagttgaggccaaacaggagaaagtttcaactacactgaatgtggctcaggcttattatgcccgtgatgctctggctaaaaacctctacagcaggttgttttcatggttggtaaatcgaatcaatgaaagcattaaggcacaaacaaaagtgagaaagaaggtcatgggtgttctggacatttatggctttgagattttcgaggacaacagctttgagcagttcattattaattattgtaacgaaaagctgcaacaaatcttcattgaacttactcttaaagaagagcaggaggagtatatacgggaggatatagaatggactcacattgactacttcaataatgctatcatttgtgacctaatagaaaataacacaaatggaatcctggccatgctggatgaagagtgcctcagacctggcacagtcactgatgagaccttcttagaaaagctgaaccaagtatgtgccacccaccagcattttgaaagcaggatgagcaagtgctctcggttcctcaatgacacgtctctgcctcacagctgcttcaggatccagcattatgctggaaaggtgctgtaccaggtggaaggattcgttgacaaaaacaatgaccttctctatcgagacctgtcccaagccatgtggaaggccagccatgccctcatcaagtctttgttccccgaagggaatcccgccaagatcaacctgaaaaggcctcctacagcaggctcacagttcaaggcatccgtggccactctgatgaaaaacctacagaccaagaacccaaactatattaggtgtatcaaaccgaatgataaaaaagcagcacacatcttcaacgaggctctagtgtgtcatcagatcaggtacctggggcttttggagaacgtccgagtgcggagggcaggctacgccttcaggcaggcctatgaaccttgcctagaaagatacaaaatgctttgtaaacaaacatggcctcattggaaaggaccagccaggtctggtgtggaggtcctatttaatgaattagaaattcccgtggaagaatactcctttggtagatcaaagatattcatccgaaacccaagaacattattcaaattagaagacctgaggaagcaacgcctggaggacttggccactctcattcagaagatatatcgggggtggaaatgccgcacacacttcctgctaatgaaaaaaagccaaattgtgattgccgcctggtacaggagatatgcgcaacaaaagaggtaccagcagacaaagagttccgccttagtaattcagtcttatatccggggttggaaggctcgaaaaattctgcgggaactgaagcatcaaaagcgctgtaaggaagcagtcacgaccattgctgcatattggcatgggacccaggtacgtagagaatacaggaaattcttcagagccaatgctggaaagaaaatctatgagtttacgcttcagagaattgtgcaaaaatacttcttggaaatgaaaaataagatgccttccttatctccaatagacaagaattggccctcaagaccttacttattcttggattctactcacaaggagctaaaaaggattttccacttgtggaggtgtaaaaaatacagggaccaattcacagaccagcagaaacttatttatgaagagaaactagaagccagtgaactcttcaaagacaagaaggctttatacccatctagtgttgggcgaccatttcaaggggcttacctggaaatcaacaagaaccccaagtataagaaactcaaagatgccattgaagaaaagatcatcattgctgaagtcgtgaacaaaattaaccgtgctaatgggaagagtacatctcggattttcctcttaacaaacaataatctccttcttgctgaccaaaagtctggacaaatcaagtcagaggttccactggtggatgtgaccaaggtatcaatgagctcacaaaatgatggcttcttcgccgtccacctcaaagaggttcctggtacagttcagacaggacaaagtatgtgtgaagtttattcagggaaaccagaaaaatgggagtgtcccaacatgtaaacgaaaaaacaaccgtctccttgaagttgctgtcccttaactggcgcctcctctctactttcatggacttgttcctttgtaatagtgcaatttggttttgttttatttggggttcattgtatgtttgggaatcaccaaaggcttttagagttctttggcaaaataaaaatatttgactaatcaatttttattattggaatagttttaacctttcaaatacatgttctgtcctggagcaggattgtagaaactaacagtgtctattttcatgtctgatgtgttcttcctttagtcatcatgttaggtctgtgtaccctaaatcagcatattactcataaatcattaattaatataagcataggaaatggtcttaaaagatactgcattcattcatcagatatttattccatgcctactctatgctaggcactgtgctagatggtatgaaaacttattaggaacctttttgtttttgagaccattgcattctggctggtttgtgctggtttaacgacatctaagaaggtttagaaatggtgagaccaaaacaataactgttaatgatggacagcattattaggaaccctgtagtatgatatttaacaatataggcttcaagaagggctggtcctaagagggggcagaaatgaatgaccaggttaaatccctctacatgtggtttctgtttgaaaaaaagaaaactgacatttgaacaggacttttaatttgtttaaaactctggtaattacttgtaacagtagaaaatagaagtcattcttattttagaaaaagtgacagaagcagtccagtaagattatatgtttctgtttctggtaaataccatatatgatcctcgaaatgataatatctccagaatattgttttcacccaaatttgagtagatattttaaacacctaacaaagtaaagggctaaaagccattcagatagcagtaaaacattctgtatgatgtgcaataaaacatccaagatcttttttgaaagttttatttataatatacatttttgtatgagaaaggtgattggtacagggtgcctattttagtcatggatcaaaatttgtgtaacttgcagggctttctttctttttcttcaaatttacaagggttcattttggaaactacattttaaactttggaatcaaattgtttcttatttgggaggataatgtatatacattggtattatgttaaataataaaattgttctaatttggtgccatttcctg

SEQ ID NO: 389487 - DNA, 2814 bp, Homo sapiens
ggaaaaatagaggacagtacgcttgtcatgtcctatgtggcagctggttgtggaaaaggagcaaagttaatcaagtaagaacagcttttacagtccaacccggtcctggaagcttttggaaatgccaaaactgtaaggaatgacaactcctctagatttggcaaatatatggatattgaatttgactttaaaggcgatccactaggaggagtaataagtaactatcttttagagaaatctcgggttgttaaacagccaagaggtgaaagaaacttccatgtgttctatcagctgctctctggtgcctctgaagagctcctcaataaacttaagcttgagagggatttcagcaggtataactacctgagtctggattcggccaaagtgaatggagtggatgatgcagcaaattttagaaccgtgcggaatgccatgcagattgtgggctttatggatcatgaagctgagtctgtcttggcggtggtggcagcagtgttgaaactggggaacattgagttcaagcccgaatctcgagtgaatggtctagatgaaagcaaaatcaaagataaaaatgagttaaaagaaatttgtgaattgaccggcattgatcaatcagttctagaacgagcattcagtttccgaacagttgaggccaaacaggagaaagtttcaactacactgaatgtggctcaggcttattatgcccgtgatgctctggctaaaaacctctacagcaggttgttttcatggttggtaaatcgaatcaatgaaagcattaaggcacaaacaaaagtgagaaagaaggtcatgggtgttctggacatttatggctttgagattttcgaggacaacagctttgagcagttcattattaattattgtaacgaaaagctgcaacaaatcttcattgaacttactcttaaagaagagcaggaggagtatatacgggaggatatagaatggactcacattgactacttcaataatgctatcatttgtgacctaatagaaaataacacaaatggaatcctggccatgctggatgaagagtgcctcagacctggcacagtcactgatgagaccttcttagaaaagctgaaccaagtatgtgccacccaccagcattttgaaagcaggatgagcaagtgctctcggttcctcaatgacacgtctctgcctcacagctgcttcaggatccagcattatgctggaaaggtgctgtaccaggtggaaggattcgttgacaaaaacaatgaccttctctatcgagacctgtcccaagccatgtggaaggccagccatgccctcatcaagtctttgttccccgaagggaatcccgccaagatcaacctgaaaaggcctcctacagcaggctcacagttcaaggcatccgtggccactctgatgaaaaacctacagaccaagaacccaaactatattaggtgtatcaaaccgaatgataaaaaagcagcacacatcttcaacgaggctctagtgtgtcatcagatcaggtacctggggcttttggagaacgtccgagtgcggagggcaggctacgccttcaggcaggcctatgaaccttgcctagaaagatacaaaatgctttgtaaacaaacatggcctcattggaaaggaccagccaggtctggtgtggaggtcctatttaatgaattagaaattcccgtggaagaatactcctttggtagatcaaagatattcatccgaaacccaagaacattattcaaattagaagacctgaggaagcaacgcctggaggacttggccactctcattcagaagatatatcgggggtggaaatgccgcacacacttcctgctaatgaaaaaaagccaaattgtgattgccgcctggtacaggagatatgcgcaacaaaagaggtaccagcagacaaagagttccgccttagtaattcagtcttatatccggggttggaaggctcgaaaaattctgcgggaactgaagcatcaaaagcgctgtaaggaagcagtcacgaccattgctgcatattggcatgggacccaggtacgtagagaatacaggaaattcttcagagccaatgctggaaagaaaatctatgagtttacgcttcagagaattgtgcaaaaatacttcttggaaatgaaaaataagatgccttccttatctccaatagacaagaattggccctcaagaccttacttattcttggattctactcacaaggagctaaaaaggattttccacttgtggaggtgtaaaaaatacagggaccaattcacagaccagcagaaacttatttatgaagagaaactagaagccagtgaactcttcaaagacaagaaggctttatacccatctagtgttgggcgaccatttcaaggggcttacctggaaatcaacaagaaccccaagtataagaaactcaaagatgccattgaagaaaagatcatcattgctgaagtcgtgaacaaaattaaccgtgctaatgggaagagtacatctcggattttcctcttaacaaacaataatctccttcttgctgaccaaaagtctggacaaatcaagtcagaggttccactggtggatgtgaccaaggtatcaatgagctcacaaaatgatggcttcttcgccgtccacctcaaagagggctcagaagcagctagtaaaggagactttctcttcagcagtgatcacctgattgaaatggtcgccaatccgcggattggcgaccatttcaataaacagttttcccaaggcaaatctcttcagctaatcatacaatttatattccgtgctaaactaatgggctcttac

SEQ ID NO: 389488 - DNA, 612 bp, Homo sapiens
cggattggcgaccatttcaatatcaaccattaaccttccctctacacttatcgtcttcacaattctaattctactgactatccttgaaatggtcgccaatccgctgttgggcgaccatttcaaggggcttacctggaaatcaacaagaaccccaagtataagaaactcaaagatgccattgaagaaaagatcatcattgctgaagtcgtgaacaaaattaaccgtgctaatgggaagagtacatctcggattttcctcttaacaaacaataatctccttcttgctgaccaaaagtctggacaaatcaagtcagaggttccactggtggatgtgaccaaggtatcaatgagctcacaaaatgatggcttcttcgccgtccacctcaaagagggctcagaagcagctagtaaaggagactttctcttcagcagtgatcacctgattgaaatggtcgccaatccgcggattggcgaccatttcaagcttttcaattggcaatacttagaaccttactgtagtgacctgattttaaataccatattatatttactaagttaagagctagtttttactctcttccataatttcattacatgaatgtaagatgatggc

SEQ ID NO: 389489 - DNA, 3006 bp, Homo sapiens
ggaaaaatagaggacagtacgcttgtcatgtcctatgtggcagctggttgtggaaaaggagcaaagttaatcaagtaagaacagcttttacagtccaacccggtcctggaagcttttggaaatgccaaaactgtaaggaatgacaactcctctagatttggcaaatatatggatattgaatttgactttaaaggcgatccactaggaggagtaataagtaactatcttttagagaaatctcgggttgttaaacagccaagaggtgaaagaaacttccatgtgttctatcagctgctctctggtgcctctgaagagctcctcaataaacttaagcttgagagggatttcagcaggtataactacctgagtctggattcggccaaagtgaatggagtggatgatgcagcaaattttagaaccgtgcggaatgccatgcagattgtgggctttatggatcatgaagctgagtctgtcttggcggtggtggcagcagtgttgaaactggggaacattgagttcaagcccgaatctcgagtgaatggtctagatgaaagcaaaatcaaagataaaaatgagttaaaagaaatttgtgaattgaccggcattgatcaatcagttctagaacgagcattcagtttccgaacagttgaggccaaacaggagaaagtttcaactacactgaatgtggctcaggcttattatgcccgtgatgctctggctaaaaacctctacagcaggttgttttcatggttggtaaatcgaatcaatgaaagcattaaggcacaaacaaaagtgagaaagaaggtcatgggtgttctggacatttatggctttgagattttcgaggacaacagctttgagcagttcattattaattattgtaacgaaaagctgcaacaaatcttcattgaacttactcttaaagaagagcaggaggagtatatacgggaggatatagaatggactcacattgactacttcaataatgctatcatttgtgacctaatagaaaataacacaaatggaatcctggccatgctggatgaagagtgcctcagacctggcacagtcactgatgagaccttcttagaaaagctgaaccaagtatgtgccacccaccagcattttgaaagcaggatgagcaagtgctctcggttcctcaatgacacgtctctgcctcacagctgcttcaggatccagcattatgctggaaaggtgctgtaccaggtggaaggattcgttgacaaaaacaatgaccttctctatcgagacctgtcccaagccatgtggaaggccagccatgccctcatcaagtctttgttccccgaagggaatcccgccaagatcaacctgaaaaggcctcctacagcaggctcacagttcaaggcatccgtggccactctgatgaaaaacctacagaccaagaacccaaactatattaggtgtatcaaaccgaatgataaaaaagcagcacacatcttcaacgaggctctagtgtgtcatcagatcaggtacctggggcttttggagaacgtccgagtgcggagggcaggctacgccttcaggcaggcctatgaaccttgcctagaaagatacaaaatgctttgtaaacaaacatggcctcattggaaaggaccagccaggtctggtgtggaggtcctatttaatgaattagaaattcccgtggaagaatactcctttggtagatcaaagatattcatccgaaacccaagaacattattcaaattagaagacctgaggaagcaacgcctggaggacttggccactctcattcagaagatatatcgggggtggaaatgccgcacacacttcctgctaatgaaaaaaagccaaattgtgattgccgcctggtacaggagatatgcgcaacaaaagaggtaccagcagacaaagagttccgccttagtaattcagtcttatatccggggttggaaggctcgaaaaattctgcgggaactgaagcatcaaaagcgctgtaaggaagcagtcacgaccattgctgcatattggcatgggacccaggtacgtagagaatacaggaaattcttcagagccaatgctggaaagaaaatctatgagtttacgcttcagagaattgtgcaaaaatacttcttggaaatgaaaaataagatgccttccttatctccaatagacaagaattggccctcaagaccttacttattcttggattctactcacaaggagctaaaaaggattttccacttgtggaggtgtaaaaaatacagggaccaattcacagaccagcagaaacttatttatgaagagaaactagaagccagtgaactcttcaaagacaagaaggctttatacccatctagtgttgggcgaccatttcaaggggcttacctggaaatcaacaagaaccccaagtataagaaactcaaagatgccattgaagaaaagatcatcattgctgaagtcgtgaacaaaattaaccgtgctaatgggaagtgcaggcgtgagccaccgcgcccagcctgttcagtggaatttaaacttgtacatatagaagtgagaattgaattcattcagagattcagctgccttatagtttctagtccttaaacttctaagctgttcaatgtgtaactagattgcattttaaggataacctgcaagatgtgtaatgcagttatgcaccacataatgacattttggtcagcaatggattgcacagagtgacggtggtcccctaagattgtaatggagctgagaaatgcctccgatatttggtgtcatagctgttagaaggaattaagctaacgttgtcgctacattgtgcttactcgttctgatggaaactctactaaatcgatttcttccaccatcgactccccctttcacccttatcgtctatctttcttttgctccaggttttctattggttccgctggcacagacacagagccccccacacatgacccgatccacatgccacagtcagatagataccattcaaatccg

SEQ ID NO: 389490 - DNA, 2794 bp, Homo sapiens
ggaaaaatagaggacagtacgcttgtcatgtcctatgtggcagctggttgtggaaaaggagcaaagttaatcaagtaagaacagcttttacagtccaacccggtcctggaagcttttggaaatgccaaaactgtaaggaatgacaactcctctagatttggcaaatatatggatattgaatttgactttaaaggcgatccactaggaggagtaataagtaactatcttttagagaaatctcgggttgttaaacagccaagaggtgaaagaaacttccatgtgttctatcagctgctctctggtgcctctgaagagctcctcaataaacttaagcttgagagggatttcagcaggtataactacctgagtctggattcggccaaagtgaatggagtggatgatgcagcaaattttagaaccgtgcggaatgccatgcagattgtgggctttatggatcatgaagctgagtctgtcttggcggtggtggcagcagtgttgaaactggggaacattgagttcaagcccgaatctcgagtgaatggtctagatgaaagcaaaatcaaagataaaaatgagttaaaagaaatttgtgaattgaccggcattgatcaatcagttctagaacgagcattcagtttccgaacagttgaggccaaacaggagaaagtttcaactacactgaatgtggctcaggcttattatgcccgtgatgctctggctaaaaacctctacagcaggttgttttcatggttggtaaatcgaatcaatgaaagcattaaggcacaaacaaaagtgagaaagaaggtcatgggtgttctggacatttatggctttgagattttcgaggacaacagctttgagcagttcattattaattattgtaacgaaaagctgcaacaaatcttcattgaacttactcttaaagaagagcaggaggagtatatacgggaggatatagaatggactcacattgactacttcaataatgctatcatttgtgacctaatagaaaataacacaaatggaatcctggccatgctggatgaagagtgcctcagacctggcacagtcactgatgagaccttcttagaaaagctgaaccaagtatgtgccacccaccagcattttgaaagcaggatgagcaagtgctctcggttcctcaatgacacgtctctgcctcacagctgcttcaggatccagcattatgctggaaaggtgctgtaccaggtggaaggattcgttgacaaaaacaatgaccttctctatcgagacctgtcccaagccatgtggaaggccagccatgccctcatcaagtctttgttccccgaagggaatcccgccaagatcaacctgaaaaggcctcctacagcaggctcacagttcaaggcatccgtggccactctgatgaaaaacctacagaccaagaacccaaactatattaggtgtatcaaaccgaatgataaaaaagcagcacacatcttcaacgaggctctagtgtgtcatcagatcaggtacctggggcttttggagaacgtccgagtgcggagggcaggctacgccttcaggcaggcctatgaaccttgcctagaaagatacaaaatgctttgtaaacaaacatggcctcattggaaaggaccagccaggtctggtgtggaggtcctatttaatgaattagaaattcccgtggaagaatactcctttggtagatcaaagatattcatccgaaacccaagaacattattcaaattagaagacctgaggaagcaacgcctggaggacttggccactctcattcagaagatatatcgggggtggaaatgccgcacacacttcctgctaatgaaaaaaagccaaattgtgattgccgcctggtacaggagatatgcgcaacaaaagaggtaccagcagacaaagagttccgccttagtaattcagtcttatatccggggttggaaggctcgaaaaattctgcgggaactgaagcatcaaaagcgctgtaaggaagcagtcacgaccattgctgcatattggcatgggacccaggtacgtagagaatacaggaaattcttcagagccaatgctggaaagaaaatctatgagtttacgcttcagagaattgtgcaaaaatacttcttggaaatgaaaaataagatgccttccttatctccaatagacaagaattggccctcaagaccttacttattcttggattctactcacaaggagctaaaaaggattttccacttgtggaggtgtaaaaaatacagggaccaattcacagaccagcagaaacttatttatgaagagaaactagaagccagtgaactcttcaaagacaagaaggctttatacccatctagtgttgggcgaccatttcaaggggcttacctggaaatcaacaagaaccccaagtataagaaactcaaagatgccattgaagaaaagatcatcattgctgaagtctgcaggcgtgagccaccgcgcccagcctgttcagtggaatttaaacttgtacatatagaagtgagaattgaattcattcagagattcagctgccttatagtttctagtccttaaacttctaagctgttcaatgtgtaactagattgcattttaaggataacctgcaagatgtgtaatgcagttatgcaccacataatgacattttggtcagcaatggattgcacagagtgacggtggtcccctaagattgtaatggagctgagaaattcttctgtctattgatgtcacaggtgttgtaatgttatgatgcaaggcactactcacatgtttg

SEQ ID NO: 389491 - DNA, 1564 bp, Homo sapiens
  misc_feature (1554)..(1554): n is a, c, g, or t
  misc_feature (1559)..(1559): n is a, c, g, or t
ggaaaaatagaggacagtacgcttgtcatgtcctatgtggcagctggttgtggaaaaggagcaaagttaatcaagtaagaacagcttttacagtccaacccggtcctggaagcttttggaaatgccaaaactgtaaggaatgacaactcctctagatttggcaaatatatggatattgaatttgactttaaaggcgatccactaggaggagtaataagtaactatcttttagagaaatctcgggttgttaaacagccaagaggtgaaagaaacttccatgtgttctatcagctgctctctggtgcctctgaagagctcctcaataaacttaagcttgagagggatttcagcaggtataactacctgagtctggattcggccaaagtgaatggagtggatgatgcagcaaattttagaaccgtgcggaatgccatgcagattgtgggctttatggatcatgaagctgagtctgtcttggcggtggtggcagcagtgttgaaactggggaacattgagttcaagcccgaatctcgagtgaatggtctagatgaaagcaaaatcaaagataaaaatgagttaaaagaaatttgtgaattgaccggcattgatcaatcagttctagaacgagcattcagtttccgaacagttgaggccaaacaggagaaagtttcaactacactgaatgtggctcaggcttattatgcccgtgatgctctggctaaaaacctctacagcaggttgttttcatggttggtaaatcgaatcaatgaaagcattaaggcacaaacaaaagtgagaaagaaggtcatgggtgttctggacatttatggctttgagattttcgaggacaacagctttgagcagttcattattaattattgtaacgaaaagctgcaacaaatcttcattgaacttactcttaaagaagagcaggaggagtatatacgggaggatatagaatggactcacattgactacttcaataatgctatcatttgtgacctaatagaaaataacacaaatggaatcctggccatgctggatgaagagtgcctcagacctggcacagtcactgatgagaccttcttagaaaagctgaaccaagtatgtgccacccaccagcattttgaaagcaggatgagcaagtgctctcggttcctcaatgacacgtctctgcctcacagctgcttcaggatccagcattatgctggaaaggtgctgtaccaggtggaaggattcgttgacaaaaacaatgaccttctctatcgagacctgtcccaagccatgtggaaggccagccatgccctcatcaagtctttgttccccgaagggaatcccgccaagatcaacctgaaaaggcctcctacagcaggctcacagttcaaggcatccgtggccactctgatgaaaaacctacagaccaagaacccaaactatattaggtgtatcaacccgatgatagcttttggaggaccgtcgatgctgaggcaagctaacgctttaagcaggcttatgacctggcttgaaggatcaaatgcttggaaaccttggctnattgnggccc

SEQ ID NO: 389492 - DNA, 2138 bp, Homo sapiens
ggaaaaatagaggacagtacgcttgtcatgtcctatgtggcagctggttgtggaaaaggagcaaagttaatcaagtaagaacagcttttacagtccaacccggtcctggaagcttttggaaatgccaaaactgtaaggaatgacaactcctctagatttggcaaatatatggatattgaatttgactttaaaggcgatccactaggaggagtaataagtaactatcttttagagaaatctcgggttgttaaacagccaagaggtgaaagaaacttccatgtgttctatcagctgctctctggtgcctctgaagagctcctcaataaacttaagcttgagagggatttcagcaggtataactacctgagtctggattcggccaaagtgaatggagtggatgatgcagcaaattttagaaccgtgcggaatgccatgcagattgtgggctttatggatcatgaagctgagtctgtcttggcggtggtggcagcagtgttgaaactggggaacattgagttcaagcccgaatctcgagtgaatggtctagatgaaagcaaaatcaaagataaaaatgagttaaaagaaatttgtgaattgaccggcattgatcaatcagttctagaacgagcattcagtttccgaacagttgaggccaaacaggagaaagtttcaactacactgaatgtggctcaggcttattatgcccgtgatgctctggctaaaaacctctacagcaggttgttttcatggttggtaaatcgaatcaatgaaagcattaaggtactgaatttctatgagcaaaatcagttgtaataaatggtattcacagtataaacattaagttgaagaaagtttaaatttataatcaaataattgattgccacttacaaagattattccttaaaaagagtgtaccatgtataagattgaaatttgtcagggattttgtttattttgttttgccatgtgtgttgcttctgactggtgaatagtctgatggtctttgtggagttactctgggagtcggcgtcccaggttttggcctggctcacctggtaactagtggtacacactttgctgaaaaggtcactttacttcactaggtcatgatctaatcattactaaaatgagagtgttggactaggtgattttgaaaggcaccactaatgccttctttaaatatatcacctattattaaaatttctaaaagagttctataccaatgcctcatctcatacattttttaaaaaacaactaaattagttattttcttacttaagaaacataattaatttgtaatatatatctatgttccttggatgcttgtagtgttatatttcatgccttaattaaccctttaatttgaaactttttaaaggcacaaacaaaagtgagaaagaaggtcatgggtgttctggacatttatggctttgagattttcgaggacaacagctttgagcagttcattattaattattgtaacgaaaagctgcaacaaatcttcattgaacttactcttaaagaagagcaggaggagtatatacgggaggatatagaatggactcacattgactacttcaataatgctatcatttgtgacctaatagaaaataacacaaatggaatcctggccatgctggatgaagagtgcctcagacctggcacagtcactgatgagaccttcttagaatgctctcggttcctcaatgacacgtctctgcctcacagctgcttcaggatccagcattatgctggaaaggtgctgtaccaggtggaaggattcgttgacaaaaacaatgaccttctctatcgagacctgtcccaagccatgtggaaggccagccatgccctcatcaagtctttgttccccgaagggaatcccgccaagatcaacctgaaaaggcctcctacagcaggctcacagttcaaggcatccgtggccactctgatgaaaaacctacagaccaagaacccaaactatattaggtgaaccccctcaaaagccaaaaaatgggagacaatttcacatggactttggaaaatatttttttcctttgcattcatctctcaaacttagtttttatctttgaccaaccgaacatgaccaaaaaccaaaagtgcattcaaccttaccaaaa

SEQ ID NO: 389493 - DNA, 1878 bp, Homo sapiens
ggaaaaatagaggacagtacgcttgtcatgtcctatgtggcagctggttgtggaaaaggagcaaagttaatcaagtaagaacagcttttacagtccaacccggtcctggaagcttttggaaatgccaaaactgtaaggaatgacaactcctctagatttggcaaatatatggatattgaatttgactttaaaggcgatccactaggaggagtaataagtaactatcttttagagaaatctcgggttgttaaacagccaagaggtgaaagaaacttccatgtgttctatcagctgctctctggtgcctctgaagagctcctcaataaacttaagcttgagagggatttcagcaggtataactacctgagtctggattcggccaaagtgaatggagtggatgatgcagcaaattttagaaccgtgcggaatgccatgcagattgtgggctttatggatcatgaagctgagtctgtcttggcggtggtggcagcagtgttgaaactggggaacattgagttcaagcccgaatctcgagtgaatggtctagatgaaagcaaaatcaaagataaaaatgagttaaaagaaatttgtgaattgaccggcattgatcaatcagttctagaacgagcattcagtttccgaacagttgaggccaaacaggagaaagtttcaactacactgaatgtggctcaggcttattatgcccgtgatgctctggctaaaaacctctacagcaggttgttttcatggttggtaaatcgaatcaatgaaagcattaaggtactgaatttctatgagcaaaatcagttgtaataaatggtattcacagtataaacattaagttgaagaaagtttaaatttataatcaaataattgattgccacttacaaagattattccttaaaaagagtgtaccatgtataagattgaaatttgtcagggattttgtttattttgttttgccatgtgtgttgcttctgactggtgaatagtctgatggtctttgtggagttactctgggagtcggcgtcccaggttttggcctggctcacctggtaactagtggtacacactttgctgaaaaggtcactttacttcactaggtcatgatctaatcattactaaaatgagagtgttggactaggtgattttgaaaggcaccactaatgccttctttaaatatatcacctattattaaaatttctaaaagagttctataccaatgcctcatctcatacattttttaaaaaacaactaaattagttattttcttacttaagaaacataattaatttgtaatatatatctatgttccttggatgcttgtagtgttatatttcatgccttaattaaccctttaatttgaaactttttaaaggcacaaacaaaagtgagaaagaaggtcatgggtgttctggacatttatggctttgagattttcgaggacaacagctttgagcagttcattattaattattgtaacgaaaagctgcaacaaatcttcattgaacttactcttaaagaagagcaggaggagtatatacgggaggatatagaatggactcacattgactacttcaataatgctatcatttgtgacctaatagaaaataacacaaatggaatcctggccatgctggatgaagagtgcctcagacctggcacagtcactgatgagaccttcttagaaaagctgaaccaagtatgtgccacccaccagcattttgaaagcaggatgagcaagtgctctcggttcctcaatgacacgtctctgcctcacagctgcttcaggatccagcattatgctggaaagctgtaccaggtggaaggattcgttgacaatgccctcatcaagtctttgttccccgagggtcccgt

SEQ ID NO: 389494 - DNA, 601 bp, Homo sapiens
taaaaaaactagtatattattatatatactaagatcattacatgacaccgatctctttcgtgtaaaaaatacagggaccaattcacagaccagcagaaacttatttatgaagagaaactagaagccagtgaactcttcaaagacaagaaggctttatacccatctagtgttgggcgaccatttcaaggggcttacctggaaatcaacaagaaccccaagtataagaaactcaaagatgccattgaagaaaagatcatcattgctgaagtctgcaggcgtgagccaccgcgcccagcctgttcagtggaatttaaacttgtacatatagaagtgagaattgaattcattcagagattcagctgccttatagtttctagtccttaaacttctaagctgttcaatgtgtaactagattgcattttaaggataacctgcaagatgtgtaatgcagttatgcaccacataatgacattttggtcagcaatggattgcacagagtgacggtggtcccctaagattgtaatggagctgagaaattcttctgtctattgatgtcacaggtgttgtaatgttatgatgcaaggcactactcacatgtttg

SEQ ID NO: 389495 - DNA, 513 bp, Homo sapiens
acccaccagcattttgaaagcaggatgagcaagtgctctcggttcctcaatgacacgtctctgcctcacagctgcttcaggatccagcattatgctggaaaggtatgggggagctgtgagcacccagtcaggcctgccaagttacccctgcaaggaggctgtacctcagagatgggcgttcgaaaccccattaacttgtgaggacaaattgagctgctaaagtggttgaatcgataaatgttcaatagaaatagaatctggaccatgttgactaaaatcttattaatacagaaaatcaaaagcaaagctaatggacttaatgaagagtctaaatatatttttgaatcatctttattattttcaaactctaagctatcctataaaaaatatctattaacactattgaaggagatttgccagtacaaattaagagtcaataaagacttaaggctttaaaaacacaagccatttagcaaaaataatgaattatttgagattttgaaatgacattag

SEQ ID NO: 389496 - DNA, 499 bp, Homo sapiens
tatttagcatccttaaagcatactttggattaactgtaataatattggattgtttgatattttggtttctttatgtattggtttccagaaggagtatggataattgagtcagttagacgaagtgagcaaataccctttctcaatccttgtatgcgttacagatattaactacaactgccaatatcttccccttttatcctacagcaacaaaagaggtaccagcagacaaagagttccgccttagtaattcagtcttatatccggggttggaaggtgagtttaaaagaagtatgctttatttattttgggttttctggtttttcacaaaggataatgtctttagggtcaccctgcagaggaggggctcctctgtctcctgcctcgcctgtaaacagtcagatggaaagaataaatattatgggccaaacggggaccctggtgaccatgtcttggccacttccttctaaccagctttctttttaagcgctttgttctctaa

SEQ ID NO: 389497 - DNA, 603 bp, Homo sapiens
cagaaaactcactgtttttatttttatttttttaggtctggtgtggaggtcctatttaatgaattagaaattcccgtggaagaatactcctttggtagatcaaagatattcatccgaaacccaagaacagtatgtaacgaaaacctttacactctgaacttaagttggaatcgtataggaaagttcttaaaatatgtttaactttataacattatatgaggggccaccatgaatgccacaaaacacttgtgtgtttatctacaaataatcaagaggcagggacagataagggtaaggggcggtagaagaatgcgtattttttatgaaccatcaaagtctttgctctgacagattgtacaacacttaagaaatcacaaagaaactgttaggacaacggtgcaacattcatagcaactgcaggtaaacagtctgtatttgtaatacctgaattatacattaattttaagaactacagccccattatttagaggtacaggaaagcactaaaatgaaaattttttttaagttaaaaaaaatacttttagcattctacctcatagaaccccaaggaaatttttttgtcaatgaatagatgagtgtgaa

SEQ ID NO: 389498 - DNA, 4324 bp, Homo sapiens
ggaaaaatagaggacagtacgcttgtcatgtcctatgtggcagctggttgtggaaaaggagcaaagttaatcaagtaagaacagcttttacagtccaacccggtcctggaagcttttggaaatgccaaaactgtaaggaatgacaactcctctagatttggcaaatatatggatattgaatttgactttaaaggcgatccactaggaggagtaataagtaactatcttttagagaaatctcgggttgttaaacagccaagaggtgaaagaaacttccatgtgttctatcagctgctctctggtgcctctgaagagctcctcaataaacttaagcttgagagggatttcagcaggtataactacctgagtctggattcggccaaagtgaatggagtggatgatgcagcaaattttagaaccgtgcggaatgccatgcagattgtgggctttatggatcatgaagctgagtctgtcttggcggtggtggcagcagtgttgaaactggggaacattgagttcaagcccgaatctcgagtgaatggtctagatgaaagcaaaatcaaagataaaaatgagttaaaagaaatttgtgaattgaccggcattgatcaatcagttctagaacgagcattcagtttccgaacagttgaggccaaacaggagaaagtttcaactacactgaatgtggctcaggcttattatgcccgtgatgctctggctaaaaacctctacagcaggttgttttcatggttggtaaatcgaatcaatgaaagcattaaggcacaaacaaaagtgagaaagaaggtcatgggtgttctggacatttatggctttgagattttcgaggacaacagctttgagcagttcattattaattattgtaacgaaaagctgcaacaaatcttcattgaacttactcttaaagaagagcaggaggagtatatacgggaggatatagaatggactcacattgactacttcaataatgctatcatttgtgacctaatagaaaataacacaaatggaatcctggccatgctggatgaagagtgcctcagacctggcacagtcactgatgagaccttcttagaaaagctgaaccaagtatgtgccacccaccagcattttgaaagcaggatgagcaagtgctctcggttcctcaatgacacgtctctgcctcacagctgcttcaggatccagcattatgctggaaaggtgctgtaccaggtggaaggattcgttgacaaaaacaatgaccttctctatcgagacctgtcccaagccatgtggaaggccagccatgccctcatcaagtctttgttccccgaagggaatcccgccaagatcaacctgaaaaggcctcctacagcaggctcacagttcaaggcatccgtggccactctgatgaaaaacctacagaccaagaacccaaactatattaggtgtatcaaaccgaatgataaaaaagcagcacacatcttcaacgaggctctagtgtgtcatcagatcaggtacctggggcttttggagaacgtccgagtgcggagggcaggctacgccttcaggcaggcctatgaaccttgcctagaaagatacaaaatgctttgtaaacaaacatggcctcattggaaaggaccagccaggtctggtgtggaggtcctatttaatgaattagaaattcccgtggaagaatactcctttggtagatcaaagatattcatccgaaacccaagaacattattcaaattagaagacctgaggaagcaacgcctggaggacttggccactctcattcagaagatatatcgggggtggaaatgccgcacacacttcctgctaatgaaaaaaagccaaattgtgattgccgcctggtacaggagatatgcgcaacaaaagaggtaccagcagacaaagagttccgccttagtaattcagtcttatatccggggttggaaggctcgaaaaattctgcgggaactgaagcatcaaaagcgctgtaaggaagcagtcacgaccattgctgcatattggcatgggacccaggtacgtagagaatacaggaaattcttcagagccaatgctggaaagaaaatctatgagtttacgcttcagagaattgtgcaaaaatacttcttggaaatgaaaaataagatgccttccttatctccaatagacaagaattggccctcaagaccttacttattcttggattctactcacaaggagctaaaaaggattttccacttgtggaggtgtaaaaaatacagggaccaattcacagaccagcagaaacttatttatgaagagaaactagaagccagtgaactcttcaaagacaagaaggctttatacccatctagtgttgggcgaccatttcaaggggcttacctggaaatcaacaagaaccccaagtataagaaactcaaagatgccattgaagaaaagatcatcattgctgaagtcgtgaacaaaattaaccgtgctaatgggaagagtacatctcggattttcctcttaacaaacaataatctccttcttgctgaccaaaagtctggacaaatcaagtcagaggttccactggtggatgtgaccaaggtatcaatgagctcacaaaatgatggcttcttcgccgtccacctcaaagagggctcagaagcagctagtaaaggagactttctcttcagcagtgatcacctgattgaaatggccaccaagctctatcgcacaactctcagccaaaccaaacagaagctcaatattgagatttccgatgagttcctggtacagttcagacaggacaaagtatgtgtgaagtttattcagggaaaccagaaaaatgggagtgtcccaacatgtaaacgaaaaaacaaccgtctccttgaagttgctgtcccttaactggcgcctcctctctactttcatggacttgttcctttgtaatagtgcaatttggttttgttttatttggggttcattgtatgtttgggaatcaccaaaggcttttagagttctttggcaaaataaaaatatttgactaatcaatttttattattggaatagttttaacctttcaaatacatgttctgtcctggagcaggattgtagaaactaacagtgtctattttcatgtctgatgtgttcttcctttagtcatcatgttaggtctgtgtaccctaaatcagcatattactcataaatcattaattaatataagcataggaaatggtcttaaaagatactgcattcattcatcagatatttattccatgcctactctatgctaggcactgtgctagatggtatgaaaacttattaggaacctttttgtttttgagaccattgcattctggctggtttgtgctggtttaacgacatctaagaaggtttagaaatggtgagaccaaaacaataactgttaatgatggacagcattattaggaaccctgtagtatgatatttaacaatataggcttcaagaagggctggtcctaagagggggcagaaatgaatgaccaggttaaatccctctacatgtggtttctgtttgaaaaaaagaaaactgacatttgaacaggacttttaatttgtttaaaactctggtaattacttgtaacagtagaaaatagaagtcattcttattttagaaaaagtgacagaagcagtccagtaagattatatgtttctgtttctggtaaataccatatatgatcctcgaaatgataatatctccagaatattgttttcacccaaatttgagtagatattttaaacacctaacaaagtaaagggctaaaagccattcagatagcagtaaaacattctgtatgatgtgcaataaaacatccaagatcttttttgaaagttttatttataatatacatttttgtatgagaaaggtgattggtacagggtgcctattttagtcatggatcaaaatttgtgtaacttgcagggctttctttctttttcttcaaatttacaagggttcattttggaaactacattttaaactttggaatcaaattgtttcttatttgggaggataatgtatatacattggtattatgttaaataataaaattgttctaatttggtgccatttcctgaatcacaactgtatttttgtatctcaagctattttcatatgttatgtgtcaatgtatcatctctcagaaaggttttacaatccaaacattatatgttctctgtgtaactgaatttcacttatcttttataaaccagaaacattaattgaaaatattttctggggattttctcttgacttgtatttttaaaaattgctcacataaagaagttctcagaa

SEQ ID NO: 389499 - DNA, 4106 bp, Homo sapiens
ggaaaaatagaggacagtacgcttgtcatgtcctatgtggcagctggttgtggaaaaggagcaaagttaatcaagtaagaacagcttttacagtccaacccggtcctggaagcttttggaaatgccaaaactgtaaggaatgacaactcctctagatttggcaaatatatggatattgaatttgactttaaaggcgatccactaggaggagtaataagtaactatcttttagagaaatctcgggttgttaaacagccaagaggtgaaagaaacttccatgtgttctatcagctgctctctggtgcctctgaagagctcctcaataaacttaagcttgagagggatttcagcaggtataactacctgagtctggattcggccaaagtgaatggagtggatgatgcagcaaattttagaaccgtgcggaatgccatgcagattgtgggctttatggatcatgaagctgagtctgtcttggcggtggtggcagcagtgttgaaactggggaacattgagttcaagcccgaatctcgagtgaatggtctagatgaaagcaaaatcaaagataaaaatgagttaaaagaaatttgtgaattgaccggcattgatcaatcagttctagaacgagcattcagtttccgaacagttgaggccaaacaggagaaagtttcaactacactgaatgtggctcaggcttattatgcccgtgatgctctggctaaaaacctctacagcaggttgttttcatggttggtaaatcgaatcaatgaaagcattaaggcacaaacaaaagtgagaaagaaggtcatgggtgttctggacatttatggctttgagattttcgaggacaacagctttgagcagttcattattaattattgtaacgaaaagctgcaacaaatcttcattgaacttactcttaaagaagagcaggaggagtatatacgggaggatatagaatggactcacattgactacttcaataatgctatcatttgtgacctaatagaaaataacacaaatggaatcctggccatgctggatgaagagtgcctcagacctggcacagtcactgatgagaccttcttagaaaagctgaaccaagtatgtgccacccaccagcattttgaaagcaggatgagcaagtgctctcggttcctcaatgacacgtctctgcctcacagctgcttcaggatccagcattatgctggaaaggtgctgtaccaggtggaaggattcgttgacaaaaacaatgaccttctctatcgagacctgtcccaagccatgtggaaggccagccatgccctcatcaagtctttgttccccgaagggaatcccgccaagatcaacctgaaaaggcctcctacagcaggctcacagttcaaggcatccgtggccactctgatgaaaaacctacagaccaagaacccaaactatattaggtgtatcaaaccgaatgataaaaaagcagcacacatcttcaacgaggctctagtgtgtcatcagatcaggtacctggggcttttggagaacgtccgagtgcggagggcaggctacgccttcaggcaggcctatgaaccttgcctagaaagatacaaaatgctttgtaaacaaacatggcctcattggaaaggaccagccaggtctggtgtggaggtcctatttaatgaattagaaattcccgtggaagaatactcctttggtagatcaaagatattcatccgaaacccaagaacattattcaaattagaagacctgaggaagcaacgcctggaggacttggccactctcattcagaagatatatcgggggtggaaatgccgcacacacttcctgctaatgaaaaaaagccaaattgtgattgccgcctggtacaggagatatgcgcaacaaaagaggtaccagcagacaaagagttccgccttagtaattcagtcttatatccggggttggaaggctcgaaaaattctgcgggaactgaagcatcaaaagcgctgtaaggaagcagtcacgaccattgctgcatattggcatgggacccaggtacgtagagaatacaggaaattcttcagagccaatgctggaaagaaaatctatgagtttacgcttcagagaattgtgcaaaaatacttcttggaaatgaaaaataagatgccttccttatctccaatagacaagaattggccctcaagaccttacttattcttggattctactcacaaggagctaaaaaggattttccacttgtggaggtgtaaaaaatacagggaccaattcacagaccagcagaaacttatttatgaagagaaactagaagccagtgaactcttcaaagacaagaaggctttatacccatctagtgttgggcgaccatttcaaggggcttacctggaaatcaacaagaaccccaagtataagaaactcaaagatgccattgaagaaaagatcatcattgctgaagtcgtgaacaaaattaaccgtgctaatgggaagagtacatctcggattttcctcttaacaaacaataatctccttcttgctgaccaaaagtctggacaaatcaagtcagaggttccactggtggatgtgaccaaggtatcaatgagctcacaaaatgatggcttcttcgccgtccacctcaaagagggctcagaagcagctagtaaaggagactttctcttcagcagtgatcacctgattgaaatggccaccaagctctatcgcacaactctcagccaaaccaaacagaagctcaatattgagatttccgatgagttcctggtacagttcagacaggacaaagtatgtgtgaagtttattcagggaaaccagaaaaatgggagtgtcccaacatgtaaacgaaaaaacaaccgtctccttgaagttgctgtcccttaactggcgcctcctctctactttcatggacttgttcctttgtaatagtgcaatttggttttgttttatttggggttcattgtatgtttgggaatcaccaaaggcttttagagttctttggcaaaataaaaatatttgactaatcaatttttattattggaatagttttaacctttcaaatacatgttctgtcctggagcaggattgtagaaactaacagtgtctattttcatgtctgatgtgttcttcctttagtcatcatgttaggtctgtgtaccctaaatcagcatattactcataaatcattaattaatataagcataggaaatggtcttaaaagatactgcattcattcatcagatatttattccatgcctactctatgctaggcactgtgctagatggtatgaaaacttattaggaacctttttgtttttgagaccattgcattctggctggtttgtgctggtttaacgacatctaagaaggtttagaaatggtgagaccaaaacaataactgttaatgatggacagcattattaggaaccctgtagtatgatatttaacaatataggcttcaagaagggctggtcctaagagggggcagaaatgaatgaccaggttaaatccctctacatgtggtttctgtttgaaaaaaagaaaactgacatttgaacaggacttttaatttgtttaaaactctggtaattacttgtaacagtagaaaatagaagtcattcttattttagaaaaagtgacagaagcagtccagtaagattatatgtttctgtttctggtaaataccatatatgatcctcgaaatgataatatctccagaatattgttttcacccaaatttgagtagatattttaaacacctaacaaagtaaagggctaaaagccattcagatagcagtaaaacattctgtatgatgtgcaataaaacatccaagatcttttttgaaagttttatttataatatacatttttgtatgagaaaggtgattggtacagggtgcctattttagtcatggatcaaaatttgtgtaacttgcagggctttctttctttttcttcaaatttacaagggttcattttggaaactacattttaaactttggaatcaaattgtttcttatttgggaggataatgtatatacattggtattatgttaaataataaaattgttctaatttggtgccatttcctg

SEQ ID NO: 389500 - DNA, 3827 bp, Homo sapiens
cccataagaatgtacagtctagtgaggcagatgtatatgaaactaatctgtacatgtgtatacttacacatacacacatgttcgtataacatgatttacaaaaagggttaggatgcaagagtcagagtgagggatctgtccctggatggggacaataaggggtcagttcagggggacttccttgagctctgaagtttcacctgagaatgggagattcagaacttggtgacagagtttgtggagctcactgtgtctttgctgatccttcagcaaaggaagtgagattgtttctagcttttctgtttggggtgcttctctgtcaactaaaagtcttcatcctttaaatattgcatcatttgtgtatacttcattcattcacttactcatgacccactcctcgagtgcctgcaatgggcaagcgtctgtcctaggagccgtgtgctgggccacagttaaatctgagagatcatgtgtggcatttctcatggattgagatgtctgagtgtcattgttttgagagagctagtggcatggtttataaagctgtttttcattttctccatacaggacaacagctttgagcagttcattattaattattgtaacgaaaagctgcaacaaatcttcattgaacttactcttaaagaagagcaggaggagtatatacgggaggatatagaatggactcacattgactacttcaataatgctatcatttgtgacctaatagaaaataacacaaatggaatcctggccatgctggatgaagagtgcctcagacctggcacagtcactgatgagaccttcttagaaaagctgaaccaagtatgtgccacccaccagcattttgaaagcaggatgagcaagtgctctcggttcctcaatgacacgtctctgcctcacagctgcttcaggatccagcattatgctggaaaggtgctgtaccaggtggaaggattcgttgacaaaaacaatgaccttctctatcgagacctgtcccaagccatgtggaaggccagccatgccctcatcaagtctttgttccccgaagggaatcccgccaagatcaacctgaaaaggcctcctacagcaggctcacagttcaaggcatccgtggccactctgatgaaaaacctacagaccaagaacccaaactatattaggtgtatcaaaccgaatgataaaaaagcagcacacatcttcaacgaggctctagtgtgtcatcagatcaggtacctggggcttttggagaacgtccgagtgcggagggcaggctacgccttcaggcaggcctatgaaccttgcctagaaagatacaaaatgctttgtaaacaaacatggcctcattggaaaggaccagccaggtctggtgtggaggtcctatttaatgaattagaaattcccgtggaagaatactcctttggtagatcaaagatattcatccgaaacccaagaacattattcaaattagaagacctgaggaagcaacgcctggaggacttggccactctcattcagaagatatatcgggggtggaaatgccgcacacacttcctgctaatgaaaaaaagccaaattgtgattgccgcctggtacaggagatatgcgcaacaaaagaggtaccagcagacaaagagttccgccttagtaattcagtcttatatccggggttggaaggctcgaaaaattctgcgggaactgaagcatcaaaagcgctgtaaggaagcagtcacgaccattgctgcatattggcatgggacccaggtacgtagagaatacaggaaattcttcagagccaatgctggaaagaaaatctatgagtttacgcttcagagaattgtgcaaaaatacttcttggaaatgaaaaataagatgccttccttatctccaatagacaagaattggccctcaagaccttacttattcttggattctactcacaaggagctaaaaaggattttccacttgtggaggtgtaaaaaatacagggaccaattcacagaccagcagaaacttatttatgaagagaaactagaagccagtgaactcttcaaagacaagaaggctttatacccatctagtgttgggcgaccatttcaaggggcttacctggaaatcaacaagaaccccaagtataagaaactcaaagatgccattgaagaaaagatcatcattgctgaagtcgtgaacaaaattaaccgtgctaatgggaagagtacatctcggattttcctcttaacaaacaataatctccttcttgctgaccaaaagtctggacaaatcaagtcagaggttccactggtggatgtgaccaaggtatcaatgagctcacaaaatgatggcttcttcgccgtccacctcaaagagggctcagaagcagctagtaaaggagactttctcttcagcagtgatcacctgattgaaatggccaccaagctctatcgcacaactctcagccaaaccaaacagaagctcaatattgagatttccgatgagttcctggtacagttcagacaggacaaagtatgtgtgaagtttattcagggaaaccagaaaaatgggagtgtcccaacatgtaaacgaaaaaacaaccgtctccttgaagttgctgtcccttaactggcgcctcctctctactttcatggacttgttcctttgtaatagtgcaatttggttttgttttatttggggttcattgtatgtttgggaatcaccaaaggcttttagagttctttggcaaaataaaaatatttgactaatcaatttttattattggaatagttttaacctttcaaatacatgttctgtcctggagcaggattgtagaaactaacagtgtctattttcatgtctgatgtgttcttcctttagtcatcatgttaggtctgtgtaccctaaatcagcatattactcataaatcattaattaatataagcataggaaatggtcttaaaagatactgcattcattcatcagatatttattccatgcctactctatgctaggcactgtgctagatggtatgaaaacttattaggaacctttttgtttttgagaccattgcattctggctggtttgtgctggtttaacgacatctaagaaggtttagaaatggtgagaccaaaacaataactgttaatgatggacagcattattaggaaccctgtagtatgatatttaacaatataggcttcaagaagggctggtcctaagagggggcagaaatgaatgaccaggttaaatccctctacatgtggtttctgtttgaaaaaaagaaaactgacatttgaacaggacttttaatttgtttaaaactctggtaattacttgtaacagtagaaaatagaagtcattcttattttagaaaaagtgacagaagcagtccagtaagattatatgtttctgtttctggtaaataccatatatgatcctcgaaatgataatatctccagaatattgttttcacccaaatttgagtagatattttaaacacctaacaaagtaaagggctaaaagccattcagatagcagtaaaacattctgtatgatgtgcaataaaacatccaagatcttttttgaaagttttatttataatatacatttttgtatgagaaaggtgattggtacagggtgcctattttagtcatggatcaaaatttgtgtaacttgcagggctttctttctttttcttcaaatttacaagggttcattttggaaactacattttaaactttggaatcaaattgtttcttatttgggaggataatgtatatacattggtattatgttaaataataaaattgttctaatttggtgccatttcctg

SEQ ID NO: 389501 - DNA, 4674 bp, Homo sapiens
ggaaaaatagaggacagtacgcttgtcatgtcctatgtggcagctggttgtggaaaaggagcaaagttaatcaagtaagaacagcttttacagtccaacccggtcctggaagcttttggaaatgccaaaactgtaaggaatgacaactcctctagatttggcaaatatatggatattgaatttgactttaaaggcgatccactaggaggagtaataagtaactatcttttagagaaatctcgggttgttaaacagccaagaggtgaaagaaacttccatgtgttctatcagctgctctctggtgcctctgaagagctcctcaataaacttaagcttgagagggatttcagcaggtataactacctgagtctggattcggccaaagtgaatggagtggatgatgcagcaaattttagaaccgtgcggaatgccatgcagattgtgggctttatggatcatgaagctgagtctgtcttggcggtggtggcagcagtgttgaaactggggaacattgagttcaagcccgaatctcgagtgaatggtctagatgaaagcaaaatcaaagataaaaatgagttaaaagaaatttgtgaattgaccggcattgatcaatcagttctagaacgagcattcagtttccgaacagttgaggccaaacaggagaaagtttcaactacactgaatgtggctcaggcttattatgcccgtgatgctctggctaaaaacctctacagcaggttgttttcatggttggtaaatcgaatcaatgaaagcattaaggcacaaacaaaagtgagaaagaaggtcatgggtgttctggacatttatggctttgagattttcgaggacaacagctttgagcagttcattattaattattgtaacgaaaagctgcaacaaatcttcattgaacttactcttaaagaagagcaggaggagtatatacgggaggatatagaatggactcacattgactacttcaataatgctatcatttgtgacctaatagaaaataacacaaatggaatcctggccatgctggatgaagagtgcctcagacctggcacagtcactgatgagaccttcttagaaaagctgaaccaagtatgtgccacccaccagcattttgaaagcaggatgagcaagtgctctcggttcctcaatgacacgtctctgcctcacagctgcttcaggatccagcattatgctggaaaggtgctgtaccaggtggaaggattcgttgacaaaaacaatgaccttctctatcgagacctgtcccaagccatgtggaaggccagccatgccctcatcaagtctttgttccccgaagggaatcccgccaagatcaacctgaaaaggcctcctacagcaggctcacagttcaaggcatccgtggccactctgatgaaaaacctacagaccaagaacccaaactatattaggtgtatcaaaccgaatgataaaaaagcagcacacatcttcaacgaggctctagtgtgtcatcagatcaggtacctggggcttttggagaacgtccgagtgcggagggcaggctacgccttcaggcaggcctatgaaccttgcctagaaagatacaaaatgctttgtaaacaaacatggcctcattggaaaggaccagccaggtctggtgtggaggtcctatttaatgaattagaaattcccgtggaagaatactcctttggtagatcaaagatattcatccgaaacccaagaacattattcaaattagaagacctgaggaagcaacgcctggaggacttggccactctcattcagaagatatatcgggggtggaaatgccgcacacacttcctgctaatgaaaaaaagccaaattgtgattgccgcctggtacaggagatatgcgcaacaaaagaggtaccagcagacaaagagttccgccttagtaattcagtcttatatccggggttggaaggctcgaaaaattctgcgggaactgaagcatcaaaagcgctgtaaggaagcagtcacgaccattgctgcatattggcatgggacccaggtacgtagagaatacaggaaattcttcagagccaatgctggaaagaaaatctatgagtttacgcttcagagaattgtgcaaaaatacttcttggaaatgaaaaataagatgccttccttatctccaatagacaagaattggccctcaagaccttacttattcttggattctactcacaaggagctaaaaaggattttccacttgtggaggtgtaaaaaatacagggaccaattcacagaccagcagaaacttatttatgaagagaaactagaagccagtgaactcttcaaagacaagaaggctttatacccatctagtgttgggcgaccatttcaaggggcttacctggaaatcaacaagaaccccaagtataagaaactcaaagatgccattgaagaaaagatcatcattgctgaagtcgtgaacaaaattaaccgtgctaatgggaagagtacatctcggattttcctcttaacaaacaataatctccttcttgctgaccaaaagtctggacaaatcaagtcagaggttccactggtggatgtgaccaaggtatcaatgagctcacaaaatgatggcttcttcgccgtccacctcaaagagggctcagaagcagctagtaaaggagactttctcttcagcagtgatcacctgattgaaatggccaccaagctctatcgcacaactctcagccaaaccaaacagaagctcaatattgagatttccgatgagttcctggtacagttcagacaggacaaagtatgtgtgaagtttattcagggaaaccagaaaaatgggagtgtcccaacatgtaaacgaaaaaacaaccgtctccttgaagttgctgtcccttaactggcgcctcctctctactttcatggacttgttcctttgtaatagtgcaatttggttttgttttatttggggttcattgtatgtttgggaatcaccaaaggcttttagagttctttggcaaaataaaaatatttgactaatcaatttttattattggaatagttttaacctttcaaatacatgttctgtcctggagcaggattgtagaaactaacagtgtctattttcatgtctgatgtgttcttcctttagtcatcatgttaggtctgtgtaccctaaatcagcatattactcataaatcattaattaatataagcataggaaatggtcttaaaagatactgcattcattcatcagatatttattccatgcctactctatgctaggcactgtgctagatggtatgaaaacttattaggaacctttttgtttttgagaccattgcattctggctggtttgtgctggtttaacgacatctaagaaggtttagaaatggtgagaccaaaacaataactgttaatgatggacagcattattaggaaccctgtagtatgatatttaacaatataggcttcaagaagggctggtcctaagagggggcagaaatgaatgaccaggttaaatccctctacatgtggtttctgtttgaaaaaaagaaaactgacatttgaacaggacttttaatttgtttaaaactctggtaattacttgtaacagtagaaaatagaagtcattcttattttagaaaaagtgacagaagcagtccagtaagattatatgtttctgtttctggtaaataccatatatgatcctcgaaatgataatatctccagaatattgttttcacccaaatttgagtagatattttaaacacctaacaaagtaaagggctaaaagccattcagatagcagtaaaacattctgtatgatgtgcaataaaacatccaagatcttttttgaaagttttatttataatatacatttttgtatgagaaaggtgattggtacagggtgcctattttagtcatggatcaaaatttgtgtaacttgcagggctttctttctttttcttcaaatttacaagggttcattttggaaactacattttaaactttggaatcaaattgtttcttatttgggaggataatgtatatacattggtattatgttaaataataaaattgttctaatttggtgccatttcctgaatcacaactgtatttttgtatctcaagctattttcatatgttatgtgtcaatgtatcatctctcagaaaggttttacaatccaaacattatatgttctctgtgtaactgaatttcacttatcttttataaaccagaaacattaattgaaaatattttctggggattttctcttgacttgtatttttaaaaattgctcacataaagaagttctcagaagtctttgtgtttattggtgcaggtagaggatgtaattacttagattcttcttgccttgtgcctaaagtggtagattaatagttcctgatactggtgagtagaaatttgggaatgagagggtgtggtgttttaaataacatgcagtatgttcacattgttcagcatgtaagtaagtgttaaaatatatacattacaaattctccatcctatcaaccagctatctgcttagttcccaccctccccgaaacattaacgcattgttgttagttgcttttgtattactttgtccatatgtttgcaaaaggaaatcaaaatagattcttacgttcttctgctttagtagacaaaag

SEQ ID NO: 389502 - DNA, 3144 bp, Homo sapiens
cgtattttttatgaaccatcaaagtctttgctctgacagattgtacaacacttaagaaatcacaaagaaactgttaggacaacggtgcaacattcatagcaactgcaggtaaacagtctgtatttgtaatacctgaattatacattaattttaagaactacagccccattatttagaggtacaggaaagcactaaaatgaaaattttttttaagttaaaaaaaatacttttagcattctacctcatagaaccccaaggaaatttttttgtcaatgaatagatgagtgtgaagtgtaatgagtatagcaggtgactggtaatttggaaacgttaagattttggaaagtatttaattcatttaagagaattttccagcatctaccttccattagtaatttgcatcctcatagacagtgtgaaggtaaacttaaggtcaattcagcccctctctgatttgtcataaattctgaatcactggaataaaaattgtaagtctttcatgaatccatcaaaataattttctcatggaccattatccatatcatatataatgcatatggtttttcagttctttttttcaatgtaattgactccaacatgatggcattttgtctcctgaaaattcctttcctgtatgctgtgaggtttcagaggatttttgataagtccatctatcatttcttattagttattcaaattagaagacctgaggaagcaacgcctggaggacttggccactctcattcagaagatatatcgggggtggaaatgccgcacacacttcctgctaatgaaaaaaagccaaattgtgattgccgcctggtacaggagatatgcgcaacaaaagaggtaccagcagacaaagagttccgccttagtaattcagtcttatatccggggttggaaggctcgaaaaattctgcgggaactgaagcatcaaaagcgctgtaaggaagcagtcacgaccattgctgcatattggcatgggacccaggctcgaagggaattgaaacgcttgaaggaggaggctaggcgtaagcatgcagttgctgtcatttgggcttactggcttggactgaaggtacgtagagaatacaggaaattcttcagagccaatgctggaaagaaaatctatgagtttacgcttcagagaattgtgcaaaaatacttcttggaaatgaaaaataagatgccttccttatctccaatagacaagaattggccctcaagaccttacttattcttggattctactcacaaggagctaaaaaggattttccacttgtggaggtgtaaaaaatacagggaccaattcacagaccagcagaaacttatttatgaagagaaactagaagccagtgaactcttcaaagacaagaaggctttatacccatctagtgttgggcgaccatttcaaggggcttacctggaaatcaacaagaaccccaagtataagaaactcaaagatgccattgaagaaaagatcatcattgctgaagtcgtgaacaaaattaaccgtgctaatgggaagagtacatctcggattttcctcttaacaaacaataatctccttcttgctgaccaaaagtctggacaaatcaagtcagaggttccactggtggatgtgaccaaggtatcaatgagctcacaaaatgatggcttcttcgccgtccacctcaaagagggctcagaagcagctagtaaaggagactttctcttcagcagtgatcacctgattgaaatggccaccaagctctatcgcacaactctcagccaaaccaaacagaagctcaatattgagatttccgatgagttcctggtacagttcagacaggacaaagtatgtgtgaagtttattcagggaaaccagaaaaatgggagtgtcccaacatgtaaacgaaaaaacaaccgtctccttgaagttgctgtcccttaactggcgcctcctctctactttcatggacttgttcctttgtaatagtgcaatttggttttgttttatttggggttcattgtatgtttgggaatcaccaaaggcttttagagttctttggcaaaataaaaatatttgactaatcaatttttattattggaatagttttaacctttcaaatacatgttctgtcctggagcaggattgtagaaactaacagtgtctattttcatgtctgatgtgttcttcctttagtcatcatgttaggtctgtgtaccctaaatcagcatattactcataaatcattaattaatataagcataggaaatggtcttaaaagatactgcattcattcatcagatatttattccatgcctactctatgctaggcactgtgctagatggtatgaaaacttattaggaacctttttgtttttgagaccattgcattctggctggtttgtgctggtttaacgacatctaagaaggtttagaaatggtgagaccaaaacaataactgttaatgatggacagcattattaggaaccctgtagtatgatatttaacaatataggcttcaagaagggctggtcctaagagggggcagaaatgaatgaccaggttaaatccctctacatgtggtttctgtttgaaaaaaagaaaactgacatttgaacaggacttttaatttgtttaaaactctggtaattacttgtaacagtagaaaatagaagtcattcttattttagaaaaagtgacagaagcagtccagtaagattatatgtttctgtttctggtaaataccatatatgatcctcgaaatgataatatctccagaatattgttttcacccaaatttgagtagatattttaaacacctaacaaagtaaagggctaaaagccattcagatagcagtaaaacattctgtatgatgtgcaataaaacatccaagatcttttttgaaagttttatttataatatacatttttgtatgagaaaggtgattggtacagggtgcctattttagtcatggatcaaaatttgtgtaacttgcagggctttctttctttttcttcaaatttacaagggttcattttggaaactacattttaaactttggaatcaaattgtttcttatttgggaggataatgtatatacattggtattatgttaaataataaaattgttctaatttggtgccatttcctg

SEQ ID NO: 389503 - DNA, 1909 bp, Homo sapiens
ttttttaactcttaatactaagatcatataatatagaagaaaaatagataagcttatgtaaaaaatacagggaccaattcacagaccagcagaaacttatttatgaagagaaactagaagccagtgaactcttcaaagacaagaaggctttatacccatctagtgttgggcgaccatttcaaggggcttacctggaaatcaacaagaaccccaagtataagaaactcaaagatgccattgaagaaaagatcatcattgctgaagtcgtgaacaaaattaaccgtgctaatgggaagagtacatctcggattttcctcttaacaaacaataatctccttcttgctgaccaaaagtctggacaaatcaagtcagaggttccactggtggatgtgaccaaggtatcaatgagctcacaaaatgatggcttcttcgccgtccacctcaaagagggctcagaagcagctagtaaaggagactttctcttcagcagtgatcacctgattgaaatggccaccaagctctatcgcacaactctcagccaaaccaaacagaagctcaatattgagatttccgatgagttcctggtacagttcagacaggacaaagtatgtgtgaagtttattcagggaaaccagaaaaatgggagtgtcccaacatgtaaacgaaaaaacaaccgtctccttgaagttgctgtcccttaactggcgcctcctctctactttcatggacttgttcctttgtaatagtgcaatttggttttgttttatttggggttcattgtatgtttgggaatcaccaaaggcttttagagttctttggcaaaataaaaatatttgactaatcaatttttattattggaatagttttaacctttcaaatacatgttctgtcctggagcaggattgtagaaactaacagtgtctattttcatgtctgatgtgttcttcctttagtcatcatgttaggtctgtgtaccctaaatcagcatattactcataaatcattaattaatataagcataggaaatggtcttaaaagatactgcattcattcatcagatatttattccatgcctactctatgctaggcactgtgctagatggtatgaaaacttattaggaacctttttgtttttgagaccattgcattctggctggtttgtgctggtttaacgacatctaagaaggtttagaaatggtgagaccaaaacaataactgttaatgatggacagcattattaggaaccctgtagtatgatatttaacaatataggcttcaagaagggctggtcctaagagggggcagaaatgaatgaccaggttaaatccctctacatgtggtttctgtttgaaaaaaagaaaactgacatttgaacaggacttttaatttgtttaaaactctggtaattacttgtaacagtagaaaatagaagtcattcttattttagaaaaagtgacagaagcagtccagtaagattatatgtttctgtttctggtaaataccatatatgatcctcgaaatgataatatctccagaatattgttttcacccaaatttgagtagatattttaaacacctaacaaagtaaagggctaaaagccattcagatagcagtaaaacattctgtatgatgtgcaataaaacatccaagatcttttttgaaagttttatttataatatacatttttgtatgagaaaggtgattggtacagggtgcctattttagtcatggatcaaaatttgtgtaacttgcagggctttctttctttttcttcaaatttacaagggttcattttggaaactacattttaaactttggaatcaaattgtttcttatttgggaggataatgtatatacattggtattatgttaaataataaaattgttctaatttggtgccatttcctg

SEQ ID NO: 389504 - DNA, 3490 bp, Homo sapiens
ggaaaaatagaggacagtacgcttgtcatgtcctatgtggcagctggttgtggaaaaggagcaaagttaatcaagtaagaacagcttttacagtccaacccggtcctggaagcttttggaaatgccaaaactgtaaggaatgacaactcctctagatttggcaaatatatggatattgaatttgactttaaaggcgatccactaggaggagtaataagtaactatcttttagagaaatctcgggttgttaaacagccaagaggtgaaagaaacttccatgtgttctatcagctgctctctggtgcctctgaagagctcctcaataaacttaagcttgagagggatttcagcaggtataactacctgagtctggattcggccaaagtgaatggagtggatgatgcagcaaattttagaaccgtgcggaatgccatgcagattgtgggctttatggatcatgaagctgagtctgtcttggcggtggtggcagcagtgttgaaactggggaacattgagttcaagcccgaatctcgagtgaatggtctagatgaaagcaaaatcaaagataaaaatgagttaaaagaaatttgtgaattgaccggcattgatcaatcagttctagaacgagcattcagtttccgaacagttgaggccaaacaggagaaagtttcaactacactgaatgtggctcaggcttattatgcccgtgatgctctggctaaaaacctctacagcaggttgttttcatggttggtaaatcgaatcaatgaaagcattaaggcacaaacaaaagtgagaaagaaggtcatgggtgttctggacatttatggctttgagattttcgaggacaacagctttgagcagttcattattaattattgtaacgaaaagctgcaacaaatcttcattgaacttactcttaaagaagagcaggaggagtatatacgggaggatatagaatggactcacattgactacttcaataatgctatcatttgtgacctaatagaaaataacacaaatggaatcctggccatgctggatgaagagtgcctcagacctggcacagtcactgatgagaccttcttagaaaagctgaaccaagtatgtgccacccaccagcattttgaaagcaggatgagcaagtgctctcggttcctcaatgacacgtctctgcctcacagctgcttcaggatccagcattatgctggaaaggtgctgtaccaggtggaaggattcgttgacaaaaacaatgaccttctctatcgagacctgtcccaagccatgtggaaggccagccatgccctcatcaagtctttgttccccgaagggaatcccgccaagatcaacctgaaaaggcctcctacagcaggctcacagttcaaggcatccgtggccactctgatgaaaaacctacagaccaagaacccaaactatattaggtgtatcaaaccgaatgataaaaaagcagcacacatcttcaacgaggctctagtgtgtcatcagatcaggtacctggggcttttggagaacgtccgagtgcggagggcaggctacgccttcaggcaggcctatgaaccttgcctagaaagatacaaaatgctttgtaaacaaacatggcctcattggaaaggaccagccaggtctggtgtggaggtcctatttaatgaattagaaattcccgtggaagaatactcctttggtagatcaaagatattcatccgaaacccaagaacattattcaaattagaagacctgaggaagcaacgcctggaggacttggccactctcattcagaagatatatcgggggtggaaatgccgcacacacttcctgctaatgaaaaaaagccaaattgtgattgccgcctggtacaggagatatgcgcaacaaaagaggtaccagcagacaaagagttccgccttagtaattcagtcttatatccggggttggaaggctcgaaaaattctgcgggaactgaagcatcaaaagcgctgtaaggaagcagtcacgaccattgctgcatattggcatgggacccaggtacgtagagaatacaggaaattcttcagagccaatgctggaaagaaaatctatgagtttacgcttcagagaattgtgcaaaaatacttcttggaaatgaaaaataagatgccttccttatctccaatagacaagaattggccctcaagaccttacttattcttggattctactcacaaggagctaaaaaggattttccacttgtggaggtgtaaaaaatacagggaccaattcacagaccagcagaaacttatttatgaagagaaactagaagccagtgaactcttcaaagacaagaaggctttatacccatctagtgttgggcgaccatttcaaggggcttacctggaaatcaacaagaaccccaagtataagaaactcaaagatgccattgaagaaaagatcatcattgctgaagtcgtgaacaaaattaaccgtgctaatgggaagagtacatctcggattttcctcttaacaaacaataatctccttcttgctgaccaaaagtctggacaaatcaagtcagaggttccactggtggatgtgaccaaggtatcaatgagctcacaaaatgatggcttcttcgccgtccacctcaaagagggctcagaagcagctagtaaaggagactttctcttcagcagtgatcacctgattgaaatggccaccaagctctatcgcacaactctcagccaaaccaaacagaagctcaatattgagatttccgatgagttcctggtacagttcagacaggacaaagtatgtgtgaacattattaggaaccctgtagtatgatatttaacaatataggcttcaagaagggctggtcctaagagggggcagaaatgaatgaccaggttaaatccctctacatgtggtttctgtttgaaaaaaagaaaactgacatttgaacaggacttttaatttgtttaaaactctggtaattacttgtaacagtagaaaatagaagtcattcttattttagaaaaagtgacagaagcagtccagtaagattatatgtttctgtttctggtaaataccatatatgatcctcgaaatgataatatctccagaatattgttttcacccaaatttgagtagatattttaaacacctaacaaagtaaagggctaaaagccattcagatagcagtaaaacattctgtatgatgtgcaataaaacatccaagatcttttttgaaagttttatttataatatacatttttgtatgagaaaggtgattggtacagggtgcctattttagtcatggatcaaaatttgtgtaacttgcagggctttctttctttttcttcaaatttacaagggttcattttggaaactacattttaaactttggaatcaaattgtttcttatttgggaggataatgtatatacattggtattatgttaaataataaaattgttctaatttggtgccatttcctg

SEQ ID NO: 389505 - DNA, 2868 bp, Homo sapiens
ggaaaaatagaggacagtacgcttgtcatgtcctatgtggcagctggttgtggaaaaggagcaaagttaatcaagtaagaacagcttttacagtccaacccggtcctggaagcttttggaaatgccaaaactgtaaggaatgacaactcctctagatttggcaaatatatggatattgaatttgactttaaaggcgatccactaggaggagtaataagtaactatcttttagagaaatctcgggttgttaaacagccaagaggtgaaagaaacttccatgtgttctatcagctgctctctggtgcctctgaagagctcctcaataaacttaagcttgagagggatttcagcaggtataactacctgagtctggattcggccaaagtgaatggagtggatgatgcagcaaattttagaaccgtgcggaatgccatgcagattgtgggctttatggatcatgaagctgagtctgtcttggcggtggtggcagcagtgttgaaactggggaacattgagttcaagcccgaatctcgagtgaatggtctagatgaaagcaaaatcaaagataaaaatgagttaaaagaaatttgtgaattgaccggcattgatcaatcagttctagaacgagcattcagtttccgaacagttgaggccaaacaggagaaagtttcaactacactgaatgtggctcaggcttattatgcccgtgatgctctggctaaaaacctctacagcaggttgttttcatggttggtaaatcgaatcaatgaaagcattaaggcacaaacaaaagtgagaaagaaggtcatgggtgttctggacatttatggctttgagattttcgaggacaacagctttgagcagttcattattaattattgtaacgaaaagctgcaacaaatcttcattgaacttactcttaaagaagagcaggaggagtatatacgggaggatatagaatggactcacattgactacttcaataatgctatcatttgtgacctaatagaaaataacacaaatggaatcctggccatgctggatgaagagtgcctcagacctggcacagtcactgatgagaccttcttagaaaagctgaaccaagtatgtgccacccaccagcattttgaaagcaggatgagcaagtgctctcggttcctcaatgacacgtctctgcctcacagctgcttcaggatccagcattatgctggaaaggtgctgtaccaggtggaaggattcgttgacaaaaacaatgaccttctctatcgagacctgtcccaagccatgtggaaggccagccatgccctcatcaagtctttgttccccgaagggaatcccgccaagatcaacctgaaaaggcctcctacagcaggctcacagttcaaggcatccgtggccactctgatgaaaaacctacagaccaagaacccaaactatattaggtgtatcaaaccgaatgataaaaaagcagcacacatcttcaacgaggctctagtgtgtcatcagatcaggtacctggggcttttggagaacgtccgagtgcggagggcaggctacgccttcaggcaggcctatgaaccttgcctagaaagatacaaaatgctttgtaaacaaacatggcctcattggaaaggaccagccaggtctggtgtggaggtcctatttaatgaattagaaattcccgtggaagaatactcctttggtagatcaaagatattcatccgaaacccaagaacattattcaaattagaagacctgaggaagcaacgcctggaggacttggccactctcattcagaagatatatcgggggtggaaatgccgcacacacttcctgctaatgaaaaaaagccaaattgtgattgccgcctggtacaggagatatgcgcaacaaaagaggtaccagcagacaaagagttccgccttagtaattcagtcttatatccggggttggaaggctcgaaaaattctgcgggaactgaagcatcaaaagcgctgtaaggaagcagtcacgaccattgctgcatattggcatgggacccaggtacgtagagaatacaggaaattcttcagagccaatgctggaaagaaaatctatgagtttacgcttcagagaattgtgcaaaaatacttcttggaaatgaaaaataagatgccttccttatctccaatagacaagaattggccctcaagaccttacttattcttggattctactcacaaggagctaaaaaggattttccacttgtggaggtgtaaaaaatacagggaccaattcacagaccagcagaaacttatttatgaagagaaactagaagccagtgaactcttcaaagacaagaaggctttatacccatctagtgttgggcgaccatttcaaggggcttacctggaaatcaacaagaaccccaagtataagaaactcaaagatgccattgaagaaaagatcatcattgctgaagtcgtgaacaaaattaaccgtgctaatgggaagagtacatctcggattttcctcttaacaaacaataatctccttcttgctgaccaaaagtctggacaaatcaagtcagaggttccactggtggatgtgaccaaggtatcaatgagctcacaaaatgatggcttcttcgccgtccacctcaaagagggctcagaagcagctagtaaaggagactttctcttcagcagtgatcacctgattgaaatggtcgccaatccgcggattggcgaccatttcaagcttttcaattggcaatacttagaaccttactgtagtgacctgattttaaataccatattatatttactaagttaagagctagtttttactctcttccataatttcattacatgaatgtaagatgatggc

SEQ ID NO: 389506 - DNA, 1505 bp, Homo sapiens
tgggggttagagggggcactacaggctatgaatgtgggaaaagagggctcagaagcagctagtaaaggagactttctcttcagcagtgatcacctgattgaaatggccaccaagctctatcgcacaactctcagccaaaccaaacagaagctcaatattgagatttccgatgagttcctggtacagttcagacaggacaaagtatgtgtgaagtttattcagggaaaccagaaaaatgggagtgtcccaacatgtaaacgaaaaaacaaccgtctccttgaagttgctgtcccttaactggcgcctcctctctactttcatggacttgttcctttgtaatagtgcaatttggttttgttttatttggggttcattgtatgtttgggaatcaccaaaggcttttagagttctttggcaaaataaaaatatttgactaatcaatttttattattggaatagttttaacctttcaaatacatgttctgtcctggagcaggattgtagaaactaacagtgtctattttcatgtctgatgtgttcttcctttagtcatcatgttaggtctgtgtaccctaaatcagcatattactcataaatcattaattaatataagcataggaaatggtcttaaaagatactgcattcattcatcagatatttattccatgcctactctatgctaggcactgtgctagatggtatgaaaacttattaggaacctttttgtttttgagaccattgcattctggctggtttgtgctggtttaacgacatctaagaaggtttagaaatggtgagaccaaaacaataactgttaatgatggacagcattattaggaaccctgtagtatgatatttaacaatataggcttcaagaagggctggtcctaagagggggcagaaatgaatgaccaggttaaatccctctacatgtggtttctgtttgaaaaaaagaaaactgacatttgaacaggacttttaatttgtttaaaactctggtaattacttgtaacagtagaaaatagaagtcattcttattttagaaaaagtgacagaagcagtccagtaagattatatgtttctgtttctggtaaataccatatatgatcctcgaaatgataatatctccagaatattgttttcacccaaatttgagtagatattttaaacacctaacaaagtaaagggctaaaagccattcagatagcagtaaaacattctgtatgatgtgcaataaaacatccaagatcttttttgaaagttttatttataatatacatttttgtatgagaaaggtgattggtacagggtgcctattttagtcatggatcaaaatttgtgtaacttgcagggctttctttctttttcttcaaatttacaagggttcattttggaaactacattttaaactttggaatcaaattgtttcttatttgggaggataatgtatatacattggtattatgttaaataataaaattgttctaatttggtgccatttcctg

SEQ ID NO: 389507 - DNA, 2852 bp, Homo sapiens
ggaaaaatagaggacagtacgcttgtcatgtcctatgtggcagctggttgtggaaaaggagcaaagttaatcaagtaagaacagcttttacagtccaacccggtcctggaagcttttggaaatgccaaaactgtaaggaatgacaactcctctagatttggcaaatatatggatattgaatttgactttaaaggcgatccactaggaggagtaataagtaactatcttttagagaaatctcgggttgttaaacagccaagaggtgaaagaaacttccatgtgttctatcagctgctctctggtgcctctgaagagctcctcaataaacttaagcttgagagggatttcagcaggtataactacctgagtctggattcggccaaagtgaatggagtggatgatgcagcaaattttagaaccgtgcggaatgccatgcagattgtgggctttatggatcatgaagctgagtctgtcttggcggtggtggcagcagtgttgaaactggggaacattgagttcaagcccgaatctcgagtgaatggtctagatgaaagcaaaatcaaagataaaaatgagttaaaagaaatttgtgaattgaccggcattgatcaatcagttctagaacgagcattcagtttccgaacagttgaggccaaacaggagaaagtttcaactacactgaatgtggctcaggcttattatgcccgtgatgctctggctaaaaacctctacagcaggttgttttcatggttggtaaatcgaatcaatgaaagcattaaggtactgaatttctatgagcaaaatcagttgtaataaatggtattcacagtataaacattaagttgaagaaagtttaaatttataatcaaataattgattgccacttacaaagattattccttaaaaagagtgtaccatgtataagattgaaatttgtcagggattttgtttattttgttttgccatgtgtgttgcttctgactggtgaatagtctgatggtctttgtggagttactctgggagtcggcgtcccaggttttggcctggctcacctggtaactagtggtacacactttgctgaaaaggtcactttacttcactaggtcatgatctaatcattactaaaatgagagtgttggactaggtgattttgaaaggcaccactaatgccttctttaaatatatcacctattattaaaatttctaaaagagttctataccaatgcctcatctcatacattttttaaaaaacaactaaattagttattttcttacttaagaaacataattaatttgtaatatatatctatgttccttggatgcttgtagtgttatatttcatgccttaattaaccctttaatttgaaactttttaaaggcacaaacaaaagtgagaaagaaggtcatgggtgttctggacatttatggctttgagattttcgaggacaacagctttgagcagttcattattaattattgtaacgaaaagctgcaacaaatcttcattgaacttactcttaaagaagagcaggaggagtatatacgggaggatatagaatggactcacattgactacttcaataatgctatcatttgtgacctaatagaaaataacacaaatggaatcctggccatgctggatgaagagcgcctcctctctactttcatggacttgttcctttgtaatagtgcaatttggttttgttttatttggggttcattgtatgtttgggaatcaccaaaggcttttagagttctttggcaaaataaaaatatttgactaatcaatttttattattggaatagttttaacctttcaaatacatgttctgtcctggagcaggattgtagaaactaacagtgtctattttcatgtctgatgtgttcttcctttagtcatcatgttaggtctgtgtaccctaaatcagcatattactcataaatcattaattaatataagcataggaaatggtcttaaaagatactgcattcattcatcagatatttattccatgcctactctatgctaggcactgtgctagatggtatgaaaacttattaggaacctttttgtttttgagaccattgcattctggctggtttgtgctggtttaacgacatctaagaaggtttagaaatggtgagaccaaaacaataactgttaatgatggacagcattattaggaaccctgtagtatgatatttaacaatataggcttcaagaagggctggtcctaagagggggcagaaatgaatgaccaggttaaatccctctacatgtggtttctgtttgaaaaaaagaaaactgacatttgaacaggacttttaatttgtttaaaactctggtaattacttgtaacagtagaaaatagaagtcattcttattttagaaaaagtgacagaagcagtccagtaagattatatgtttctgtttctggtaaataccatatatgatcctcgaaatgataatatctccagaatattgttttcacccaaatttgagtagatattttaaacacctaacaaagtaaagggctaaaagccattcagatagcagtaaaacattctgtatgatgtgcaataaaacatccaagatcttttttgaaagttttatttataatatacatttttgtatgagaaaggtgattggtacagggtgcctattttagtcatggatcaaaatttgtgtaacttgcagggctttctttctttttcttcaaatttacaagggttcattttggaaactacattttaaactttggaatcaaattgtttcttatttgggaggataatgtatatacattggtattatgttaaataataaaattgttctaatttggtgccatttcctg

SEQ ID NO: 389508 - DNA, 2169 bp, Homo sapiens
ggaaaaatagaggacagtacgcttgtcatgtcctatgtggcagctggttgtggaaaaggagcaaagttaatcaagtaagaacagcttttacagtccaacccggtcctggaagcttttggaaatgccaaaactgtaaggaatgacaactcctctagatttggcaaatatatggatattgaatttgactttaaaggcgatccactaggaggagtaataagtaactatcttttagagaaatctcgggttgttaaacagccaagaggtgaaagaaacttccatgtgttctatcagctgctctctggtgcctctgaagagctcctcaataaacttaagcttgagagggatttcagcaggtataactacctgagtctggattcggccaaagtgaatggagtggatgatgcagcaaattttagaaccgtgcggaatgccatgcagattgtgggctttatggatcatgaagctgagtctgtcttggcggtggtggcagcagtgttgaaactggggaacattgagttcaagcccgaatctcgagtgaatggtctagatgaaagcaaaatcaaagataaaaatgagttaaaagaaatttgtgaattgaccggcattgatcaatcagttctagaacgagcattcagtttccgaacagttgaggccaaacaggagaaagtttcaactacactgaatgtggctcaggcttattatgcccgtgatgctctggctaaaaacctctacagcaggttgttttcatggttggtaaatcgaatcaatgaaagcattaaggcacaaacaaaagtgagaaagaaggtcatgggtgttctggacatttatggctttgagattttcgaggacaacagctttgagcagttcattattaattattgtaacgaaaagctgcaacaaatcttcattgaacttactcttaaagaagagcaggaggagtatatacgggaggatatagaatggactcacattgactacttcaataatgctatcatttgtgacctaatagaaaataacacaaatggaatcctggccatgctggatgaagagtgcctcagacctggcacagtcactgatgagaccttcttagaaaagctgaaccaagtatgtgccacccaccagcattttgaaagcaggatgagcaagtgctctcggttcctcaatgacacgtctctgcctcacagctgcttcaggatccagcattatgctggaaaggtgctgtaccaggtggaaggattcgttgacaaaaacaatgaccttctctatcgagacctgtcccaagccatgtggaaggccagccatgccctcatcaagtctttgttccccgaagggaatcccgccaagatcaacctgaaaaggcctcctacagcaggctcacagttcaaggcatccgtggccactctgatgaaaaacctacagaccaagaacccaaactatattaggtgtatcaaaccgaatgataaaaaagcagcacacatcttcaacgaggctctagtgtgtcatcagatcaggtacctggggcttttggagaacgtccgagtgcggagggcaggctacgccttcaggcaggcctatgaaccttgcctagaaagatacaaaatgctttgtaaacaaacatggcctcattggaaaggaccagccaggtctggtgtggaggtcctatttaatgaattagaaattcccgtggaagaatactcctttggtagatcaaagatattcatccgaaacccaagaacattattcaaattagaagacctgaggaagcaacgcctggaggacttggccactctcattcagaagatatatcgggggtggaaatgccgcacacacttcctgctaatgaaaaaaagccaaattgtgattgccgcctggtacaggagatatgcgcaacaaaagaggtaccagcagacaaagagttccgccttagtaattcagtcttatatccggggttggaaggctcgaaaaattctgcgggaactgaagcatcaaaagcgctgtaaggaagcagtcacgaccattgctgcatattggcatgggacccagcacgaagggaactgagatggctgcagtgaggagaaatcccgggaactgtattgacacaaagattcttattgcacttgtattttttgtattaaagtttgcatggtttctaataaaggattcaaacat

SEQ ID NO: 389509 - DNA, 1578 bp, Homo sapiens
  misc_feature (1427)..(1427): n is a, c, g, or t
  misc_feature (1451)..(1451): n is a, c, g, or t
  misc_feature (1457)..(1457): n is a, c, g, or t
  misc_feature (1471)..(1471): n is a, c, g, or t
  misc_feature (1478)..(1478): n is a, c, g, or t
  misc_feature (1491)..(1491): n is a, c, g, or t
  misc_feature (1513)..(1513): n is a, c, g, or t
  misc_feature (1533)..(1533): n is a, c, g, or t
ggaaaaatagaggacagtacgcttgtcatgtcctatgtggcagctggttgtggaaaaggagcaaagttaatcaagtaagaacagcttttacagtccaacccggtcctggaagcttttggaaatgccaaaactgtaaggaatgacaactcctctagatttggcaaatatatggatattgaatttgactttaaaggcgatccactaggaggagtaataagtaactatcttttagagaaatctcgggttgttaaacagccaagaggtgaaagaaacttccatgtgttctatcagctgctctctggtgcctctgaagagctcctcaataaacttaagcttgagagggatttcagcaggtataactacctgagtctggattcggccaaagtgaatggagtggatgatgcagcaaattttagaaccgtgcggaatgccatgcagattgtgggctttatggatcatgaagctgagtctgtcttggcggtggtggcagcagtgttgaaactggggaacattgagttcaagcccgaatctcgagtgaatggtctagatgaaagcaaaatcaaagataaaaatgagttaaaagaaatttgtgaattgaccggcattgatcaatcagttctagaacgagcattcagtttccgaacagttgaggccaaacaggagaaagtttcaactacactgaatgtggctcaggcttattatgcccgtgatgctctggctaaaaacctctacagcaggttgttttcatggttggtaaatcgaatcaatgaaagcattaaggcacaaacaaaagtgagaaagaaggtcatgggtgttctggacatttatggctttgagattttcgaggacaacagctttgagcagttcattattaattattgtaacgaaaagctgcaacaaatcttcattgaacttactcttaaagaagagcaggaggagtatatacgggaggatatagaatggactcacattgactacttcaataatgctatcatttgtgacctaatagaaaataacacaaatggaatcctggccatgctggatgaagagtgcctcagacctggcacagtcactgatgagaccttcttagaaaagctgaaccaagtatgtgccacccaccagcattttgaaagcaggatgagcaagtgctctcggttcctcaatgacacgtctctgcctcacagctgcttcaggatccagcattatgctggaaaggtgctgtaccaggtggaaggattcgttgacaaaaacaatgaccttctctatcgagacctgtcccaagccatgtggaaggccagccatgccctcatcaagtctttgttccccgaagggaatcccgccaagatcaacctgaaaaggcctcctacagcaggctcacagttcaaggcatccgtggccactctgatgagcagacacatctcaacgangtctagtgtgcattcaggacctgngctttngagaacgtcgatcngaggcangtacgcttcagcngctatgacctgctagaagtcanatgttgtacaacatgctatngaagacagcagttgtgtgaggctatatgatagtcgtgagtctctt

SEQ ID NO: 389510 - DNA, 1649 bp, Homo sapiens
ggaaaaatagaggacagtacgcttgtcatgtcctatgtggcagctggttgtggaaaaggagcaaagttaatcaagtaagaacagcttttacagtccaacccggtcctggaagcttttggaaatgccaaaactgtaaggaatgacaactcctctagatttggcaaatatatggatattgaatttgactttaaaggcgatccactaggaggagtaataagtaactatcttttagagaaatctcgggttgttaaacagccaagaggtgaaagaaacttccatgtgttctatcagctgctctctggtgcctctgaagagctcctcaataaacttaagcttgagagggatttcagcaggtataactacctgagtctggattcggccaaagtgaatggagtggatgatgcagcaaattttagaaccgtgcggaatgccatgcagattgtgggctttatggatcatgaagctgagtctgtcttggcggtggtggcagcagtgttgaaactggggaacattgagttcaagcccgaatctcgagtgaatggtctagatgaaagcaaaatcaaagataaaaatgagttaaaagaaatttgtgaattgaccggcattgatcaatcagttctagaacgagcattcagtttccgaacagttgaggccaaacaggagaaagtttcaactacactgaatgtggctcaggcttattatgcccgtgatgctctggctaaaaacctctacagcaggttgttttcatggttggtaaatcgaatcaatgaaagcattaaggtactgaatttctatgagcaaaatcagttgtaataaatggtattcacagtataaacattaagttgaagaaagtttaaatttataatcaaataattgattgccacttacaaagattattccttaaaaagagtgtaccatgtataagattgaaatttgtcagggattttgtttattttgttttgccatgtgtgttgcttctgactggtgaatagtctgatggtctttgtggagttactctgggagtcggcgtcccaggttttggcctggctcacctggtaactagtggtacacactttgctgaaaaggtcactttacttcactaggtcatgatctaatcattactaaaatgagagtgttggactaggtgattttgaaaggcaccactaatgccttctttaaatatatcacctattattaaaatttctaaaagagttctataccaatgcctcatctcatacattttttaaaaaacaactaaattagttattttcttacttaagaaacataattaatttgtaatatatatctatgttccttggatgcttgtagtgttatatttcatgccttaattaaccctttaatttgaaactttttaaaggcacaaacaaaagtgagaaagaaggtcatgggtgttctggacatttatggctttgagattttcgaggtaagatttaaaattttttttgtattgtctttagtagagtggaatggttggaaattaaatcctgtattatgtagacattataagtaactgtaactttgaatctacaaataatccttgtgtagatgtaacacactatcactttgaatctgccaacaaatctttgtgtagatgtaacaaaatttggttgtgtattcctgcatgtgtg

SEQ ID NO: 389511 - DNA, 735 bp, Homo sapiens
gcactctgaaggggagacctaatgccattgcaggagcacttcagctccaaacttgagcgttgcaatcagaacaagaacccgaggaaaagcctgcaaaatgagcctgctgcgatatagggtgtgcttttggacagttatacataagaatttttttcttttttcttttttcttttgtttgagacagtgtctcactctgttgcccaggctagagagcagtggcgtgatcattgcttactgaagcctcaaattcctgggctcaagcagtcctcccacctcagtctcctgagtagctgggactgcaggaatgcaccaccacatctggctaatttattttttgtagaggtgaagtcttgctttgttgcccaggttggtctcaaactcctggactcaggtgatcctcctgcatggacctcccaaagtgctgggattataggcatgagccactgtgcccagcctcatgagaagatttatgatgatagatagaagaattattaatttccacagtttgacaaatgataacaaatagcttttacagtttgagcatcccctatcccaaacgcttgggactagaagtatttcggactttggacttttttgaatttgggaatatttgcatatacataatgaaattccttggggatgagacacaagtctaaataacaagttcgtttatgtttcatatacaccttatatacaaagactgaaggtaactttatacaatatttttaataattt

SEQ ID NO: 389512 - DNA, 799 bp, Homo sapiens
gactactgattctaccttatggtgagttgtataattatttcatcatgtattacgatgtaataataatagaaatacagtgcacagtaaatgtaattcacttcagtcatcccgaaactatccccctatccccaccccggatctgtggaaaaattatcttccatgaaaccagtccctggtgccaaaaaggttggggactgctgctctaaggaagactttttcgtgccttggggactgctgctctgaagaagactctttcatgcttcctccttagcttctgatggctcctggcagtccttggcttgtggctgcatcacttcagtttctccctccgtcttcacatggccttctgtgtctgtgtctcgcatggccttcttccctgtgtctgtgtctttccatggcctacttataaggaccccagtaattggatttagggcctgccctaatccagtctgatttcatcttaactaactagatctgcaaagactctatttccaactaaagtcacattctgaggtttcaggtagacatgaagttttgggggacaccactcaacccattgcagaacccattagcagtcacttcccgttcctcaacgccccctaccccagggcaatcagtaatctactttctgtctgtttggatttgtctattctgaacatttcatataaatggaatcatagaatatgtggtcttttgtgactggcttctttcacttaacatgttttcaagatttatgttgtagcatgaatcagtactttattactatttatggaataaaaatcagttgtatggatataaa

SEQ ID NO: 389513 - DNA, 1069 bp, Homo sapiens
  misc_feature (827)..(827): n is a, c, g, or t
gactactgattctaccttatggtgagttgtataattatttcatcatgtattacgatgtaataataatagaaatacagtgcacagtaaatgtaattcacttcagtcatcccgaaactatccccctatccccaccccggatctgtggaaaaattatcttccatgaaaccagtccctggtgccaaaaaggttggggactgctgctctaaggaagactttttcgtgccttggggactgctgctctgaagaagactctttcatgcttcctccttagcttctgatggctcctggcagtccttggcttgtggctgcatcacttcagtttctccctccgtcttcacatggccttctgtgtctgtgtctcgcatggccttcttccctgtgtctgtgtctttccatggcctacttataaggaccccagtaattggatttagggcctgccctaatccagtctgatttcatcttaactaactagatctgcaaagactctatttccaactaaagtcacattctgaggtttcaggtagacatgaagttttgggggacaccactcaacccattgcagaacccattagcagtcacttcccgttcctcaacgccccctaccccagggcaatcagtaatctactttctgtctgtttggatttgtctattctgaacatttcatataaatggaatcatagaatatgtggtcttttgtgactggcttctttcacttaacatgttttcaagatttatgttgtagcatgaatcagtactttattactatttatggaataaaaatcagttgtatggatataaaaaagagaaagaagagagtatcttaatangggcggaggttatccgttagtgaggtaattagctgcatgcgcggttcaagcggcatggacctgggtacaataagcgtgggacccttcgcaggggtatgaagcgccttcctccacatgggtcgtaggagagcctccaccgagtggtgggagaattggccgcttttctttcagggccaaaaggctggtttcccaaatggcggccaacctggttacgccaatgttcggaaaataagggccagcag

SEQ ID NO: 389514 - DNA, 464 bp, Homo sapiens
tttataaagaaaagaaatttatttctcacagttctgcaggctgggaagcccaaggtcgaggggctgcctttggtgacttatggtgaggacctcgtgctgttcccgaacacagccaggaaccacgccaagaggaagatgctccagcacagccttgctgtggaccaggccgcccacagggagcaggtccattcctgggggctgactccgcctttcagagaggcgtggctccatcttcacagcctcgtagcctcttaaaggcccagcctcaaaacctcattggggcccccagccccggtaaataaattgcattcagaccatagtgccagccttttgaagccaatacttttttggtcgttcgtgcatcttttgaattggttttatttcgattttgccgtttctcttctctctggaagttacagactttccactttttggtcgttcttgcgtcttttgaattggtttta

SEQ ID NO: 389515 - DNA, 580 bp, Homo sapiens
ctaagtgtggaactaccatgtgatccagcagttccactgctgggcacgtgccccagcagcactgaaagcagggtcttgaagagatgcttgtacacccacgttgatagcagcatcaaccacagcagccaaaagggggaagccacccgagggtcggctgtcgggcgaacggatcagcaaagtgtcgtgtgcaaaacgcagtgacgtgtgactcagcctgagaagcagcgaagctggggcccgcgctgcagcgtggatgagcctcggggacactgtgccgaatgaagtaagtcagccacaaaagaacaaatgttgtaccattccacttaaaggaggtccctagagtcgtccaactgatggacacagaaagagtagaaggggctggagtctggggctggaggaagggaatggagagttagggcttaatgggaacagagcttcagtttgacaagatggaaagagttgtggaggtagataggggtgatagttgcacaacattctgaatgtatttaataccatggaaccgtgcacttaaagatgatgaagatggtaaattttgtggtgtgtgtattttactagtaaa

SEQ ID NO: 389516 - DNA, 9007 bp, Homo sapiens
atggttctcgggaggggcggggccacgctgcgggcccgggccatggccgccgccgatgcgcgaggcagttccggcgaggggggagcctcagcaggattgctgtgtgaaaaccgagctgctgggagaagagacacctatggctgccgatgaaggctcagcagagaaacaggcaggagaggcccacatggctgcggacggtgagaccaatgggtcttgtgaaaacagcgatgccagcagtcatgcaaatgctgcaaagcacactcaggacagcgcaagggtcaacccccaggatggcaccaacacactaactcggatagcggaaaatggggtttcagaaagagactcagaagcggcgaagcaaaaccacgtcactgccgacgactttgtgcagacttctgtcatcggcagcaacggatacatcttaaataagccggccctacaggcacagcccttgaggactaccagcactctggcctcttcgctgcctggccatgctgcaaaaacccttcctggaggggctggcaaaggcaggactccaagcgcttttccccagacgccagccgccccaccagccacccttggggaggggagtgctgacacagaggacaggaagctcccggcccctggcgccgacgtcaaggtccacagggcacgcaagaccatgccgaagtccgtcgtgggcctgcatgcagccagtaaagatcccagagaagttcgagaagctagagatcataaggaaccaaaagaggagatcaacaaaaacatttctgactttggacgacagcagcttttaccccccttcccatcccttcatcagtcgctacctcagaaccagtgctacatggccaccacaaaatcacagacagcagctgcagtatctcggaagaaaaaacgaagaatgggaacctatagcctggttcctaagaaaaagaccaaagtattaaaacagaggacggtgattgagatgtttaagagcataactcattccactgtgggttccaagggggagaaggacctgggcgccagcagcctgcacgtgaatggggagagcctggagatggactcggatgaggacgactcagaggagctcgaggaggacgacggccatggtgcagagcaggcggccgcgttccccacagaggacagcaggacttccaaggagagcatgtcggaggctgatcgcgcccagaagatggacggggagtccgaggaggagcaggagtccgtggacaccggggaggaggaggaaggcggtgacgagtctgacctgagttcggaatccagcattaagaagaaatttctcaagaggaaaggaaagaccgacagtccctggatcaagccagccaggaaaaggaggcggagaagtagaaagaagcccagcggtgccctcggttctgagtcgtataagtcatctgcaggaagcgctgagcagacggcaccaggagacagcacagggtacatggaagtttctctggactccctggatctccgagtcaaaggaattctgtcttcacaagcagaagggttggccaacggtccagatgtgctggagacagacggcctccaggaagtgcctctctgcagctgccggatggaaacaccgaagagtcgagagatcaccacactggccaacaaccagtgcatggctacagagagcgtggaccatgaattgggccggtgcacaaacagcgtggtcaagtatgagctgatgcgcccctccaacaaggccccgctcctcgtgctgtgtgaagaccaccggggccgcatggtgaagcaccagtgctgtcctggctgtggctacttctgcacagcgggtaattttatggagtgtcagcccgagagcagcatctctcaccgtttccacaaagactgtgcctctcgagtcaataacgccagctattgtccccactgtggggaggagagctccaaggccaaagaggtgacgatagctaaagcagacaccacctcgaccgtgacaccagtccccgggcaggagaagggctcggccctggagggcagggccgacaccacaacgggcagtgctgccgggccaccactctcggaggacgacaagctgcagggtgcagcctcccacgtgcccgagggctttgatccaacgggacctgctgggcttgggaggccaactcccggcctttcccagggaccagggaaggaaaccttggagagcgctctcatcgccctcgactcggaaaaacccaagaagcttcgcttccacccaaagcagctgtacttctccgccaggcaaggggagcttcagaaggtgctcctcatgctggtggacggaattgaccccaacttcaaaatggagcaccagaataagcgctctccactgcacgccgcggcagaggctggacacgtggacatctgccacatgctggttcaggcgggcgctaatattgacacctgctcagaagaccagaggaccccgttgatggaagcagccgaaaacaaccatctggaagcagtgaagtacctcatcaaggctggggccctggtggatcccaaggacgcagagggctctacgtgtttgcacctggctgccaagaaaggccactacgaagtggtccagtacctgctttcaaatggacagatggacgtcaactgtcaggatgacggaggctggacacccatgatctgggccacagagtacaagcacgtggacctcgtgaagctgctgctgtccaagggctctgacatcaacatccgagacaacgaggagaacatttgcctgcactgggcggcgttctccggctgcgtggacatagccgagatcctgctggctgccaagtgcgacctccacgccgtgaacatccacggagactcgccactgcacattgccgcccgggagaaccgctacgactgtgtcgtcctctttctttctcgggattcagatgtcaccttaaagaacaaggaaggagagacgcccctgcagtgtgcgagcctcaactctcaggtgtggagcgctctgcagatgagcaaggctctgcaggactcggcccccgacaggcccagccccgtggagaggatagtgagcagggacatcgctcgaggctacgagcgcatccccatcccctgtgtcaacgccgtggacagcgagccatgccccagcaactacaagtacgtctctcagaactgcgtgacgtcccccatgaacatcgacagaaatatcactcatctgcagtactgcgtgtgcatcgacgactgctcctccagcaactgcatgtgcggccagctcagcatgcgctgctggtacgacaaggatggccggctcctgccagagttcaacatggcggagcctcccttgatcttcgaatgcaaccacgcgtgctcctgctggaggaactgccgaaatcgcgtcgtacagaatggtctcagggcaaggctgcagctctaccggacgcgggacatgggctggggcgtgcggtccctgcaggacatcccaccaggcacctttgtctgcgagtatgttggggagctgatttcagactcagaagccgacgttcgagaggaagattcttacctctttgatctcgacaataagatctcctcggcttagcagctgaagactgacgctgcctgatcgcatcccctaggaagccccctggatcatcacggacgccgagcttcgggtaactcttatggtggagggggaaaacgtccagaaacaaatgaatcctcaggtctggaactcaggagaagactctggactgagctatggatctggaaactcctgaacagagcagtggttccaagctggagacgattttgcacctgggggacgtctgcaaggtctggagacagtttgggttgtcacaaccgaaggagtgctatggcacttagtgggatcaggcagggatgttgttaaacactgtacagtgcacaggacagccctccccaacagagttcctggaccgtacatgttaatggtgctggggctgagaggccactgatggactcgtggagctggcgaggcggccctggagtctgtggcctgtgagggaagcgggaacctctgagggagtgcagcgttcagcagcatccacccatccagccacgaggcctggcagaggggtgggagaggaggtggacctgccgtagaccccacaagcctgtcaaggagctgggacttggagtgaaaaggagagcgacgtggtcagaactgtgccttagaaagaccactctggacacagagagggggctggggagaggcgagggctgcatggtgctgtggctgcctgctggaatggcaggctaggccattgtgggcagcagtgagggaaggggtgattcgggagctggaagaggcaggacagggcaacgggctggacttgatgggtgagagaagctagtgacctttggcatgtagcaaacagttctcatgccctgccaccagcatcatgccagggcaggctgggctctcaccctcacagaatgtcccatgaataattatgtaactaaaagtgctgtgtgttgcaggtagcaactaaccggggctggtggcgtgggcagtaaaaagaatttaccaagactgttgtaggtaaagaaaggcagatttatgagagaaagtaggaaaatacgttgcaagaaagcaatgggcaatcaccaagagaggcgctggcagcaagagctgaaggcgtgctggggattttataggatggggcttgtgccggagagggccatgtgcagtgctgataacgcccaggttgcagggagctaacgcgtttttctatcagccgaggatctggtgataactgggcgtaggaagattgtgatttgtctgcacgggagggccgtgtgtcctggaccatgaagaaaggcagactcacagcttctccgctctctctgttgctttcccctggtcccaccagtctgactcctttccctcattaggactccgcagcatggacaccatgaagggaggcagagcctgtgacaggaacgctcagccagggaggcttctctgatgagggccagagctgtccaggccaggcctggggggacagacgcacattcacgttcaaggttttatttgaacatggtttcaatgaatcctctcaatgttttgaaattgcaacttagtttcagtcgtctacaaaacctttgctcccccgtagcagcaccccctttatgttgttattatcacaaattacatcttgacacactgggccaccagcaggacttataattattgtaataggcagttgtctctttaaattgcaaggcacttacagcgaaggtgcctgcatgctccctctagtcccccagggaagcagcccgagcccctgggaagggccaggtattaacttgccagacatcgcagctcattccaggctcccagccactcttccgtcagtggattccaattctgaaaatcggctcatgtccagaaacagcacgggagtgtgacttcctgctggggcagcccctcagcccctgccctctgttgactcttacatgtgaagcttcccccttgttggccactggtttcacccctcagggcaccgtgctctgttaccaccccctgttactgcccccaggcccctcggtggccgcctgcctcatcttccccacggggattagggagcccggctctgtagctgcgtctcccatcatcagcacaggctgcagagggggaacccctcgactctcccaccctcagcacaggctgcagatggggaacccctcaactctcccaccctcagcacaggctgcagacggggaacccctcgactctcccaccctcagcacaggctgcagagggggaacccctcgactctcccaccctcagcacaggctgcagacggggaacccctcgactctcccaccctcagcacaggctgcagacggggaacctcttgactctcccaccctcagcacaggctgcagacggggaatgcctcgacttcctggtgatgctggtgttctccctagggcttcctgcacacccacctccctccaccccattccttcctctaccagctgtcagagaacttgagggtttctgcttcactgtgagctggctaccacttttttcaaggcttttaagagccattccaagttttccccacctcctgggtcctgagaaagtgccccactgcagcaaatgcttccagacccttggtcaagctcctcactctcccatcccgggacttctcttctgccccagctgaggccatcaaccagttcttgcaattacttagctgtgcagcccctttctccctttttaggcttagcaccctgccccttcccgttggtctgtgctgggatttagccctcgcaattggcctggcaggcaggtgggacagctcctgaggcgagcacttgcttcctggtgagacaggtgattccgtaacatctccagcacagtagatgtgctcacctttatggggcaggaggacctgtgcacttccagaggttccagaggactggagggtcctcatcgttacatctttgggacccagattttccccaggggacccttactttctacctttgcagagctgacccaccggtggcccttcactctggttaagtgcctgtttacctctgtggtagaggcactccagtctcacaccgagcttggtaacagttctcaggatgtcggtatggggaaccagcccgctgtcctgtctttgttggtttggttgctccccactcccagtttttcaggggcctgcatcatcccaccagccacagcgctgtgctccaccgagatattttcccaggtcatcactcatgaagctcccaccgtgtgccagggaccaccggacctcccagccaaccaggacagcagcctctgcaccctttgggtggtgggcaggacagtcccagatcctctcctgatgccacttatgttagtccaggtcttccaagatgcagatgggataaaggtataaggatttggttagattttattagatgatgaaggctgagtgtggtggctcgtgcctgtaatcccagcactttgagaggccaaggtgggcagatcacttgaactcaggagttcgaggccagcctgggcaacatggtgaaacaccgtctcaacaaaaacaaacaaacaaaaattagcctggcatggtggtgtgtgcctgtagtccttgctacctgggaggctggaatgggagggttgcttgagtccaggaggtggaggttgcagtgagccgagatcatgcccctgtactgcagcctaggtgatgggaatgaagccctttcaaaaaaagagagaagattttattagatgatgaagattagatattgttgttattattagagatgaagcatggaggtagctaagaaacttggaagagcttcagaatgtgagtagctctaacttccagagaggaagagagggaacgaaggttgactgggagtgacctagatcactaaacaacctaaggaaggttcaggaaagctgccagggagttcttgagccaaagaagtgtggcctcagcacaaatgcagagacagattctgagcacaagagctgaggccattggtcatgacattcccatagttggaggcctatgaagcacactttcaaggaaactgcaactgtttaaaataacagtaatgtcctatgtgtgttttttttaaaagaaaggctgaaagttaattagctcatcatccacccgaagaagcaaaatcaacctaaaacaagaggtataaagagaagcactaattagatagaaactaacatgcactggagacaatcaaaccaaaactggttctttggcaacactaatcagaatggcaaccctctgggcaggtggggaagggggagcataaataaacaatttaaaggtgggccaggtgcagtggctgacacctgtaatcccagcactttgggaggctgaggtgggaggatcacttgagcccaggagttggagaccagcctgggcaacatagcaagaccctgtctctggaaaaaatttaaaaactagctggacatggtggcatgcacctgtgatcccagctactcgggaggctgaggtgggaggctggcttgagcctgggaggttgaggctgcagtgagctgagattctaccactgcagtccagtctgggtgacagagcaagaccatgtctcaataaataaataaataaataaataaataaataaagtggacacagccatagatataacatagatttaaaagataatatgaacaattttaggccaatacatttctagaaaaatataactgcactaacactgactcaagaggaaatagagaacccgaatagtcttataactcttaaagagatagaatcagtaattaaaatcacaaacaaaacatcaggcccagtcagtgagttccactgaactttcaaaatataaattccctatagaaatgctctctaactcatttacaaggctagcataacctggatatccaaacctgatgagaatagtgcagtgcacagctgcaaaaagtctagacaagttattggtaaaccagatctgaattgtacgcaaagatgattatgtttgatttaccccaggaatgacaggttggtttaactttaggaaatcagtttatgtaagccattcccttaacacatagaaggagaaaaattaggtcatttcaatgcagaaaaagcatttgacagaatttatcacctattcgtgagaaaaactcctagaaattaagactagaggggaactttgtgacctgatgaacggtatcttttgaacaaaaaaaaaaagaacaggcctggcgcagtggctcatgcctgtaatcccagcactgtgggaggccaaggtgggcagatcaccctgaggtcagtagttcaagaccaacatggcaaaaccccatctctactaaaagtacaaaaattagccaggtgtggtggcacgcgcctataatcccagctactcaggaggctgagacaggagaattgcttgaacctgggaggtggtggaggttgcagtgagctgagatagtgccactgcacttcagcctgggcaacagatcgagatttcgtct

SEQ ID NO: 389517 - DNA, 9088 bp, Homo sapiens
tttggagttgaaaatgttgtacttttctaggagccatttccccaggccatgtggaggtcaggtatctgctggttctggcctcactctactcctcctcctcctccccgctctgtggagagggtggcttgaaggagacgggcagcaggcagttccggcgaggggggagcctcagcaggattgctgtgtgaaaaccgagctgctgggagaagagacacctatggctgccgatgaaggctcagcagagaaacaggcaggagaggcccacatggctgcggacggtgagaccaatgggtcttgtgaaaacagcgatgccagcagtcatgcaaatgctgcaaagcacactcaggacagcgcaagggtcaacccccaggatggcaccaacacactaactcggatagcggaaaatggggtttcagaaagagactcagaagcggcgaagcaaaaccacgtcactgccgacgactttgtgcagacttctgtcatcggcagcaacggatacatcttaaataagccggccctacaggcacagcccttgaggactaccagcactctggcctcttcgctgcctggccatgctgcaaaaacccttcctggaggggctggcaaaggcaggactccaagcgcttttccccagacgccagccgccccaccagccacccttggggaggggagtgctgacacagaggacaggaagctcccggcccctggcgccgacgtcaaggtccacagggcacgcaagaccatgccgaagtccgtcgtgggcctgcatgcagccagtaaagatcccagagaagttcgagaagctagagatcataaggaaccaaaagaggagatcaacaaaaacatttctgactttggacgacagcagcttttaccccccttcccatcccttcatcagtcgctacctcagaaccagtgctacatggccaccacaaaatcacagacagcagctgcagtatctcggaagaaaaaacgaagaatgggaacctatagcctggttcctaagaaaaagaccaaagtattaaaacagaggacggtgattgagatgtttaagagcataactcattccactgtgggttccaagggggagaaggacctgggcgccagcagcctgcacgtgaatggggagagcctggagatggactcggatgaggacgactcagaggagctcgaggaggacgacggccatggtgcagagcaggcggccgcgttccccacagaggacagcaggacttccaaggagagcatgtcggaggctgatcgcgcccagaagatggacggggagtccgaggaggagcaggagtccgtggacaccggggaggaggaggaaggcggtgacgagtctgacctgagttcggaatccagcattaagaagaaatttctcaagaggaaaggaaagaccgacagtccctggatcaagccagccaggaaaaggaggcggagaagtagaaagaagcccagcggtgccctcggttctgagtcgtataagtcatctgcaggaagcgctgagcagacggcaccaggagacagcacagggtacatggaagtttctctggactccctggatctccgagtcaaaggaattctgtcttcacaagcagaagggttggccaacggtccagatgtgctggagacagacggcctccaggaagtgcctctctgcagctgccggatggaaacaccgaagagtcgagagatcaccacactggccaacaaccagtgcatggctacagagagcgtggaccatgaattgggccggtgcacaaacagcgtggtcaagtatgagctgatgcgcccctccaacaaggccccgctcctcgtgctgtgtgaagaccaccggggccgcatggtgaagcaccagtgctgtcctggctgtggctacttctgcacagcgggtaattttatggagtgtcagcccgagagcagcatctctcaccgtttccacaaagactgtgcctctcgagtcaataacgccagctattgtccccactgtggggaggagagctccaaggccaaagaggtgacgatagctaaagcagacaccacctcgaccgtgacaccagtccccgggcaggagaagggctcggccctggagggcagggccgacaccacaacgggcagtgctgccgggccaccactctcggaggacgacaagctgcagggtgcagcctcccacgtgcccgagggctttgatccaacgggacctgctgggcttgggaggccaactcccggcctttcccagggaccagggaaggaaaccttggagagcgctctcatcgccctcgactcggaaaaacccaagaagcttcgcttccacccaaagcagctgtacttctccgccaggcaaggggagcttcagaaggtgctcctcatgctggtggacggaattgaccccaacttcaaaatggagcaccagaataagcgctctccactgcacgccgcggcagaggctggacacgtggacatctgccacatgctggttcaggcgggcgctaatattgacacctgctcagaagaccagaggaccccgttgatggaagcagccgaaaacaaccatctggaagcagtgaagtacctcatcaaggctggggccctggtggatcccaaggacgcagagggctctacgtgtttgcacctggctgccaagaaaggccactacgaagtggtccagtacctgctttcaaatggacagatggacgtcaactgtcaggatgacggaggctggacacccatgatctgggccacagagtacaagcacgtggacctcgtgaagctgctgctgtccaagggctctgacatcaacatccgagacaacgaggagaacatttgcctgcactgggcggcgttctccggctgcgtggacatagccgagatcctgctggctgccaagtgcgacctccacgccgtgaacatccacggagactcgccactgcacattgccgcccgggagaaccgctacgactgtgtcgtcctctttctttctcgggattcagatgtcaccttaaagaacaaggaaggagagacgcccctgcagtgtgcgagcctcaactctcaggtgtggagcgctctgcagatgagcaaggctctgcaggactcggcccccgacaggcccagccccgtggagaggatagtgagcagggacatcgctcgaggctacgagcgcatccccatcccctgtgtcaacgccgtggacagcgagccatgccccagcaactacaagtacgtctctcagaactgcgtgacgtcccccatgaacatcgacagaaatatcactcatctgcagtactgcgtgtgcatcgacgactgctcctccagcaactgcatgtgcggccagctcagcatgcgctgctggtacgacaaggatggccggctcctgccagagttcaacatggcggagcctcccttgatcttcgaatgcaaccacgcgtgctcctgctggaggaactgccgaaatcgcgtcgtacagaatggtctcagggcaaggctgcagctctaccggacgcgggacatgggctggggcgtgcggtccctgcaggacatcccaccaggcacctttgtctgcgagtatgttggggagctgatttcagactcagaagccgacgttcgagaggaagattcttacctctttgatctcgacaataagatctcctcggcttagcagctgaagactgacgctgcctgatcgcatcccctaggaagccccctggatcatcacggacgccgagcttcgggtaactcttatggtggagggggaaaacgtccagaaacaaatgaatcctcaggtctggaactcaggagaagactctggactgagctatggatctggaaactcctgaacagagcagtggttccaagctggagacgattttgcacctgggggacgtctgcaaggtctggagacagtttgggttgtcacaaccgaaggagtgctatggcacttagtgggatcaggcagggatgttgttaaacactgtacagtgcacaggacagccctccccaacagagttcctggaccgtacatgttaatggtgctggggctgagaggccactgatggactcgtggagctggcgaggcggccctggagtctgtggcctgtgagggaagcgggaacctctgagggagtgcagcgttcagcagcatccacccatccagccacgaggcctggcagaggggtgggagaggaggtggacctgccgtagaccccacaagcctgtcaaggagctgggacttggagtgaaaaggagagcgacgtggtcagaactgtgccttagaaagaccactctggacacagagagggggctggggagaggcgagggctgcatggtgctgtggctgcctgctggaatggcaggctaggccattgtgggcagcagtgagggaaggggtgattcgggagctggaagaggcaggacagggcaacgggctggacttgatgggtgagagaagctagtgacctttggcatgtagcaaacagttctcatgccctgccaccagcatcatgccagggcaggctgggctctcaccctcacagaatgtcccatgaataattatgtaactaaaagtgctgtgtgttgcaggtagcaactaaccggggctggtggcgtgggcagtaaaaagaatttaccaagactgttgtaggtaaagaaaggcagatttatgagagaaagtaggaaaatacgttgcaagaaagcaatgggcaatcaccaagagaggcgctggcagcaagagctgaaggcgtgctggggattttataggatggggcttgtgccggagagggccatgtgcagtgctgataacgcccaggttgcagggagctaacgcgtttttctatcagccgaggatctggtgataactgggcgtaggaagattgtgatttgtctgcacgggagggccgtgtgtcctggaccatgaagaaaggcagactcacagcttctccgctctctctgttgctttcccctggtcccaccagtctgactcctttccctcattaggactccgcagcatggacaccatgaagggaggcagagcctgtgacaggaacgctcagccagggaggcttctctgatgagggccagagctgtccaggccaggcctggggggacagacgcacattcacgttcaaggttttatttgaacatggtttcaatgaatcctctcaatgttttgaaattgcaacttagtttcagtcgtctacaaaacctttgctcccccgtagcagcaccccctttatgttgttattatcacaaattacatcttgacacactgggccaccagcaggacttataattattgtaataggcagttgtctctttaaattgcaaggcacttacagcgaaggtgcctgcatgctccctctagtcccccagggaagcagcccgagcccctgggaagggccaggtattaacttgccagacatcgcagctcattccaggctcccagccactcttccgtcagtggattccaattctgaaaatcggctcatgtccagaaacagcacgggagtgtgacttcctgctggggcagcccctcagcccctgccctctgttgactcttacatgtgaagcttcccccttgttggccactggtttcacccctcagggcaccgtgctctgttaccaccccctgttactgcccccaggcccctcggtggccgcctgcctcatcttccccacggggattagggagcccggctctgtagctgcgtctcccatcatcagcacaggctgcagagggggaacccctcgactctcccaccctcagcacaggctgcagatggggaacccctcaactctcccaccctcagcacaggctgcagacggggaacccctcgactctcccaccctcagcacaggctgcagagggggaacccctcgactctcccaccctcagcacaggctgcagacggggaacccctcgactctcccaccctcagcacaggctgcagacggggaacctcttgactctcccaccctcagcacaggctgcagacggggaatgcctcgacttcctggtgatgctggtgttctccctagggcttcctgcacacccacctccctccaccccattccttcctctaccagctgtcagagaacttgagggtttctgcttcactgtgagctggctaccacttttttcaaggcttttaagagccattccaagttttccccacctcctgggtcctgagaaagtgccccactgcagcaaatgcttccagacccttggtcaagctcctcactctcccatcccgggacttctcttctgccccagctgaggccatcaaccagttcttgcaattacttagctgtgcagcccctttctccctttttaggcttagcaccctgccccttcccgttggtctgtgctgggatttagccctcgcaattggcctggcaggcaggtgggacagctcctgaggcgagcacttgcttcctggtgagacaggtgattccgtaacatctccagcacagtagatgtgctcacctttatggggcaggaggacctgtgcacttccagaggttccagaggactggagggtcctcatcgttacatctttgggacccagattttccccaggggacccttactttctacctttgcagagctgacccaccggtggcccttcactctggttaagtgcctgtttacctctgtggtagaggcactccagtctcacaccgagcttggtaacagttctcaggatgtcggtatggggaaccagcccgctgtcctgtctttgttggtttggttgctccccactcccagtttttcaggggcctgcatcatcccaccagccacagcgctgtgctccaccgagatattttcccaggtcatcactcatgaagctcccaccgtgtgccagggaccaccggacctcccagccaaccaggacagcagcctctgcaccctttgggtggtgggcaggacagtcccagatcctctcctgatgccacttatgttagtccaggtcttccaagatgcagatgggataaaggtataaggatttggttagattttattagatgatgaaggctgagtgtggtggctcgtgcctgtaatcccagcactttgagaggccaaggtgggcagatcacttgaactcaggagttcgaggccagcctgggcaacatggtgaaacaccgtctcaacaaaaacaaacaaacaaaaattagcctggcatggtggtgtgtgcctgtagtccttgctacctgggaggctggaatgggagggttgcttgagtccaggaggtggaggttgcagtgagccgagatcatgcccctgtactgcagcctaggtgatgggaatgaagccctttcaaaaaaagagagaagattttattagatgatgaagattagatattgttgttattattagagatgaagcatggaggtagctaagaaacttggaagagcttcagaatgtgagtagctctaacttccagagaggaagagagggaacgaaggttgactgggagtgacctagatcactaaacaacctaaggaaggttcaggaaagctgccagggagttcttgagccaaagaagtgtggcctcagcacaaatgcagagacagattctgagcacaagagctgaggccattggtcatgacattcccatagttggaggcctatgaagcacactttcaaggaaactgcaactgtttaaaataacagtaatgtcctatgtgtgttttttttaaaagaaaggctgaaagttaattagctcatcatccacccgaagaagcaaaatcaacctaaaacaagaggtataaagagaagcactaattagatagaaactaacatgcactggagacaatcaaaccaaaactggttctttggcaacactaatcagaatggcaaccctctgggcaggtggggaagggggagcataaataaacaatttaaaggtgggccaggtgcagtggctgacacctgtaatcccagcactttgggaggctgaggtgggaggatcacttgagcccaggagttggagaccagcctgggcaacatagcaagaccctgtctctggaaaaaatttaaaaactagctggacatggtggcatgcacctgtgatcccagctactcgggaggctgaggtgggaggctggcttgagcctgggaggttgaggctgcagtgagctgagattctaccactgcagtccagtctgggtgacagagcaagaccatgtctcaataaataaataaataaataaataaataaataaagtggacacagccatagatataacatagatttaaaagataatatgaacaattttaggccaatacatttctagaaaaatataactgcactaacactgactcaagaggaaatagagaacccgaatagtcttataactcttaaagagatagaatcagtaattaaaatcacaaacaaaacatcaggcccagtcagtgagttccactgaactttcaaaatataaattccctatagaaatgctctctaactcatttacaaggctagcataacctggatatccaaacctgatgagaatagtgcagtgcacagctgcaaaaagtctagacaagttattggtaaaccagatctgaattgtacgcaaagatgattatgtttgatttaccccaggaatgacaggttggtttaactttaggaaatcagtttatgtaagccattcccttaacacatagaaggagaaaaattaggtcatttcaatgcagaaaaagcatttgacagaatttatcacctattcgtgagaaaaactcctagaaattaagactagaggggaactttgtgacctgatgaacggtatcttttgaacaaaaaaaaaaagaacaggcctggcgcagtggctcatgcctgtaatcccagcactgtgggaggccaaggtgggcagatcaccctgaggtcagtagttcaagaccaacatggcaaaaccccatctctactaaaagtacaaaaattagccaggtgtggtggcacgcgcctataatcccagctactcaggaggctgagacaggagaattgcttgaacctgggaggtggtggaggttgcagtgagctgagatagtgccactgcacttcagcctgggcaacagatcgagatttcgtct

SEQ ID NO: 389518 - DNA, 9130 bp, Homo sapiens
atggttctcgggaggggcggggccacgctgcgggcccgggccatggccgccgccgatgcgcgagataggtggtcttgctctgtggccctgctggagtgcagtggtgccatcatggctcacttcagtcttgaactcctgagctcaagtgatcctcctacttcagcctcctgagtagctgggactacaggcagttccggcgaggggggagcctcagcaggattgctgtgtgaaaaccgagctgctgggagaagagacacctatggctgccgatgaaggctcagcagagaaacaggcaggagaggcccacatggctgcggacggtgagaccaatgggtcttgtgaaaacagcgatgccagcagtcatgcaaatgctgcaaagcacactcaggacagcgcaagggtcaacccccaggatggcaccaacacactaactcggatagcggaaaatggggtttcagaaagagactcagaagcggcgaagcaaaaccacgtcactgccgacgactttgtgcagacttctgtcatcggcagcaacggatacatcttaaataagccggccctacaggcacagcccttgaggactaccagcactctggcctcttcgctgcctggccatgctgcaaaaacccttcctggaggggctggcaaaggcaggactccaagcgcttttccccagacgccagccgccccaccagccacccttggggaggggagtgctgacacagaggacaggaagctcccggcccctggcgccgacgtcaaggtccacagggcacgcaagaccatgccgaagtccgtcgtgggcctgcatgcagccagtaaagatcccagagaagttcgagaagctagagatcataaggaaccaaaagaggagatcaacaaaaacatttctgactttggacgacagcagcttttaccccccttcccatcccttcatcagtcgctacctcagaaccagtgctacatggccaccacaaaatcacagacagcagctgcagtatctcggaagaaaaaacgaagaatgggaacctatagcctggttcctaagaaaaagaccaaagtattaaaacagaggacggtgattgagatgtttaagagcataactcattccactgtgggttccaagggggagaaggacctgggcgccagcagcctgcacgtgaatggggagagcctggagatggactcggatgaggacgactcagaggagctcgaggaggacgacggccatggtgcagagcaggcggccgcgttccccacagaggacagcaggacttccaaggagagcatgtcggaggctgatcgcgcccagaagatggacggggagtccgaggaggagcaggagtccgtggacaccggggaggaggaggaaggcggtgacgagtctgacctgagttcggaatccagcattaagaagaaatttctcaagaggaaaggaaagaccgacagtccctggatcaagccagccaggaaaaggaggcggagaagtagaaagaagcccagcggtgccctcggttctgagtcgtataagtcatctgcaggaagcgctgagcagacggcaccaggagacagcacagggtacatggaagtttctctggactccctggatctccgagtcaaaggaattctgtcttcacaagcagaagggttggccaacggtccagatgtgctggagacagacggcctccaggaagtgcctctctgcagctgccggatggaaacaccgaagagtcgagagatcaccacactggccaacaaccagtgcatggctacagagagcgtggaccatgaattgggccggtgcacaaacagcgtggtcaagtatgagctgatgcgcccctccaacaaggccccgctcctcgtgctgtgtgaagaccaccggggccgcatggtgaagcaccagtgctgtcctggctgtggctacttctgcacagcgggtaattttatggagtgtcagcccgagagcagcatctctcaccgtttccacaaagactgtgcctctcgagtcaataacgccagctattgtccccactgtggggaggagagctccaaggccaaagaggtgacgatagctaaagcagacaccacctcgaccgtgacaccagtccccgggcaggagaagggctcggccctggagggcagggccgacaccacaacgggcagtgctgccgggccaccactctcggaggacgacaagctgcagggtgcagcctcccacgtgcccgagggctttgatccaacgggacctgctgggcttgggaggccaactcccggcctttcccagggaccagggaaggaaaccttggagagcgctctcatcgccctcgactcggaaaaacccaagaagcttcgcttccacccaaagcagctgtacttctccgccaggcaaggggagcttcagaaggtgctcctcatgctggtggacggaattgaccccaacttcaaaatggagcaccagaataagcgctctccactgcacgccgcggcagaggctggacacgtggacatctgccacatgctggttcaggcgggcgctaatattgacacctgctcagaagaccagaggaccccgttgatggaagcagccgaaaacaaccatctggaagcagtgaagtacctcatcaaggctggggccctggtggatcccaaggacgcagagggctctacgtgtttgcacctggctgccaagaaaggccactacgaagtggtccagtacctgctttcaaatggacagatggacgtcaactgtcaggatgacggaggctggacacccatgatctgggccacagagtacaagcacgtggacctcgtgaagctgctgctgtccaagggctctgacatcaacatccgagacaacgaggagaacatttgcctgcactgggcggcgttctccggctgcgtggacatagccgagatcctgctggctgccaagtgcgacctccacgccgtgaacatccacggagactcgccactgcacattgccgcccgggagaaccgctacgactgtgtcgtcctctttctttctcgggattcagatgtcaccttaaagaacaaggaaggagagacgcccctgcagtgtgcgagcctcaactctcaggtgtggagcgctctgcagatgagcaaggctctgcaggactcggcccccgacaggcccagccccgtggagaggatagtgagcagggacatcgctcgaggctacgagcgcatccccatcccctgtgtcaacgccgtggacagcgagccatgccccagcaactacaagtacgtctctcagaactgcgtgacgtcccccatgaacatcgacagaaatatcactcatctgcagtactgcgtgtgcatcgacgactgctcctccagcaactgcatgtgcggccagctcagcatgcgctgctggtacgacaaggatggccggctcctgccagagttcaacatggcggagcctcccttgatcttcgaatgcaaccacgcgtgctcctgctggaggaactgccgaaatcgcgtcgtacagaatggtctcagggcaaggctgcagctctaccggacgcgggacatgggctggggcgtgcggtccctgcaggacatcccaccaggcacctttgtctgcgagtatgttggggagctgatttcagactcagaagccgacgttcgagaggaagattcttacctctttgatctcgacaataagatctcctcggcttagcagctgaagactgacgctgcctgatcgcatcccctaggaagccccctggatcatcacggacgccgagcttcgggtaactcttatggtggagggggaaaacgtccagaaacaaatgaatcctcaggtctggaactcaggagaagactctggactgagctatggatctggaaactcctgaacagagcagtggttccaagctggagacgattttgcacctgggggacgtctgcaaggtctggagacagtttgggttgtcacaaccgaaggagtgctatggcacttagtgggatcaggcagggatgttgttaaacactgtacagtgcacaggacagccctccccaacagagttcctggaccgtacatgttaatggtgctggggctgagaggccactgatggactcgtggagctggcgaggcggccctggagtctgtggcctgtgagggaagcgggaacctctgagggagtgcagcgttcagcagcatccacccatccagccacgaggcctggcagaggggtgggagaggaggtggacctgccgtagaccccacaagcctgtcaaggagctgggacttggagtgaaaaggagagcgacgtggtcagaactgtgccttagaaagaccactctggacacagagagggggctggggagaggcgagggctgcatggtgctgtggctgcctgctggaatggcaggctaggccattgtgggcagcagtgagggaaggggtgattcgggagctggaagaggcaggacagggcaacgggctggacttgatgggtgagagaagctagtgacctttggcatgtagcaaacagttctcatgccctgccaccagcatcatgccagggcaggctgggctctcaccctcacagaatgtcccatgaataattatgtaactaaaagtgctgtgtgttgcaggtagcaactaaccggggctggtggcgtgggcagtaaaaagaatttaccaagactgttgtaggtaaagaaaggcagatttatgagagaaagtaggaaaatacgttgcaagaaagcaatgggcaatcaccaagagaggcgctggcagcaagagctgaaggcgtgctggggattttataggatggggcttgtgccggagagggccatgtgcagtgctgataacgcccaggttgcagggagctaacgcgtttttctatcagccgaggatctggtgataactgggcgtaggaagattgtgatttgtctgcacgggagggccgtgtgtcctggaccatgaagaaaggcagactcacagcttctccgctctctctgttgctttcccctggtcccaccagtctgactcctttccctcattaggactccgcagcatggacaccatgaagggaggcagagcctgtgacaggaacgctcagccagggaggcttctctgatgagggccagagctgtccaggccaggcctggggggacagacgcacattcacgttcaaggttttatttgaacatggtttcaatgaatcctctcaatgttttgaaattgcaacttagtttcagtcgtctacaaaacctttgctcccccgtagcagcaccccctttatgttgttattatcacaaattacatcttgacacactgggccaccagcaggacttataattattgtaataggcagttgtctctttaaattgcaaggcacttacagcgaaggtgcctgcatgctccctctagtcccccagggaagcagcccgagcccctgggaagggccaggtattaacttgccagacatcgcagctcattccaggctcccagccactcttccgtcagtggattccaattctgaaaatcggctcatgtccagaaacagcacgggagtgtgacttcctgctggggcagcccctcagcccctgccctctgttgactcttacatgtgaagcttcccccttgttggccactggtttcacccctcagggcaccgtgctctgttaccaccccctgttactgcccccaggcccctcggtggccgcctgcctcatcttccccacggggattagggagcccggctctgtagctgcgtctcccatcatcagcacaggctgcagagggggaacccctcgactctcccaccctcagcacaggctgcagatggggaacccctcaactctcccaccctcagcacaggctgcagacggggaacccctcgactctcccaccctcagcacaggctgcagagggggaacccctcgactctcccaccctcagcacaggctgcagacggggaacccctcgactctcccaccctcagcacaggctgcagacggggaacctcttgactctcccaccctcagcacaggctgcagacggggaatgcctcgacttcctggtgatgctggtgttctccctagggcttcctgcacacccacctccctccaccccattccttcctctaccagctgtcagagaacttgagggtttctgcttcactgtgagctggctaccacttttttcaaggcttttaagagccattccaagttttccccacctcctgggtcctgagaaagtgccccactgcagcaaatgcttccagacccttggtcaagctcctcactctcccatcccgggacttctcttctgccccagctgaggccatcaaccagttcttgcaattacttagctgtgcagcccctttctccctttttaggcttagcaccctgccccttcccgttggtctgtgctgggatttagccctcgcaattggcctggcaggcaggtgggacagctcctgaggcgagcacttgcttcctggtgagacaggtgattccgtaacatctccagcacagtagatgtgctcacctttatggggcaggaggacctgtgcacttccagaggttccagaggactggagggtcctcatcgttacatctttgggacccagattttccccaggggacccttactttctacctttgcagagctgacccaccggtggcccttcactctggttaagtgcctgtttacctctgtggtagaggcactccagtctcacaccgagcttggtaacagttctcaggatgtcggtatggggaaccagcccgctgtcctgtctttgttggtttggttgctccccactcccagtttttcaggggcctgcatcatcccaccagccacagcgctgtgctccaccgagatattttcccaggtcatcactcatgaagctcccaccgtgtgccagggaccaccggacctcccagccaaccaggacagcagcctctgcaccctttgggtggtgggcaggacagtcccagatcctctcctgatgccacttatgttagtccaggtcttccaagatgcagatgggataaaggtataaggatttggttagattttattagatgatgaaggctgagtgtggtggctcgtgcctgtaatcccagcactttgagaggccaaggtgggcagatcacttgaactcaggagttcgaggccagcctgggcaacatggtgaaacaccgtctcaacaaaaacaaacaaacaaaaattagcctggcatggtggtgtgtgcctgtagtccttgctacctgggaggctggaatgggagggttgcttgagtccaggaggtggaggttgcagtgagccgagatcatgcccctgtactgcagcctaggtgatgggaatgaagccctttcaaaaaaagagagaagattttattagatgatgaagattagatattgttgttattattagagatgaagcatggaggtagctaagaaacttggaagagcttcagaatgtgagtagctctaacttccagagaggaagagagggaacgaaggttgactgggagtgacctagatcactaaacaacctaaggaaggttcaggaaagctgccagggagttcttgagccaaagaagtgtggcctcagcacaaatgcagagacagattctgagcacaagagctgaggccattggtcatgacattcccatagttggaggcctatgaagcacactttcaaggaaactgcaactgtttaaaataacagtaatgtcctatgtgtgttttttttaaaagaaaggctgaaagttaattagctcatcatccacccgaagaagcaaaatcaacctaaaacaagaggtataaagagaagcactaattagatagaaactaacatgcactggagacaatcaaaccaaaactggttctttggcaacactaatcagaatggcaaccctctgggcaggtggggaagggggagcataaataaacaatttaaaggtgggccaggtgcagtggctgacacctgtaatcccagcactttgggaggctgaggtgggaggatcacttgagcccaggagttggagaccagcctgggcaacatagcaagaccctgtctctggaaaaaatttaaaaactagctggacatggtggcatgcacctgtgatcccagctactcgggaggctgaggtgggaggctggcttgagcctgggaggttgaggctgcagtgagctgagattctaccactgcagtccagtctgggtgacagagcaagaccatgtctcaataaataaataaataaataaataaataaataaagtggacacagccatagatataacatagatttaaaagataatatgaacaattttaggccaatacatttctagaaaaatataactgcactaacactgactcaagaggaaatagagaacccgaatagtcttataactcttaaagagatagaatcagtaattaaaatcacaaacaaaacatcaggcccagtcagtgagttccactgaactttcaaaatataaattccctatagaaatgctctctaactcatttacaaggctagcataacctggatatccaaacctgatgagaatagtgcagtgcacagctgcaaaaagtctagacaagttattggtaaaccagatctgaattgtacgcaaagatgattatgtttgatttaccccaggaatgacaggttggtttaactttaggaaatcagtttatgtaagccattcccttaacacatagaaggagaaaaattaggtcatttcaatgcagaaaaagcatttgacagaatttatcacctattcgtgagaaaaactcctagaaattaagactagaggggaactttgtgacctgatgaacggtatcttttgaacaaaaaaaaaaagaacaggcctggcgcagtggctcatgcctgtaatcccagcactgtgggaggccaaggtgggcagatcaccctgaggtcagtagttcaagaccaacatggcaaaaccccatctctactaaaagtacaaaaattagccaggtgtggtggcacgcgcctataatcccagctactcaggaggctgagacaggagaattgcttgaacctgggaggtggtggaggttgcagtgagctgagatagtgccactgcacttcagcctgggcaacagatcgagatttcgtct

SEQ ID NO: 389519 - DNA, 8813 bp, Homo sapiens
cccgctccacccgacggggtggggagtgctgacacagaggacaggaagctcccggcccctggcgccgacgtcaaggtccacagggcacgcaagaccatgccgaagtccgtcgtgggcctgcatgcagccagtaaagatcccagagaagttcagaagcggcgaagcaaaaccacgtcactgccgacgactttgtgcagacttctgtcatcggcagcaacggatacatcttaaataagccggccctacaggcacagcccttgaggactaccagcactctggcctcttcgctgcctggccatgctgcaaaaacccttcctggaggggctggcaaaggcaggactccaagcgcttttccccagacgccagccgccccaccagccacccttggggaggggagtgctgacacagaggacaggaagctcccggcccctggcgccgacgtcaaggtccacagggcacgcaagaccatgccgaagtccgtcgtgggcctgcatgcagccagtaaagatcccagagaagttcgagaagctagagatcataaggaaccaaaagaggagatcaacaaaaacatttctgactttggacgacagcagcttttaccccccttcccatcccttcatcagtcgctacctcagaaccagtgctacatggccaccacaaaatcacagacagcagctgcagtatctcggaagaaaaaacgaagaatgggaacctatagcctggttcctaagaaaaagaccaaagtattaaaacagaggacggtgattgagatgtttaagagcataactcattccactgtgggttccaagggggagaaggacctgggcgccagcagcctgcacgtgaatggggagagcctggagatggactcggatgaggacgactcagaggagctcgaggaggacgacggccatggtgcagagcaggcggccgcgttccccacagaggacagcaggacttccaaggagagcatgtcggaggctgatcgcgcccagaagatggacggggagtccgaggaggagcaggagtccgtggacaccggggaggaggaggaaggcggtgacgagtctgacctgagttcggaatccagcattaagaagaaatttctcaagaggaaaggaaagaccgacagtccctggatcaagccagccaggaaaaggaggcggagaagtagaaagaagcccagcggtgccctcggttctgagtcgtataagtcatctgcaggaagcgctgagcagacggcaccaggagacagcacagggtacatggaagtttctctggactccctggatctccgagtcaaaggaattctgtcttcacaagcagaagggttggccaacggtccagatgtgctggagacagacggcctccaggaagtgcctctctgcagctgccggatggaaacaccgaagagtcgagagatcaccacactggccaacaaccagtgcatggctacagagagcgtggaccatgaattgggccggtgcacaaacagcgtggtcaagtatgagctgatgcgcccctccaacaaggccccgctcctcgtgctgtgtgaagaccaccggggccgcatggtgaagcaccagtgctgtcctggctgtggctacttctgcacagcgggtaattttatggagtgtcagcccgagagcagcatctctcaccgtttccacaaagactgtgcctctcgagtcaataacgccagctattgtccccactgtggggaggagagctccaaggccaaagaggtgacgatagctaaagcagacaccacctcgaccgtgacaccagtccccgggcaggagaagggctcggccctggagggcagggccgacaccacaacgggcagtgctgccgggccaccactctcggaggacgacaagctgcagggtgcagcctcccacgtgcccgagggctttgatccaacgggacctgctgggcttgggaggccaactcccggcctttcccagggaccagggaaggaaaccttggagagcgctctcatcgccctcgactcggaaaaacccaagaagcttcgcttccacccaaagcagctgtacttctccgccaggcaaggggagcttcagaaggtgctcctcatgctggtggacggaattgaccccaacttcaaaatggagcaccagaataagcgctctccactgcacgccgcggcagaggctggacacgtggacatctgccacatgctggttcaggcgggcgctaatattgacacctgctcagaagaccagaggaccccgttgatggaagcagccgaaaacaaccatctggaagcagtgaagtacctcatcaaggctggggccctggtggatcccaaggacgcagagggctctacgtgtttgcacctggctgccaagaaaggccactacgaagtggtccagtacctgctttcaaatggacagatggacgtcaactgtcaggatgacggaggctggacacccatgatctgggccacagagtacaagcacgtggacctcgtgaagctgctgctgtccaagggctctgacatcaacatccgagacaacgaggagaacatttgcctgcactgggcggcgttctccggctgcgtggacatagccgagatcctgctggctgccaagtgcgacctccacgccgtgaacatccacggagactcgccactgcacattgccgcccgggagaaccgctacgactgtgtcgtcctctttctttctcgggattcagatgtcaccttaaagaacaaggaaggagagacgcccctgcagtgtgcgagcctcaactctcaggtgtggagcgctctgcagatgagcaaggctctgcaggactcggcccccgacaggcccagccccgtggagaggatagtgagcagggacatcgctcgaggctacgagcgcatccccatcccctgtgtcaacgccgtggacagcgagccatgccccagcaactacaagtacgtctctcagaactgcgtgacgtcccccatgaacatcgacagaaatatcactcatctgcagtactgcgtgtgcatcgacgactgctcctccagcaactgcatgtgcggccagctcagcatgcgctgctggtacgacaaggatggccggctcctgccagagttcaacatggcggagcctcccttgatcttcgaatgcaaccacgcgtgctcctgctggaggaactgccgaaatcgcgtcgtacagaatggtctcagggcaaggctgcagctctaccggacgcgggacatgggctggggcgtgcggtccctgcaggacatcccaccaggcacctttgtctgcgagtatgttggggagctgatttcagactcagaagccgacgttcgagaggaagattcttacctctttgatctcgacaataagatctcctcggcttagcagctgaagactgacgctgcctgatcgcatcccctaggaagccccctggatcatcacggacgccgagcttcgggtaactcttatggtggagggggaaaacgtccagaaacaaatgaatcctcaggtctggaactcaggagaagactctggactgagctatggatctggaaactcctgaacagagcagtggttccaagctggagacgattttgcacctgggggacgtctgcaaggtctggagacagtttgggttgtcacaaccgaaggagtgctatggcacttagtgggatcaggcagggatgttgttaaacactgtacagtgcacaggacagccctccccaacagagttcctggaccgtacatgttaatggtgctggggctgagaggccactgatggactcgtggagctggcgaggcggccctggagtctgtggcctgtgagggaagcgggaacctctgagggagtgcagcgttcagcagcatccacccatccagccacgaggcctggcagaggggtgggagaggaggtggacctgccgtagaccccacaagcctgtcaaggagctgggacttggagtgaaaaggagagcgacgtggtcagaactgtgccttagaaagaccactctggacacagagagggggctggggagaggcgagggctgcatggtgctgtggctgcctgctggaatggcaggctaggccattgtgggcagcagtgagggaaggggtgattcgggagctggaagaggcaggacagggcaacgggctggacttgatgggtgagagaagctagtgacctttggcatgtagcaaacagttctcatgccctgccaccagcatcatgccagggcaggctgggctctcaccctcacagaatgtcccatgaataattatgtaactaaaagtgctgtgtgttgcaggtagcaactaaccggggctggtggcgtgggcagtaaaaagaatttaccaagactgttgtaggtaaagaaaggcagatttatgagagaaagtaggaaaatacgttgcaagaaagcaatgggcaatcaccaagagaggcgctggcagcaagagctgaaggcgtgctggggattttataggatggggcttgtgccggagagggccatgtgcagtgctgataacgcccaggttgcagggagctaacgcgtttttctatcagccgaggatctggtgataactgggcgtaggaagattgtgatttgtctgcacgggagggccgtgtgtcctggaccatgaagaaaggcagactcacagcttctccgctctctctgttgctttcccctggtcccaccagtctgactcctttccctcattaggactccgcagcatggacaccatgaagggaggcagagcctgtgacaggaacgctcagccagggaggcttctctgatgagggccagagctgtccaggccaggcctggggggacagacgcacattcacgttcaaggttttatttgaacatggtttcaatgaatcctctcaatgttttgaaattgcaacttagtttcagtcgtctacaaaacctttgctcccccgtagcagcaccccctttatgttgttattatcacaaattacatcttgacacactgggccaccagcaggacttataattattgtaataggcagttgtctctttaaattgcaaggcacttacagcgaaggtgcctgcatgctccctctagtcccccagggaagcagcccgagcccctgggaagggccaggtattaacttgccagacatcgcagctcattccaggctcccagccactcttccgtcagtggattccaattctgaaaatcggctcatgtccagaaacagcacgggagtgtgacttcctgctggggcagcccctcagcccctgccctctgttgactcttacatgtgaagcttcccccttgttggccactggtttcacccctcagggcaccgtgctctgttaccaccccctgttactgcccccaggcccctcggtggccgcctgcctcatcttccccacggggattagggagcccggctctgtagctgcgtctcccatcatcagcacaggctgcagagggggaacccctcgactctcccaccctcagcacaggctgcagatggggaacccctcaactctcccaccctcagcacaggctgcagacggggaacccctcgactctcccaccctcagcacaggctgcagagggggaacccctcgactctcccaccctcagcacaggctgcagacggggaacccctcgactctcccaccctcagcacaggctgcagacggggaacctcttgactctcccaccctcagcacaggctgcagacggggaatgcctcgacttcctggtgatgctggtgttctccctagggcttcctgcacacccacctccctccaccccattccttcctctaccagctgtcagagaacttgagggtttctgcttcactgtgagctggctaccacttttttcaaggcttttaagagccattccaagttttccccacctcctgggtcctgagaaagtgccccactgcagcaaatgcttccagacccttggtcaagctcctcactctcccatcccgggacttctcttctgccccagctgaggccatcaaccagttcttgcaattacttagctgtgcagcccctttctccctttttaggcttagcaccctgccccttcccgttggtctgtgctgggatttagccctcgcaattggcctggcaggcaggtgggacagctcctgaggcgagcacttgcttcctggtgagacaggtgattccgtaacatctccagcacagtagatgtgctcacctttatggggcaggaggacctgtgcacttccagaggttccagaggactggagggtcctcatcgttacatctttgggacccagattttccccaggggacccttactttctacctttgcagagctgacccaccggtggcccttcactctggttaagtgcctgtttacctctgtggtagaggcactccagtctcacaccgagcttggtaacagttctcaggatgtcggtatggggaaccagcccgctgtcctgtctttgttggtttggttgctccccactcccagtttttcaggggcctgcatcatcccaccagccacagcgctgtgctccaccgagatattttcccaggtcatcactcatgaagctcccaccgtgtgccagggaccaccggacctcccagccaaccaggacagcagcctctgcaccctttgggtggtgggcaggacagtcccagatcctctcctgatgccacttatgttagtccaggtcttccaagatgcagatgggataaaggtataaggatttggttagattttattagatgatgaaggctgagtgtggtggctcgtgcctgtaatcccagcactttgagaggccaaggtgggcagatcacttgaactcaggagttcgaggccagcctgggcaacatggtgaaacaccgtctcaacaaaaacaaacaaacaaaaattagcctggcatggtggtgtgtgcctgtagtccttgctacctgggaggctggaatgggagggttgcttgagtccaggaggtggaggttgcagtgagccgagatcatgcccctgtactgcagcctaggtgatgggaatgaagccctttcaaaaaaagagagaagattttattagatgatgaagattagatattgttgttattattagagatgaagcatggaggtagctaagaaacttggaagagcttcagaatgtgagtagctctaacttccagagaggaagagagggaacgaaggttgactgggagtgacctagatcactaaacaacctaaggaaggttcaggaaagctgccagggagttcttgagccaaagaagtgtggcctcagcacaaatgcagagacagattctgagcacaagagctgaggccattggtcatgacattcccatagttggaggcctatgaagcacactttcaaggaaactgcaactgtttaaaataacagtaatgtcctatgtgtgttttttttaaaagaaaggctgaaagttaattagctcatcatccacccgaagaagcaaaatcaacctaaaacaagaggtataaagagaagcactaattagatagaaactaacatgcactggagacaatcaaaccaaaactggttctttggcaacactaatcagaatggcaaccctctgggcaggtggggaagggggagcataaataaacaatttaaaggtgggccaggtgcagtggctgacacctgtaatcccagcactttgggaggctgaggtgggaggatcacttgagcccaggagttggagaccagcctgggcaacatagcaagaccctgtctctggaaaaaatttaaaaactagctggacatggtggcatgcacctgtgatcccagctactcgggaggctgaggtgggaggctggcttgagcctgggaggttgaggctgcagtgagctgagattctaccactgcagtccagtctgggtgacagagcaagaccatgtctcaataaataaataaataaataaataaataaataaagtggacacagccatagatataacatagatttaaaagataatatgaacaattttaggccaatacatttctagaaaaatataactgcactaacactgactcaagaggaaatagagaacccgaatagtcttataactcttaaagagatagaatcagtaattaaaatcacaaacaaaacatcaggcccagtcagtgagttccactgaactttcaaaatataaattccctatagaaatgctctctaactcatttacaaggctagcataacctggatatccaaacctgatgagaatagtgcagtgcacagctgcaaaaagtctagacaagttattggtaaaccagatctgaattgtacgcaaagatgattatgtttgatttaccccaggaatgacaggttggtttaactttaggaaatcagtttatgtaagccattcccttaacacatagaaggagaaaaattaggtcatttcaatgcagaaaaagcatttgacagaatttatcacctattcgtgagaaaaactcctagaaattaagactagaggggaactttgtgacctgatgaacggtatcttttgaacaaaaaaaaaaagaacaggcctggcgcagtggctcatgcctgtaatcccagcactgtgggaggccaaggtgggcagatcaccctgaggtcagtagttcaagaccaacatggcaaaaccccatctctactaaaagtacaaaaattagccaggtgtggtggcacgcgcctataatcccagctactcaggaggctgagacaggagaattgcttgaacctgggaggtggtggaggttgcagtgagctgagatagtgccactgcacttcagcctgggcaacagatcgagatttcgtct

SEQ ID NO: 389520 - DNA, 5090 bp, Homo sapiens
atggttctcgggaggggcggggccacgctgcgggcccgggccatggccgccgccgatgcgcgaggcagttccggcgaggggggagcctcagcaggattgctgtgtgaaaaccgagctgctgggagaagagacacctatggctgccgatgaaggctcagcagagaaacaggcaggagaggcccacatggctgcggacggtgagaccaatgggtcttgtgaaaacagcgatgccagcagtcatgcaaatgctgcaaagcacactcaggacagcgcaagggtcaacccccaggatggcaccaacacactaactcggatagcggaaaatggggtttcagaaagagactcagaagcggcgaagcaaaaccacgtcactgccgacgactttgtgcagacttctgtcatcggcagcaacggatacatcttaaataagccggccctacaggcacagcccttgaggactaccagcactctggcctcttcgctgcctggccatgctgcaaaaacccttcctggaggggctggcaaaggcaggactccaagcgcttttccccagacgccagccgccccaccagccacccttggggaggggagtgctgacacagaggacaggaagctcccggcccctggcgccgacgtcaaggtccacagggcacgcaagaccatgccgaagtccgtcgtgggcctgcatgcagccagtaaagatcccagagaagttcgagaagctagagatcataaggaaccaaaagaggagatcaacaaaaacatttctgactttggacgacagcagcttttaccccccttcccatcccttcatcagtcgctacctcagaaccagtgctacatggccaccacaaaatcacagacagcagctgcagtatctcggaagaaaaaacgaagaatgggaacctatagcctggttcctaagaaaaagaccaaagtattaaaacagaggacggtgattgagatgtttaagagcataactcattccactgtgggttccaagggggagaaggacctgggcgccagcagcctgcacgtgaatggggagagcctggagatggactcggatgaggacgactcagaggagctcgaggaggacgacggccatggtgcagagcaggcggccgcgttccccacagaggacagcaggacttccaaggagagcatgtcggaggctgatcgcgcccagaagatggacggggagtccgaggaggagcaggagtccgtggacaccggggaggaggaggaaggcggtgacgagtctgacctgagttcggaatccagcattaagaagaaatttctcaagaggaaaggaaagaccgacagtccctggatcaagccagccaggaaaaggaggcggagaagtagaaagaagcccagcggtgccctcggttctgagtcgtataagtcatctgcaggaagcgctgagcagacggcaccaggagacagcacagggtacatggaagtttctctggactccctggatctccgagtcaaaggaattctgtcttcacaagcagaagggttggccaacggtccagatgtgctggagacagacggcctccaggaagtgcctctctgcagctgccggatggaaacaccgaagagtcgagagatcaccacactggccaacaaccagtgcatggctacagagagcgtggaccatgaattgggccggtgcacaaacagcgtggtcaagtatgagctgatgcgcccctccaacaaggccccgctcctcgtgctgtgtgaagaccaccggggccgcatggtgaagcaccagtgctgtcctggctgtggctacttctgcacagcgggtaattttatggagtgtcagcccgagagcagcatctctcaccgtttccacaaagactgtgcctctcgagtcaataacgccagctattgtccccactgtggggaggagagctccaaggccaaagaggtgacgatagctaaagcagacaccacctcgaccgtgacaccagtccccgggcaggagaagggctcggccctggagggcagggccgacaccacaacgggcagtgctgccgggccaccactctcggaggacgacaagctgcagggtgcagcctcccacgtgcccgagggctttgatccaacgggacctgctgggcttgggaggccaactcccggcctttcccagggaccagggaaggaaaccttggagagcgctctcatcgccctcgactcggaaaaacccaagaagcttcgcttccacccaaagcagctgtacttctccgccaggcaaggggagcttcagaaggtgctcctcatgctggtggacggaattgaccccaacttcaaaatggagcaccagaataagcgctctccactgcacgccgcggcagaggctggacacgtggacatctgccacatgctggttcaggcgggcgctaatattgacacctgctcagaagaccagaggaccccgttgatggaagcagccgaaaacaaccatctggaagcagtgaagtacctcatcaaggctggggccctggtggatcccaaggacgcagagggctctacgtgtttgcacctggctgccaagaaaggccactacgaagtggtccagtacctgctttcaaatggacagatggacgtcaactgtcaggatgacggaggctggacacccatgatctgggccacagagtacaagcacgtggacctcgtgaagctgctgctgtccaagggctctgacatcaacatccgagacaacgaggagaacatttgcctgcactgggcggcgttctccggctgcgtggacatagccgagatcctgctggctgccaagtgcgacctccacgccgtgaacatccacggagactcgccactgcacattgccgcccgggagaaccgctacgactgtgtcgtcctctttctttctcgggattcagatgtcaccttaaagaacaaggaaggagagacgcccctgcagtgtgcgagcctcaactctcaggtgtggagcgctctgcagatgagcaaggctctgcaggactcggcccccgacaggcccagccccgtggagaggatagtgagcagggacatcgctcgaggctacgagcgcatccccatcccctgtgtcaacgccgtggacagcgagccatgccccagcaactacaagtacgtctctcagaactgcgtgacgtcccccatgaacatcgacagaaatatcactcatctgcagtactgcgtgtgcatcgacgactgctcctccagcaactgcatgtgcggccagctcagcatgcgctgctggtacgacaaggatggccggctcctgccagagttcaacatggcggagcctcccttgatcttcgaatgcaaccacgcgtgctcctgctggaggaactgccgaaatcgcgtcgtacagaatggtctcagggcaaggctgcagctctaccggacgcgggacatgggctggggcgtgcggtccctgcaggacatcccaccaggcacctttgtctgcgagtatgttggggagctgatttcagactcagaagccgacgttcgagaggaagattcttacctctttgatctcgacaataaggacggggaggtttactgcatcgacgcgcggttctacgggaacgtcagccggttcatcaaccaccactgcgagcccaacctggtgcccgtgcgcgtgttcatggcccaccaggacctgcggttcccccggatcgccttcttcagcacccgcctgatcgaggccggcgagcagctcgggtttgactatggagagcgcttctgggacatcaaaggcaagctcttcagctgccgctgcggctcccccaagtgccggcactcgagcgcggccctggcccagcgtcaggccagcgcggcccaggaggcccaggaggacggcttgcccgacaccagctccgcggctgccgccgaccccctatgagacgccgccggccagcggggcgctcgggagccagggaccgccgcgtcgccgattagaggacgaggaggagagattccgcacgcaaccgaaagggtccttcggggctgcgccgccggcttcctggaggggtcggaggtgaggctgcagcccctgcgggcgggtgtggatgcctcccagccaccttcccagacctgcggcctcaccgcgggcccagtgcccaggctggagcgcacactttggtccgcgcgccagagacgctgggagtccgcactggcatcaccttctgagtttctgatgctgatttgtcgttgcgaagtttctcgtttcttcctctgacctccgaggtccccgctgcaccacggggttgctctgttctcctgtccggcccagactcttctgtgtggcgccgccgaagccaccgttagcgcgagctgctccgttcgccctgcccacggcctgcgtggctggggccgagtcccaggggccgcacggagggcacagtctcctgtcaggctcggagaggtcaggagaccgaccccaccactaactttggagaaaatgtgggtttgctttttaaaggaatcctatatctagtcctatatatcaaacctctaactgacgtttcttttcgaggaagtggcttggtgggtgcagcccccgccggttccgttgacgctggcaccttctgttgattttttaagccacatgctatgatgaataaactgatttattttctaccattactgaacattaggacaaacacaaaataaaaaacaaaacacagacaacggtgctgattctggtgtggtttctactcaccacgtgaaataaactatcaactgtataaagagaacaaagtgattttagaataaaatgcaggaaaaacttttttaaagatgttagtcttgtagcgtgaataaatttgccatcaccttttgtgtggtggcctggcaggtcatatactttttttggcatatacctttttaaagactgtaattagtgcagtaacagtggggttttttttgtgcaactcttctaaaaacattcataatgcagtcatgtttatttttttctgttaaaatgtttttgacagttttaagagcagtcttttggctctgaccatttcttgttctgtttccaatgaaatcaataaaaaaaaagaagtactttt

SEQ ID NO: 389521 - DNA, 8863 bp, Homo sapiens
atggttctcgggaggggcggggccacgctgcgggcccgggccatggccgccgccgatgcgcgaggcagttccggcgaggggggagcctcagcaggattgctgtgtgaaaaccgagctgctgggagaagagacacctatggctgccgatgaaggctcagcagagaaacaggcaggagaggcccacatggctgcggacggtgagaccaatgggtcttgtgaaaacagcgatgccagcagtcatgcaaatgctgcaaagcacactcaggacagcgcaagggtcaacccccaggatggcaccaacacactaactcggatagcggaaaatggggtttcagaaagagactcagaagcggcgaagcaaaaccacgtcactgccgacgactttgtgcagacttctgtcatcggcagcaacggatacatcttaaataagccggccctacaggcacagcccttgaggactaccagcactctggcctcttcgctgcctggccatgctgcaaaaacccttcctggaggggctggcaaaggcaggactccaagcgcttttccccagacgccagccgccccaccagccacccttggggaggggagtgctgacacagaggacaggaagctcccggcccctggcgccgacgtcaaggtccacagggcacgcaagaccatgccgaagtccgtcgtgggcctgcatgcagccagtaaagatcccagagaagttcgagaagctagagatcataaggaaccaaaagaggagatcaacaaaaacatttctgactttggacgacagcagcttttaccccccttcccatcccttcatcagtcgctacctcagaaccagtgctacatggccaccacaaaatcacagacagcagctgcagtatctcggaagaaaaaacgaagaatgggaacctatagcctggttcctaagaaaaagaccaaagtattaaaacagaggacggtgattgagatgtttaagagcataactcattccactgtgggttccaagggggagaaggacctgggcgccagcagcctgcacgtgaatggggagagcctggagatggactcggatgaggacgactcagaggagctcgaggaggacgacggccatggtgcagagcaggcggccgcgttccccacagaggacagcaggacttccaaggagagcatgtcggaggctgatcgcgcccagaagatggacggggagtccgaggaggagcaggagtccgtggacaccggggaggaggaggaaggcggtgacgagtctgacctgagttcggaatccagcattaagaagaaatttctcaagaggaaaggaaagaccgacagtccctggatcaagccagccaggaaaaggaggcggagaagtagaaagaagcccagcggtgccctcggttctgagtcgtataagtcatctgcaggaagcgctgagcagacggcaccaggagacagcacagggtacatggaagtttctctggactccctggatctccgagtcaaaggaattctgtcttcacaagcagaagggttggccaacggtccagatgtgctggagacagacggcctccaggaagtgcctctctgcagctgccggatggaaacaccgaagagtcgagagatcaccacactggccaacaaccagtgcatggctacagagagcgtggaccatgaaggtaattttatggagtgtcagcccgagagcagcatctctcaccgtttccacaaagactgtgcctctcgagtcaataacgccagctattgtccccactgtggggaggagagctccaaggccaaagaggtgacgatagctaaagcagacaccacctcgaccgtgacaccagtccccgggcaggagaagggctcggccctggagggcagggccgacaccacaacgggcagtgctgccgggccaccactctcggaggacgacaagctgcagggtgcagcctcccacgtgcccgagggctttgatccaacgggacctgctgggcttgggaggccaactcccggcctttcccagggaccagggaaggaaaccttggagagcgctctcatcgccctcgactcggaaaaacccaagaagcttcgcttccacccaaagcagctgtacttctccgccaggcaaggggagcttcagaaggtgctcctcatgctggtggacggaattgaccccaacttcaaaatggagcaccagaataagcgctctccactgcacgccgcggcagaggctggacacgtggacatctgccacatgctggttcaggcgggcgctaatattgacacctgctcagaagaccagaggaccccgttgatggaagcagccgaaaacaaccatctggaagcagtgaagtacctcatcaaggctggggccctggtggatcccaaggacgcagagggctctacgtgtttgcacctggctgccaagaaaggccactacgaagtggtccagtacctgctttcaaatggacagatggacgtcaactgtcaggatgacggaggctggacacccatgatctgggccacagagtacaagcacgtggacctcgtgaagctgctgctgtccaagggctctgacatcaacatccgagacaacgaggagaacatttgcctgcactgggcggcgttctccggctgcgtggacatagccgagatcctgctggctgccaagtgcgacctccacgccgtgaacatccacggagactcgccactgcacattgccgcccgggagaaccgctacgactgtgtcgtcctctttctttctcgggattcagatgtcaccttaaagaacaaggaaggagagacgcccctgcagtgtgcgagcctcaactctcaggtgtggagcgctctgcagatgagcaaggctctgcaggactcggcccccgacaggcccagccccgtggagaggatagtgagcagggacatcgctcgaggctacgagcgcatccccatcccctgtgtcaacgccgtggacagcgagccatgccccagcaactacaagtacgtctctcagaactgcgtgacgtcccccatgaacatcgacagaaatatcactcatctgcagtactgcgtgtgcatcgacgactgctcctccagcaactgcatgtgcggccagctcagcatgcgctgctggtacgacaaggatggccggctcctgccagagttcaacatggcggagcctcccttgatcttcgaatgcaaccacgcgtgctcctgctggaggaactgccgaaatcgcgtcgtacagaatggtctcagggcaaggctgcagctctaccggacgcgggacatgggctggggcgtgcggtccctgcaggacatcccaccaggcacctttgtctgcgagtatgttggggagctgatttcagactcagaagccgacgttcgagaggaagattcttacctctttgatctcgacaataagatctcctcggcttagcagctgaagactgacgctgcctgatcgcatcccctaggaagccccctggatcatcacggacgccgagcttcgggtaactcttatggtggagggggaaaacgtccagaaacaaatgaatcctcaggtctggaactcaggagaagactctggactgagctatggatctggaaactcctgaacagagcagtggttccaagctggagacgattttgcacctgggggacgtctgcaaggtctggagacagtttgggttgtcacaaccgaaggagtgctatggcacttagtgggatcaggcagggatgttgttaaacactgtacagtgcacaggacagccctccccaacagagttcctggaccgtacatgttaatggtgctggggctgagaggccactgatggactcgtggagctggcgaggcggccctggagtctgtggcctgtgagggaagcgggaacctctgagggagtgcagcgttcagcagcatccacccatccagccacgaggcctggcagaggggtgggagaggaggtggacctgccgtagaccccacaagcctgtcaaggagctgggacttggagtgaaaaggagagcgacgtggtcagaactgtgccttagaaagaccactctggacacagagagggggctggggagaggcgagggctgcatggtgctgtggctgcctgctggaatggcaggctaggccattgtgggcagcagtgagggaaggggtgattcgggagctggaagaggcaggacagggcaacgggctggacttgatgggtgagagaagctagtgacctttggcatgtagcaaacagttctcatgccctgccaccagcatcatgccagggcaggctgggctctcaccctcacagaatgtcccatgaataattatgtaactaaaagtgctgtgtgttgcaggtagcaactaaccggggctggtggcgtgggcagtaaaaagaatttaccaagactgttgtaggtaaagaaaggcagatttatgagagaaagtaggaaaatacgttgcaagaaagcaatgggcaatcaccaagagaggcgctggcagcaagagctgaaggcgtgctggggattttataggatggggcttgtgccggagagggccatgtgcagtgctgataacgcccaggttgcagggagctaacgcgtttttctatcagccgaggatctggtgataactgggcgtaggaagattgtgatttgtctgcacgggagggccgtgtgtcctggaccatgaagaaaggcagactcacagcttctccgctctctctgttgctttcccctggtcccaccagtctgactcctttccctcattaggactccgcagcatggacaccatgaagggaggcagagcctgtgacaggaacgctcagccagggaggcttctctgatgagggccagagctgtccaggccaggcctggggggacagacgcacattcacgttcaaggttttatttgaacatggtttcaatgaatcctctcaatgttttgaaattgcaacttagtttcagtcgtctacaaaacctttgctcccccgtagcagcaccccctttatgttgttattatcacaaattacatcttgacacactgggccaccagcaggacttataattattgtaataggcagttgtctctttaaattgcaaggcacttacagcgaaggtgcctgcatgctccctctagtcccccagggaagcagcccgagcccctgggaagggccaggtattaacttgccagacatcgcagctcattccaggctcccagccactcttccgtcagtggattccaattctgaaaatcggctcatgtccagaaacagcacgggagtgtgacttcctgctggggcagcccctcagcccctgccctctgttgactcttacatgtgaagcttcccccttgttggccactggtttcacccctcagggcaccgtgctctgttaccaccccctgttactgcccccaggcccctcggtggccgcctgcctcatcttccccacggggattagggagcccggctctgtagctgcgtctcccatcatcagcacaggctgcagagggggaacccctcgactctcccaccctcagcacaggctgcagatggggaacccctcaactctcccaccctcagcacaggctgcagacggggaacccctcgactctcccaccctcagcacaggctgcagagggggaacccctcgactctcccaccctcagcacaggctgcagacggggaacccctcgactctcccaccctcagcacaggctgcagacggggaacctcttgactctcccaccctcagcacaggctgcagacggggaatgcctcgacttcctggtgatgctggtgttctccctagggcttcctgcacacccacctccctccaccccattccttcctctaccagctgtcagagaacttgagggtttctgcttcactgtgagctggctaccacttttttcaaggcttttaagagccattccaagttttccccacctcctgggtcctgagaaagtgccccactgcagcaaatgcttccagacccttggtcaagctcctcactctcccatcccgggacttctcttctgccccagctgaggccatcaaccagttcttgcaattacttagctgtgcagcccctttctccctttttaggcttagcaccctgccccttcccgttggtctgtgctgggatttagccctcgcaattggcctggcaggcaggtgggacagctcctgaggcgagcacttgcttcctggtgagacaggtgattccgtaacatctccagcacagtagatgtgctcacctttatggggcaggaggacctgtgcacttccagaggttccagaggactggagggtcctcatcgttacatctttgggacccagattttccccaggggacccttactttctacctttgcagagctgacccaccggtggcccttcactctggttaagtgcctgtttacctctgtggtagaggcactccagtctcacaccgagcttggtaacagttctcaggatgtcggtatggggaaccagcccgctgtcctgtctttgttggtttggttgctccccactcccagtttttcaggggcctgcatcatcccaccagccacagcgctgtgctccaccgagatattttcccaggtcatcactcatgaagctcccaccgtgtgccagggaccaccggacctcccagccaaccaggacagcagcctctgcaccctttgggtggtgggcaggacagtcccagatcctctcctgatgccacttatgttagtccaggtcttccaagatgcagatgggataaaggtataaggatttggttagattttattagatgatgaaggctgagtgtggtggctcgtgcctgtaatcccagcactttgagaggccaaggtgggcagatcacttgaactcaggagttcgaggccagcctgggcaacatggtgaaacaccgtctcaacaaaaacaaacaaacaaaaattagcctggcatggtggtgtgtgcctgtagtccttgctacctgggaggctggaatgggagggttgcttgagtccaggaggtggaggttgcagtgagccgagatcatgcccctgtactgcagcctaggtgatgggaatgaagccctttcaaaaaaagagagaagattttattagatgatgaagattagatattgttgttattattagagatgaagcatggaggtagctaagaaacttggaagagcttcagaatgtgagtagctctaacttccagagaggaagagagggaacgaaggttgactgggagtgacctagatcactaaacaacctaaggaaggttcaggaaagctgccagggagttcttgagccaaagaagtgtggcctcagcacaaatgcagagacagattctgagcacaagagctgaggccattggtcatgacattcccatagttggaggcctatgaagcacactttcaaggaaactgcaactgtttaaaataacagtaatgtcctatgtgtgttttttttaaaagaaaggctgaaagttaattagctcatcatccacccgaagaagcaaaatcaacctaaaacaagaggtataaagagaagcactaattagatagaaactaacatgcactggagacaatcaaaccaaaactggttctttggcaacactaatcagaatggcaaccctctgggcaggtggggaagggggagcataaataaacaatttaaaggtgggccaggtgcagtggctgacacctgtaatcccagcactttgggaggctgaggtgggaggatcacttgagcccaggagttggagaccagcctgggcaacatagcaagaccctgtctctggaaaaaatttaaaaactagctggacatggtggcatgcacctgtgatcccagctactcgggaggctgaggtgggaggctggcttgagcctgggaggttgaggctgcagtgagctgagattctaccactgcagtccagtctgggtgacagagcaagaccatgtctcaataaataaataaataaataaataaataaataaagtggacacagccatagatataacatagatttaaaagataatatgaacaattttaggccaatacatttctagaaaaatataactgcactaacactgactcaagaggaaatagagaacccgaatagtcttataactcttaaagagatagaatcagtaattaaaatcacaaacaaaacatcaggcccagtcagtgagttccactgaactttcaaaatataaattccctatagaaatgctctctaactcatttacaaggctagcataacctggatatccaaacctgatgagaatagtgcagtgcacagctgcaaaaagtctagacaagttattggtaaaccagatctgaattgtacgcaaagatgattatgtttgatttaccccaggaatgacaggttggtttaactttaggaaatcagtttatgtaagccattcccttaacacatagaaggagaaaaattaggtcatttcaatgcagaaaaagcatttgacagaatttatcacctattcgtgagaaaaactcctagaaattaagactagaggggaactttgtgacctgatgaacggtatcttttgaacaaaaaaaaaaagaacaggcctggcgcagtggctcatgcctgtaatcccagcactgtgggaggccaaggtgggcagatcaccctgaggtcagtagttcaagaccaacatggcaaaaccccatctctactaaaagtacaaaaattagccaggtgtggtggcacgcgcctataatcccagctactcaggaggctgagacaggagaattgcttgaacctgggaggtggtggaggttgcagtgagctgagatagtgccactgcacttcagcctgggcaacagatcgagatttcgtct

SEQ ID NO: 389522 - DNA, 2837 bp, Homo sapiens
atggttctcgggaggggcggggccacgctgcgggcccgggccatggccgccgccgatgcgcgaggcagttccggcgaggggggagcctcagcaggattgctgtgtgaaaaccgagctgctgggagaagagacacctatggctgccgatgaaggctcagcagagaaacaggcaggagaggcccacatggctgcggacggtgagaccaatgggtcttgtgaaaacagcgatgccagcagtcatgcaaatgctgcaaagcacactcaggacagcgcaagggtcaacccccaggatggcaccaacacactaactcggatagcggaaaatggggtttcagaaagagactcagaagcggcgaagcaaaaccacgtcactgccgacgactttgtgcagacttctgtcatcggcagcaacggatacatcttaaataagccggccctacaggcacagcccttgaggactaccagcactctggcctcttcgctgcctggccatgctgcaaaaacccttcctggaggggctggcaaaggcaggactccaagcgcttttccccagacgccagccgccccaccagccacccttggggaggggagtgctgacacagaggacaggaagctcccggcccctggcgccgacgtcaaggtccacagggcacgcaagaccatgccgaagtccgtcgtgggcctgcatgcagccagtaaagatcccagagaagttcgagaagctagagatcataaggaaccaaaagaggagatcaacaaaaacatttctgactttggacgacagcagcttttaccccccttcccatcccttcatcagtcgctacctcagaaccagtgctacatggccaccacaaaatcacagacagcagctgcagtatctcggaagaaaaaacgaagaatgggaacctatagcctggttcctaagaaaaagaccaaagtattaaaacagaggacggtgattgagatgtttaagagcataactcattccactgtgggttccaagggggagaaggacctgggcgccagcagcctgcacgtgaatggggagagcctggagatggactcggatgaggacgactcagaggagctcgaggaggacgacggccatggtgcagagcaggcggccgcgttccccacagaggacagcaggacttccaaggagagcatgtcggaggctgatcgcgcccagaagatggacggggagtccgaggaggagcaggagtccgtggacaccggggaggaggaggaaggcggtgacgagtctgacctgagttcggaatccagcattaagaagaaatttctcaagaggaaaggaaagaccgacagtccctggatcaagccagccaggaaaaggaggcggagaagtagaaagaagcccagcggtgccctcggttctgagtcgtataagtcatctgcaggaagcgctgagcagacggcaccaggagacagcacagggtacatggaagtttctctggactccctggatctccgagtcaaaggaattctgtcttcacaagcagaagggttggccaacggtccagatgtgctggagacagacggcctccaggaagtgcctctctgcagctgccggatggaaacaccgaagagtcgagagatcaccacactggccaacaaccagtgcatggctacagagagcgtggaccatgaattgggccggtgcacaaacagcgtggtcaagtatgagctgatgcgcccctccaacaaggccccgctcctcgtgctgtgtgaagaccaccggggccgcatggtgaagcaccagtgctgtcctggctgtggctacttctgcacagcgggtaattttatggagtgtcagcccgagagcagcatctctcaccgtttccacaaagactgtgcctctcgagtcaataacgccagctattgtccccactgtggggaggagagctccaaggccaaagaggtgacgatagctaaagcagacaccacctcgaccgtgacaccagtccccgggcaggagaagggctcggccctggagggcagggccgacaccacaacgggcagtgctgccgggccaccactctcggaggacgacaagctgcagggtgcagcctcccacgtgcccgagggctttgatccaacgggacctgctgggcttgggaggccaactcccggcctttcccagggaccagggaaggaaaccttggagagcgctctcatcgccctcgactcggaaaaacccaagaagcttcgcttccacccaaagcagctgtacttctccgccaggcaaggggagcttcagaaggtgctcctcatgctggtggacggaattgaccccaacttcaaaatggagcaccagaataagcgctctccactgcacgccgcggcagaggctggacacgtggacatctgccacatgctggttcagttctgcaggctgggaagcccaaggtcgaggggctgcctttggtgacttatggtgaggacctcgtgctgttcccgaacacagccaggaaccacgccaagaggaagatgctccagcacagccttgctgtggaccaggccgcccacagggagcaggtccattcctgggggctgactccgcctttcagagaggcgtggctccatcttcacagcctcgtagcctcttaaaggcccagcctcaaaacctcattggggcccccagccccggtaaataaattgcattcagaccatagtgccagccttttgaagccaatacttttttggtcgttcgtgcatcttttgaattggttttatttcgattttgccgtttctcttctctctggaagttacagactttccactttttggtcgttcttgcgtcttttgaattggtttta

SEQ ID NO: 389523 - DNA, 1336 bp, Homo sapiens
  misc_feature (1271)..(1271): n is a, c, g, or t
atggttctcgggaggggcggggccacgctgcgggcccgggccatggccgccgccgatgcgcgaggcagttccggcgaggggggagcctcagcaggattgctgtgtgaaaaccgagctgctgggagaagagacacctatggctgccgatgaaggctcagcagagaaacaggcaggagaggcccacatggctgcggacggtgagaccaatgggtcttgtgaaaacagcgatgccagcagtcatgcaaatgctgcaaagcacactcaggacagcgcaagggtcaacccccaggatggcaccaacacactaactcggatagcggaaaatggggtttcagaaagagactcagaagcggcgaagcaaaaccacgtcactgccgacgactttgtgcagacttctgtcatcggcagcaacggatacatcttaaataagccggccctacaggcacagcccttgaggactaccagcactctggcctcttcgctgcctggccatgctgcaaaaacccttcctggaggggctggcaaaggcaggactccaagcgcttttccccagacgccagccgccccaccagccacccttggggaggggagtgctgacacagaggacaggaagctcccggcccctggcgccgacgtcaaggtccacagggcacgcaagaccatgccgaagtccgtcgtgggcctgcatgcagccagtaaagatcccagagaagttcgagaagctagagatcataaggaaccaaaagaggagatcaacaaaaacatttctgactttggacgacagcagcttttaccccccttcccatcccttcatcagtcgctacctcagaaccagtgctacatggccaccacaaaatcacagacagcagctgcagtatctcggaagaaaaaacgaagaatgggaacctatagcctggttcctaagaaaaagaccaaagtattaaaacagaggacggtgattgagatgtttaagagcataactcattccactgtgggttccaagggggagaaggacctgggcgccagcagcctgcacgtgaatggggagagcctggagatggactcggatgaggacgactcagaggagctcgaggaggacgacggccatggtgcagagcaggcggccgcgttccccacagaggacagcaggacttccaaggagagcatgtcggaggctgatcgcgcccagaagatggacggggagtccgaggaggagcaggagtccgtggacaccggggaggaggaggaaggcggtgacgagtctgacctgnttctagtcttactcttttttttattaatctaatatgcattcatttttttttttatattggattgt

SEQ ID NO: 389524 - DNA, 371 bp, Homo sapiens
cggtgccagtttagtagtactttatttttctaaatattaaccccaattaaaacaaaaatttttttttgtcctcccatttttagggtaattttatggagtgtcagcccgagagcagcatctctcaccgtttccacaaagactgtgcctctcgagtcaataacgccagctattgtccccactgtggggaggagagctccaaggccaaagaggtgacgatagctaaagcagacaccacctcgaccgtgacaccagtccccgggcaggagaagggctcggccctggagggcagggccgacaccacaacgggcaggtacctggcacaggctctggctgggctctccagtcgtccacctgaaaaagtttcagttgtt

SEQ ID NO: 389525 - DNA, 377 bp, Homo sapiens
aacccggctgacggctgttgtttctctctaacaggcagttccggcgaggggggagcctcagcaggattgctgtgtgaaaaccgagctgctgggagaaggtgagggcggtgtgcaccgagggacaggagcagcgcctccctccagactagaaaacctgctgctcttcctctcttattagtccccgtcttctgactttctttgcttcacctaggtttatggtatagtttctaatctatcccattcctaaatagcacagttgcacagacaaacacaaaagctctgccagagaaggaacacatttgtcaaagtatgaaaagcaaaaatcctgtatatccttgtcttaaagtacacccagaaaattaaaagtgagtggccac

SEQ ID NO: 389526 - DNA, 2712 bp, Homo sapiens
atggttctcgggaggggcggggccacgctgcgggcccgggccatggccgccgccgatgcgcgagcccgggccatggccgccgccgatgccgagagacacctatggctgccgatgaaggctcagcagagaaacaggcaggagaggcccacatggctgcggacggtgagaccaatgggtcttgtgaaaacagcgatgccagcagtcatgcaaatgctgcaaagcacactcaggacagcgcaagggtcaacccccaggatggcaccaacacactaactcggatagcggaaaatggggtttcagaaagagactcagaagcggcgaagcaaaaccacgtcactgccgacgactttgtgcagacttctgtcatcggcagcaacggatacatcttaaataagccggccctacaggcacagcccttgaggactaccagcactctggcctcttcgctgcctggccatgctgcaaaaacccttcctggaggggctggcaaaggcaggactccaagcgcttttccccagacgccagccgccccaccagccacccttggggaggggagtgctgacacagaggacaggaagctcccggcccctggcgccgacgtcaaggtccacagggcacgcaagaccatgccgaagtccgtcgtgggcctgcatgcagccagtaaagatcccagagaagttcgagaagctagagatcataaggaaccaaaagaggagatcaacaaaaacatttctgactttggacgacagcagcttttaccccccttcccatcccttcatcagtcgctacctcagaaccagtgctacatggccaccacaaaatcacagacagcttgcttgccttttgttttagcagctgcagtatctcggaagaaaaaacgaagaatgggaacctatagcctggttcctaagaaaaagaccaaagtattaaaacagaggacggtgattgagatgtttaagagcataactcattccactgtgggttccaagggggagaaggacctgggcgccagcagcctgcacgtgaatggggagagcctggagatggactcggatgaggacgactcagaggagctcgaggaggacgacggccatggtgcagagcaggcggccgcgttccccacagaggacagcaggacttccaaggagagcatgtcggaggctgatcgcgcccagaagatggacggggagtccgaggaggagcaggagtccgtggacaccggggaggaggaggaaggcggtgacgagtctgacctgagttcggaatccagcattaagaagaaatttctcaagaggaaaggaaagaccgacagtccctggatcaagccagccaggaaaaggaggcggagaagtagaaagaagcccagcggtgccctcggttctgagtcgtataagtcatctgcaggaagcgctgagcagacggcaccaggagacagcacagggtacatggaagtttctctggactccctggatctccgagtcaaaggaattctgtcttcacaagcagaagggttggccaacggtccagatgtgctggagacagacggcctccaggaagtgcctctctgcagctgccggatggaaacaccgaagagtcgagagatcaccacactggccaacaaccagtgcatggctacagagagcgtggaccatgaattgggccggtgcacaaacagcgtggtcaagtatgagctgatgcgcccctccaacaaggccccgctcctcgtgctgtgtgaagaccaccggggccgcatggtgaagcaccagtgctgtcctggctgtggctacttctgcacagcgggtaattttatggagtgtcagcccgagagcagcatctctcaccgtttccacaaagactgtgcctctcgagtcaataacgccagctattgtccccactgtggggaggagagctccaaggccaaagaggtgacgatagctaaagcagacaccacctcgaccgtgacaccagtccccgggcaggagaagggctcggccctggagggcagggccgacaccacaacgggcagtgctgccgggccaccactctcggaggacgacaagctgcagggtgcagcctcccacgtgcccgagggctttgatccaacgggacctgctgggcttgggaggccaactcccggcctttcccagggaccagggaaggaaaccttggagagcgctctcatcgccctcgactcggaaaaacccaagaagcttcgcttccacccaaagcagctgtacttctccgccaggcaaggggagcttcagaaggtgctcctcatgctggtggacggaattgaccccaacttcaaaatggagcaccagaataagcgctctccactgcacgccgcggcagaggctggacacgtggacatctgccacatgctggttcaggcgggcgctaatattgacacctgctcagaagaccagaggaccccgttgatggaagcagccgaaaacaaccatctggaagcagtgaagtacctcatcaaggctggggccctggtggatcccaagatacagaaaacttctaaagtttatacggagtctcaagagacccagagaagccaaacaattttgtgaaagaacagagttggagaactcacacttgctgatttcaaaacttactatatacggccacagtaatgaaaacagtgtgggactggcataaagacagaaatagagaccaatggaataaaataaaaagcccagaaat

SEQ ID NO: 389527 - DNA, 9028 bp, Homo sapiens
atggttctcgggaggggcggggccacgctgcgggcccgggccatggccgccgccgatgcgcgaggcagttccggcgaggggggagcctcagcaggattgctgtgtgaaaaccgagctgctgggagaagagacacctatggctgccgatgaaggctcagcagagaaacaggcaggagaggcccacatggctgcggacggtgagaccaatgggtcttgtgaaaacagcgatgccagcagtcatgcaaatgctgcaaagcacactcaggacagcgcaagggtcaacccccaggatggcaccaacacactaactcggatagcggaaaatggggtttcagaaagagactcagaagcggcgaagcaaaaccacgtcactgccgacgactttgtgcagacttctgtcatcggcagcaacggatacatcttaaataagccggccctacaggcacagcccttgaggactaccagcactctggcctcttcgctgcctggccatgctgcaaaaacccttcctggaggggctggcaaaggcaggactccaagcgcttttccccagacgccagccgccccaccagccacccttggggaggggagtgctgacacagaggacaggaagctcccggcccctggcgccgacgtcaaggtccacagggcacgcaagaccatgccgaagtccgtcgtgggcctgcatgcagccagtaaagatcccagagaagttcgagaagctagagatcataaggaaccaaaagaggagatcaacaaaaacatttctgactttggacgacagcagcttttaccccccttcccatcccttcatcagtcgctacctcagaaccagtgctacatggccaccacaaaatcacagacagcttgcttgccttttgttttagcagctgcagtatctcggaagaaaaaacgaagaatgggaacctatagcctggttcctaagaaaaagaccaaagtattaaaacagaggacggtgattgagatgtttaagagcataactcattccactgtgggttccaagggggagaaggacctgggcgccagcagcctgcacgtgaatggggagagcctggagatggactcggatgaggacgactcagaggagctcgaggaggacgacggccatggtgcagagcaggcggccgcgttccccacagaggacagcaggacttccaaggagagcatgtcggaggctgatcgcgcccagaagatggacggggagtccgaggaggagcaggagtccgtggacaccggggaggaggaggaaggcggtgacgagtctgacctgagttcggaatccagcattaagaagaaatttctcaagaggaaaggaaagaccgacagtccctggatcaagccagccaggaaaaggaggcggagaagtagaaagaagcccagcggtgccctcggttctgagtcgtataagtcatctgcaggaagcgctgagcagacggcaccaggagacagcacagggtacatggaagtttctctggactccctggatctccgagtcaaaggaattctgtcttcacaagcagaagggttggccaacggtccagatgtgctggagacagacggcctccaggaagtgcctctctgcagctgccggatggaaacaccgaagagtcgagagatcaccacactggccaacaaccagtgcatggctacagagagcgtggaccatgaattgggccggtgcacaaacagcgtggtcaagtatgagctgatgcgcccctccaacaaggccccgctcctcgtgctgtgtgaagaccaccggggccgcatggtgaagcaccagtgctgtcctggctgtggctacttctgcacagcgggtaattttatggagtgtcagcccgagagcagcatctctcaccgtttccacaaagactgtgcctctcgagtcaataacgccagctattgtccccactgtggggaggagagctccaaggccaaagaggtgacgatagctaaagcagacaccacctcgaccgtgacaccagtccccgggcaggagaagggctcggccctggagggcagggccgacaccacaacgggcagtgctgccgggccaccactctcggaggacgacaagctgcagggtgcagcctcccacgtgcccgagggctttgatccaacgggacctgctgggcttgggaggccaactcccggcctttcccagggaccagggaaggaaaccttggagagcgctctcatcgccctcgactcggaaaaacccaagaagcttcgcttccacccaaagcagctgtacttctccgccaggcaaggggagcttcagaaggtgctcctcatgctggtggacggaattgaccccaacttcaaaatggagcaccagaataagcgctctccactgcacgccgcggcagaggctggacacgtggacatctgccacatgctggttcaggcgggcgctaatattgacacctgctcagaagaccagaggaccccgttgatggaagcagccgaaaacaaccatctggaagcagtgaagtacctcatcaaggctggggccctggtggatcccaaggacgcagagggctctacgtgtttgcacctggctgccaagaaaggccactacgaagtggtccagtacctgctttcaaatggacagatggacgtcaactgtcaggatgacggaggctggacacccatgatctgggccacagagtacaagcacgtggacctcgtgaagctgctgctgtccaagggctctgacatcaacatccgagacaacgaggagaacatttgcctgcactgggcggcgttctccggctgcgtggacatagccgagatcctgctggctgccaagtgcgacctccacgccgtgaacatccacggagactcgccactgcacattgccgcccgggagaaccgctacgactgtgtcgtcctctttctttctcgggattcagatgtcaccttaaagaacaaggaaggagagacgcccctgcagtgtgcgagcctcaactctcaggtgtggagcgctctgcagatgagcaaggctctgcaggactcggcccccgacaggcccagccccgtggagaggatagtgagcagggacatcgctcgaggctacgagcgcatccccatcccctgtgtcaacgccgtggacagcgagccatgccccagcaactacaagtacgtctctcagaactgcgtgacgtcccccatgaacatcgacagaaatatcactcatctgcagtactgcgtgtgcatcgacgactgctcctccagcaactgcatgtgcggccagctcagcatgcgctgctggtacgacaaggatggccggctcctgccagagttcaacatggcggagcctcccttgatcttcgaatgcaaccacgcgtgctcctgctggaggaactgccgaaatcgcgtcgtacagaatggtctcagggcaaggctgcagctctaccggacgcgggacatgggctggggcgtgcggtccctgcaggacatcccaccaggcacctttgtctgcgagtatgttggggagctgatttcagactcagaagccgacgttcgagaggaagattcttacctctttgatctcgacaataagatctcctcggcttagcagctgaagactgacgctgcctgatcgcatcccctaggaagccccctggatcatcacggacgccgagcttcgggtaactcttatggtggagggggaaaacgtccagaaacaaatgaatcctcaggtctggaactcaggagaagactctggactgagctatggatctggaaactcctgaacagagcagtggttccaagctggagacgattttgcacctgggggacgtctgcaaggtctggagacagtttgggttgtcacaaccgaaggagtgctatggcacttagtgggatcaggcagggatgttgttaaacactgtacagtgcacaggacagccctccccaacagagttcctggaccgtacatgttaatggtgctggggctgagaggccactgatggactcgtggagctggcgaggcggccctggagtctgtggcctgtgagggaagcgggaacctctgagggagtgcagcgttcagcagcatccacccatccagccacgaggcctggcagaggggtgggagaggaggtggacctgccgtagaccccacaagcctgtcaaggagctgggacttggagtgaaaaggagagcgacgtggtcagaactgtgccttagaaagaccactctggacacagagagggggctggggagaggcgagggctgcatggtgctgtggctgcctgctggaatggcaggctaggccattgtgggcagcagtgagggaaggggtgattcgggagctggaagaggcaggacagggcaacgggctggacttgatgggtgagagaagctagtgacctttggcatgtagcaaacagttctcatgccctgccaccagcatcatgccagggcaggctgggctctcaccctcacagaatgtcccatgaataattatgtaactaaaagtgctgtgtgttgcaggtagcaactaaccggggctggtggcgtgggcagtaaaaagaatttaccaagactgttgtaggtaaagaaaggcagatttatgagagaaagtaggaaaatacgttgcaagaaagcaatgggcaatcaccaagagaggcgctggcagcaagagctgaaggcgtgctggggattttataggatggggcttgtgccggagagggccatgtgcagtgctgataacgcccaggttgcagggagctaacgcgtttttctatcagccgaggatctggtgataactgggcgtaggaagattgtgatttgtctgcacgggagggccgtgtgtcctggaccatgaagaaaggcagactcacagcttctccgctctctctgttgctttcccctggtcccaccagtctgactcctttccctcattaggactccgcagcatggacaccatgaagggaggcagagcctgtgacaggaacgctcagccagggaggcttctctgatgagggccagagctgtccaggccaggcctggggggacagacgcacattcacgttcaaggttttatttgaacatggtttcaatgaatcctctcaatgttttgaaattgcaacttagtttcagtcgtctacaaaacctttgctcccccgtagcagcaccccctttatgttgttattatcacaaattacatcttgacacactgggccaccagcaggacttataattattgtaataggcagttgtctctttaaattgcaaggcacttacagcgaaggtgcctgcatgctccctctagtcccccagggaagcagcccgagcccctgggaagggccaggtattaacttgccagacatcgcagctcattccaggctcccagccactcttccgtcagtggattccaattctgaaaatcggctcatgtccagaaacagcacgggagtgtgacttcctgctggggcagcccctcagcccctgccctctgttgactcttacatgtgaagcttcccccttgttggccactggtttcacccctcagggcaccgtgctctgttaccaccccctgttactgcccccaggcccctcggtggccgcctgcctcatcttccccacggggattagggagcccggctctgtagctgcgtctcccatcatcagcacaggctgcagagggggaacccctcgactctcccaccctcagcacaggctgcagatggggaacccctcaactctcccaccctcagcacaggctgcagacggggaacccctcgactctcccaccctcagcacaggctgcagagggggaacccctcgactctcccaccctcagcacaggctgcagacggggaacccctcgactctcccaccctcagcacaggctgcagacggggaacctcttgactctcccaccctcagcacaggctgcagacggggaatgcctcgacttcctggtgatgctggtgttctccctagggcttcctgcacacccacctccctccaccccattccttcctctaccagctgtcagagaacttgagggtttctgcttcactgtgagctggctaccacttttttcaaggcttttaagagccattccaagttttccccacctcctgggtcctgagaaagtgccccactgcagcaaatgcttccagacccttggtcaagctcctcactctcccatcccgggacttctcttctgccccagctgaggccatcaaccagttcttgcaattacttagctgtgcagcccctttctccctttttaggcttagcaccctgccccttcccgttggtctgtgctgggatttagccctcgcaattggcctggcaggcaggtgggacagctcctgaggcgagcacttgcttcctggtgagacaggtgattccgtaacatctccagcacagtagatgtgctcacctttatggggcaggaggacctgtgcacttccagaggttccagaggactggagggtcctcatcgttacatctttgggacccagattttccccaggggacccttactttctacctttgcagagctgacccaccggtggcccttcactctggttaagtgcctgtttacctctgtggtagaggcactccagtctcacaccgagcttggtaacagttctcaggatgtcggtatggggaaccagcccgctgtcctgtctttgttggtttggttgctccccactcccagtttttcaggggcctgcatcatcccaccagccacagcgctgtgctccaccgagatattttcccaggtcatcactcatgaagctcccaccgtgtgccagggaccaccggacctcccagccaaccaggacagcagcctctgcaccctttgggtggtgggcaggacagtcccagatcctctcctgatgccacttatgttagtccaggtcttccaagatgcagatgggataaaggtataaggatttggttagattttattagatgatgaaggctgagtgtggtggctcgtgcctgtaatcccagcactttgagaggccaaggtgggcagatcacttgaactcaggagttcgaggccagcctgggcaacatggtgaaacaccgtctcaacaaaaacaaacaaacaaaaattagcctggcatggtggtgtgtgcctgtagtccttgctacctgggaggctggaatgggagggttgcttgagtccaggaggtggaggttgcagtgagccgagatcatgcccctgtactgcagcctaggtgatgggaatgaagccctttcaaaaaaagagagaagattttattagatgatgaagattagatattgttgttattattagagatgaagcatggaggtagctaagaaacttggaagagcttcagaatgtgagtagctctaacttccagagaggaagagagggaacgaaggttgactgggagtgacctagatcactaaacaacctaaggaaggttcaggaaagctgccagggagttcttgagccaaagaagtgtggcctcagcacaaatgcagagacagattctgagcacaagagctgaggccattggtcatgacattcccatagttggaggcctatgaagcacactttcaaggaaactgcaactgtttaaaataacagtaatgtcctatgtgtgttttttttaaaagaaaggctgaaagttaattagctcatcatccacccgaagaagcaaaatcaacctaaaacaagaggtataaagagaagcactaattagatagaaactaacatgcactggagacaatcaaaccaaaactggttctttggcaacactaatcagaatggcaaccctctgggcaggtggggaagggggagcataaataaacaatttaaaggtgggccaggtgcagtggctgacacctgtaatcccagcactttgggaggctgaggtgggaggatcacttgagcccaggagttggagaccagcctgggcaacatagcaagaccctgtctctggaaaaaatttaaaaactagctggacatggtggcatgcacctgtgatcccagctactcgggaggctgaggtgggaggctggcttgagcctgggaggttgaggctgcagtgagctgagattctaccactgcagtccagtctgggtgacagagcaagaccatgtctcaataaataaataaataaataaataaataaataaagtggacacagccatagatataacatagatttaaaagataatatgaacaattttaggccaatacatttctagaaaaatataactgcactaacactgactcaagaggaaatagagaacccgaatagtcttataactcttaaagagatagaatcagtaattaaaatcacaaacaaaacatcaggcccagtcagtgagttccactgaactttcaaaatataaattccctatagaaatgctctctaactcatttacaaggctagcataacctggatatccaaacctgatgagaatagtgcagtgcacagctgcaaaaagtctagacaagttattggtaaaccagatctgaattgtacgcaaagatgattatgtttgatttaccccaggaatgacaggttggtttaactttaggaaatcagtttatgtaagccattcccttaacacatagaaggagaaaaattaggtcatttcaatgcagaaaaagcatttgacagaatttatcacctattcgtgagaaaaactcctagaaattaagactagaggggaactttgtgacctgatgaacggtatcttttgaacaaaaaaaaaaagaacaggcctggcgcagtggctcatgcctgtaatcccagcactgtgggaggccaaggtgggcagatcaccctgaggtcagtagttcaagaccaacatggcaaaaccccatctctactaaaagtacaaaaattagccaggtgtggtggcacgcgcctataatcccagctactcaggaggctgagacaggagaattgcttgaacctgggaggtggtggaggttgcagtgagctgagatagtgccactgcacttcagcctgggcaacagatcgagatttcgtct

SEQ ID NO: 389528 - DNA, 8972 bp, Homo sapiens
atggttctcgggaggggcggggccacgctgcgggcccgggccatggccgccgccgatgcgcgagcccgggccatggccgccgccgatgccgagagacacctatggctgccgatgaaggctcagcagagaaacaggcaggagaggcccacatggctgcggacggtgagaccaatgggtcttgtgaaaacagcgatgccagcagtcatgcaaatgctgcaaagcacactcaggacagcgcaagggtcaacccccaggatggcaccaacacactaactcggatagcggaaaatggggtttcagaaagagactcagaagcggcgaagcaaaaccacgtcactgccgacgactttgtgcagacttctgtcatcggcagcaacggatacatcttaaataagccggccctacaggcacagcccttgaggactaccagcactctggcctcttcgctgcctggccatgctgcaaaaacccttcctggaggggctggcaaaggcaggactccaagcgcttttccccagacgccagccgccccaccagccacccttggggaggggagtgctgacacagaggacaggaagctcccggcccctggcgccgacgtcaaggtccacagggcacgcaagaccatgccgaagtccgtcgtgggcctgcatgcagccagtaaagatcccagagaagttcgagaagctagagatcataaggaaccaaaagaggagatcaacaaaaacatttctgactttggacgacagcagcttttaccccccttcccatcccttcatcagtcgctacctcagaaccagtgctacatggccaccacaaaatcacagacagcagctgcagtatctcggaagaaaaaacgaagaatgggaacctatagcctggttcctaagaaaaagaccaaagtattaaaacagaggacggtgattgagatgtttaagagcataactcattccactgtgggttccaagggggagaaggacctgggcgccagcagcctgcacgtgaatggggagagcctggagatggactcggatgaggacgactcagaggagctcgaggaggacgacggccatggtgcagagcaggcggccgcgttccccacagaggacagcaggacttccaaggagagcatgtcggaggctgatcgcgcccagaagatggacggggagtccgaggaggagcaggagtccgtggacaccggggaggaggaggaaggcggtgacgagtctgacctgagttcggaatccagcattaagaagaaatttctcaagaggaaaggaaagaccgacagtccctggatcaagccagccaggaaaaggaggcggagaagtagaaagaagcccagcggtgccctcggttctgagtcgtataagtcatctgcaggaagcgctgagcagacggcaccaggagacagcacagggtacatggaagtttctctggactccctggatctccgagtcaaaggaattctgtcttcacaagcagaagggttggccaacggtccagatgtgctggagacagacggcctccaggaagtgcctctctgcagctgccggatggaaacaccgaagagtcgagagatcaccacactggccaacaaccagtgcatggctacagagagcgtggaccatgaattgggccggtgcacaaacagcgtggtcaagtatgagctgatgcgcccctccaacaaggccccgctcctcgtgctgtgtgaagaccaccggggccgcatggtgaagcaccagtgctgtcctggctgtggctacttctgcacagcgggtaattttatggagtgtcagcccgagagcagcatctctcaccgtttccacaaagactgtgcctctcgagtcaataacgccagctattgtccccactgtggggaggagagctccaaggccaaagaggtgacgatagctaaagcagacaccacctcgaccgtgacaccagtccccgggcaggagaagggctcggccctggagggcagggccgacaccacaacgggcagtgctgccgggccaccactctcggaggacgacaagctgcagggtgcagcctcccacgtgcccgagggctttgatccaacgggacctgctgggcttgggaggccaactcccggcctttcccagggaccagggaaggaaaccttggagagcgctctcatcgccctcgactcggaaaaacccaagaagcttcgcttccacccaaagcagctgtacttctccgccaggcaaggggagcttcagaaggtgctcctcatgctggtggacggaattgaccccaacttcaaaatggagcaccagaataagcgctctccactgcacgccgcggcagaggctggacacgtggacatctgccacatgctggttcaggcgggcgctaatattgacacctgctcagaagaccagaggaccccgttgatggaagcagccgaaaacaaccatctggaagcagtgaagtacctcatcaaggctggggccctggtggatcccaaggacgcagagggctctacgtgtttgcacctggctgccaagaaaggccactacgaagtggtccagtacctgctttcaaatggacagatggacgtcaactgtcaggatgacggaggctggacacccatgatctgggccacagagtacaagcacgtggacctcgtgaagctgctgctgtccaagggctctgacatcaacatccgagacaacgaggagaacatttgcctgcactgggcggcgttctccggctgcgtggacatagccgagatcctgctggctgccaagtgcgacctccacgccgtgaacatccacggagactcgccactgcacattgccgcccgggagaaccgctacgactgtgtcgtcctctttctttctcgggattcagatgtcaccttaaagaacaaggaaggagagacgcccctgcagtgtgcgagcctcaactctcaggtgtggagcgctctgcagatgagcaaggctctgcaggactcggcccccgacaggcccagccccgtggagaggatagtgagcagggacatcgctcgaggctacgagcgcatccccatcccctgtgtcaacgccgtggacagcgagccatgccccagcaactacaagtacgtctctcagaactgcgtgacgtcccccatgaacatcgacagaaatatcactcatctgcagtactgcgtgtgcatcgacgactgctcctccagcaactgcatgtgcggccagctcagcatgcgctgctggtacgacaaggatggccggctcctgccagagttcaacatggcggagcctcccttgatcttcgaatgcaaccacgcgtgctcctgctggaggaactgccgaaatcgcgtcgtacagaatggtctcagggcaaggctgcagctctaccggacgcgggacatgggctggggcgtgcggtccctgcaggacatcccaccaggcacctttgtctgcgagtatgttggggagctgatttcagactcagaagccgacgttcgagaggaagattcttacctctttgatctcgacaataagatctcctcggcttagcagctgaagactgacgctgcctgatcgcatcccctaggaagccccctggatcatcacggacgccgagcttcgggtaactcttatggtggagggggaaaacgtccagaaacaaatgaatcctcaggtctggaactcaggagaagactctggactgagctatggatctggaaactcctgaacagagcagtggttccaagctggagacgattttgcacctgggggacgtctgcaaggtctggagacagtttgggttgtcacaaccgaaggagtgctatggcacttagtgggatcaggcagggatgttgttaaacactgtacagtgcacaggacagccctccccaacagagttcctggaccgtacatgttaatggtgctggggctgagaggccactgatggactcgtggagctggcgaggcggccctggagtctgtggcctgtgagggaagcgggaacctctgagggagtgcagcgttcagcagcatccacccatccagccacgaggcctggcagaggggtgggagaggaggtggacctgccgtagaccccacaagcctgtcaaggagctgggacttggagtgaaaaggagagcgacgtggtcagaactgtgccttagaaagaccactctggacacagagagggggctggggagaggcgagggctgcatggtgctgtggctgcctgctggaatggcaggctaggccattgtgggcagcagtgagggaaggggtgattcgggagctggaagaggcaggacagggcaacgggctggacttgatgggtgagagaagctagtgacctttggcatgtagcaaacagttctcatgccctgccaccagcatcatgccagggcaggctgggctctcaccctcacagaatgtcccatgaataattatgtaactaaaagtgctgtgtgttgcaggtagcaactaaccggggctggtggcgtgggcagtaaaaagaatttaccaagactgttgtaggtaaagaaaggcagatttatgagagaaagtaggaaaatacgttgcaagaaagcaatgggcaatcaccaagagaggcgctggcagcaagagctgaaggcgtgctggggattttataggatggggcttgtgccggagagggccatgtgcagtgctgataacgcccaggttgcagggagctaacgcgtttttctatcagccgaggatctggtgataactgggcgtaggaagattgtgatttgtctgcacgggagggccgtgtgtcctggaccatgaagaaaggcagactcacagcttctccgctctctctgttgctttcccctggtcccaccagtctgactcctttccctcattaggactccgcagcatggacaccatgaagggaggcagagcctgtgacaggaacgctcagccagggaggcttctctgatgagggccagagctgtccaggccaggcctggggggacagacgcacattcacgttcaaggttttatttgaacatggtttcaatgaatcctctcaatgttttgaaattgcaacttagtttcagtcgtctacaaaacctttgctcccccgtagcagcaccccctttatgttgttattatcacaaattacatcttgacacactgggccaccagcaggacttataattattgtaataggcagttgtctctttaaattgcaaggcacttacagcgaaggtgcctgcatgctccctctagtcccccagggaagcagcccgagcccctgggaagggccaggtattaacttgccagacatcgcagctcattccaggctcccagccactcttccgtcagtggattccaattctgaaaatcggctcatgtccagaaacagcacgggagtgtgacttcctgctggggcagcccctcagcccctgccctctgttgactcttacatgtgaagcttcccccttgttggccactggtttcacccctcagggcaccgtgctctgttaccaccccctgttactgcccccaggcccctcggtggccgcctgcctcatcttccccacggggattagggagcccggctctgtagctgcgtctcccatcatcagcacaggctgcagagggggaacccctcgactctcccaccctcagcacaggctgcagatggggaacccctcaactctcccaccctcagcacaggctgcagacggggaacccctcgactctcccaccctcagcacaggctgcagagggggaacccctcgactctcccaccctcagcacaggctgcagacggggaacccctcgactctcccaccctcagcacaggctgcagacggggaacctcttgactctcccaccctcagcacaggctgcagacggggaatgcctcgacttcctggtgatgctggtgttctccctagggcttcctgcacacccacctccctccaccccattccttcctctaccagctgtcagagaacttgagggtttctgcttcactgtgagctggctaccacttttttcaaggcttttaagagccattccaagttttccccacctcctgggtcctgagaaagtgccccactgcagcaaatgcttccagacccttggtcaagctcctcactctcccatcccgggacttctcttctgccccagctgaggccatcaaccagttcttgcaattacttagctgtgcagcccctttctccctttttaggcttagcaccctgccccttcccgttggtctgtgctgggatttagccctcgcaattggcctggcaggcaggtgggacagctcctgaggcgagcacttgcttcctggtgagacaggtgattccgtaacatctccagcacagtagatgtgctcacctttatggggcaggaggacctgtgcacttccagaggttccagaggactggagggtcctcatcgttacatctttgggacccagattttccccaggggacccttactttctacctttgcagagctgacccaccggtggcccttcactctggttaagtgcctgtttacctctgtggtagaggcactccagtctcacaccgagcttggtaacagttctcaggatgtcggtatggggaaccagcccgctgtcctgtctttgttggtttggttgctccccactcccagtttttcaggggcctgcatcatcccaccagccacagcgctgtgctccaccgagatattttcccaggtcatcactcatgaagctcccaccgtgtgccagggaccaccggacctcccagccaaccaggacagcagcctctgcaccctttgggtggtgggcaggacagtcccagatcctctcctgatgccacttatgttagtccaggtcttccaagatgcagatgggataaaggtataaggatttggttagattttattagatgatgaaggctgagtgtggtggctcgtgcctgtaatcccagcactttgagaggccaaggtgggcagatcacttgaactcaggagttcgaggccagcctgggcaacatggtgaaacaccgtctcaacaaaaacaaacaaacaaaaattagcctggcatggtggtgtgtgcctgtagtccttgctacctgggaggctggaatgggagggttgcttgagtccaggaggtggaggttgcagtgagccgagatcatgcccctgtactgcagcctaggtgatgggaatgaagccctttcaaaaaaagagagaagattttattagatgatgaagattagatattgttgttattattagagatgaagcatggaggtagctaagaaacttggaagagcttcagaatgtgagtagctctaacttccagagaggaagagagggaacgaaggttgactgggagtgacctagatcactaaacaacctaaggaaggttcaggaaagctgccagggagttcttgagccaaagaagtgtggcctcagcacaaatgcagagacagattctgagcacaagagctgaggccattggtcatgacattcccatagttggaggcctatgaagcacactttcaaggaaactgcaactgtttaaaataacagtaatgtcctatgtgtgttttttttaaaagaaaggctgaaagttaattagctcatcatccacccgaagaagcaaaatcaacctaaaacaagaggtataaagagaagcactaattagatagaaactaacatgcactggagacaatcaaaccaaaactggttctttggcaacactaatcagaatggcaaccctctgggcaggtggggaagggggagcataaataaacaatttaaaggtgggccaggtgcagtggctgacacctgtaatcccagcactttgggaggctgaggtgggaggatcacttgagcccaggagttggagaccagcctgggcaacatagcaagaccctgtctctggaaaaaatttaaaaactagctggacatggtggcatgcacctgtgatcccagctactcgggaggctgaggtgggaggctggcttgagcctgggaggttgaggctgcagtgagctgagattctaccactgcagtccagtctgggtgacagagcaagaccatgtctcaataaataaataaataaataaataaataaataaagtggacacagccatagatataacatagatttaaaagataatatgaacaattttaggccaatacatttctagaaaaatataactgcactaacactgactcaagaggaaatagagaacccgaatagtcttataactcttaaagagatagaatcagtaattaaaatcacaaacaaaacatcaggcccagtcagtgagttccactgaactttcaaaatataaattccctatagaaatgctctctaactcatttacaaggctagcataacctggatatccaaacctgatgagaatagtgcagtgcacagctgcaaaaagtctagacaagttattggtaaaccagatctgaattgtacgcaaagatgattatgtttgatttaccccaggaatgacaggttggtttaactttaggaaatcagtttatgtaagccattcccttaacacatagaaggagaaaaattaggtcatttcaatgcagaaaaagcatttgacagaatttatcacctattcgtgagaaaaactcctagaaattaagactagaggggaactttgtgacctgatgaacggtatcttttgaacaaaaaaaaaaagaacaggcctggcgcagtggctcatgcctgtaatcccagcactgtgggaggccaaggtgggcagatcaccctgaggtcagtagttcaagaccaacatggcaaaaccccatctctactaaaagtacaaaaattagccaggtgtggtggcacgcgcctataatcccagctactcaggaggctgagacaggagaattgcttgaacctgggaggtggtggaggttgcagtgagctgagatagtgccactgcacttcagcctgggcaacagatcgagatttcgtct

SEQ ID NO: 389529 - DNA, 8929 bp, Homo sapiens
atggttctcgggaggggcggggccacgctgcgggcccgggccatggccgccgccgatgcgcgaggcagttccggcgaggggggagcctcagcaggattgctgtgtgaaaaccgagctgctgggagaagagacacctatggctgccgatgaaggctcagcagagaaacaggcaggagaggcccacatggctgcggacggtgagaccaatgggtcttgtgaaaacagcgatgccagcagtcatgcaaatgctgcaaagcacactcaggacagcgcaagggtcaacccccaggatggcaccaacacactaactcggatagcggaaaatggggtttcagaaagagactcagaagcggcgaagcaaaaccacgtcactgccgacgactttgtgcagacttctgtcatcggcagcaacggatacatcttaaataagccggccctacaggcacagcccttgaggactaccagcactctggcctcttcgctgcctggccatgctgcaaaaacccttcctggaggggctggcaaaggcaggactccaagcgcttttccccagacgccagccgccccaccagccacccttggggaggggagtgctgacacagaggacaggaagctcccggcccctggcgccgacgtcaaggtccacagggcacgcaagaccatgccgaagtccgtcgtgggcctgcatgcagccagtaaagatcccagagaagttcgagaagctagagatcataaggaaccaaaagaggagatcaacaaaaacatttctgactttggacgacagcagcttttaccccccttcccatcccttcatcagtcgctacctcagaaccagtgctacatggccaccacaaaatcacagacagcagctgcagtatctcggaagaaaaaacgaagaatgggaacctatagcctggttcctaagaaaaagaccaaagtattaaaacagaggacggtgattgagatgtttaagagcataactcattccactgtgggttccaagggggagaaggacctgggcgccagcagcctgcacgtgaatggggagagcctggagatggactcggatgaggacgactcagaggagctcgaggaggacgacggccatggtgcagagcaggcggccgcgttccccacagaggacagcaggacttccaaggagagcatgtcggaggctgatcgcgcccagaagagttcggaatccagcattaagaagaaatttctcaagaggaaaggaaagaccgacagtccctggatcaagccagccaggaaaaggaggcggagaagtagaaagaagcccagcggtgccctcggttctgagtcgtataagtcatctgcaggaagcgctgagcagacggcaccaggagacagcacagggtacatggaagtttctctggactccctggatctccgagtcaaaggaattctgtcttcacaagcagaagggttggccaacggtccagatgtgctggagacagacggcctccaggaagtgcctctctgcagctgccggatggaaacaccgaagagtcgagagatcaccacactggccaacaaccagtgcatggctacagagagcgtggaccatgaattgggccggtgcacaaacagcgtggtcaagtatgagctgatgcgcccctccaacaaggccccgctcctcgtgctgtgtgaagaccaccggggccgcatggtgaagcaccagtgctgtcctggctgtggctacttctgcacagcgggtaattttatggagtgtcagcccgagagcagcatctctcaccgtttccacaaagactgtgcctctcgagtcaataacgccagctattgtccccactgtggggaggagagctccaaggccaaagaggtgacgatagctaaagcagacaccacctcgaccgtgacaccagtccccgggcaggagaagggctcggccctggagggcagggccgacaccacaacgggcagtgctgccgggccaccactctcggaggacgacaagctgcagggtgcagcctcccacgtgcccgagggctttgatccaacgggacctgctgggcttgggaggccaactcccggcctttcccagggaccagggaaggaaaccttggagagcgctctcatcgccctcgactcggaaaaacccaagaagcttcgcttccacccaaagcagctgtacttctccgccaggcaaggggagcttcagaaggtgctcctcatgctggtggacggaattgaccccaacttcaaaatggagcaccagaataagcgctctccactgcacgccgcggcagaggctggacacgtggacatctgccacatgctggttcaggcgggcgctaatattgacacctgctcagaagaccagaggaccccgttgatggaagcagccgaaaacaaccatctggaagcagtgaagtacctcatcaaggctggggccctggtggatcccaaggacgcagagggctctacgtgtttgcacctggctgccaagaaaggccactacgaagtggtccagtacctgctttcaaatggacagatggacgtcaactgtcaggatgacggaggctggacacccatgatctgggccacagagtacaagcacgtggacctcgtgaagctgctgctgtccaagggctctgacatcaacatccgagacaacgaggagaacatttgcctgcactgggcggcgttctccggctgcgtggacatagccgagatcctgctggctgccaagtgcgacctccacgccgtgaacatccacggagactcgccactgcacattgccgcccgggagaaccgctacgactgtgtcgtcctctttctttctcgggattcagatgtcaccttaaagaacaaggaaggagagacgcccctgcagtgtgcgagcctcaactctcaggtgtggagcgctctgcagatgagcaaggctctgcaggactcggcccccgacaggcccagccccgtggagaggatagtgagcagggacatcgctcgaggctacgagcgcatccccatcccctgtgtcaacgccgtggacagcgagccatgccccagcaactacaagtacgtctctcagaactgcgtgacgtcccccatgaacatcgacagaaatatcactcatctgcagtactgcgtgtgcatcgacgactgctcctccagcaactgcatgtgcggccagctcagcatgcgctgctggtacgacaaggatggccggctcctgccagagttcaacatggcggagcctcccttgatcttcgaatgcaaccacgcgtgctcctgctggaggaactgccgaaatcgcgtcgtacagaatggtctcagggcaaggctgcagctctaccggacgcgggacatgggctggggcgtgcggtccctgcaggacatcccaccaggcacctttgtctgcgagtatgttggggagctgatttcagactcagaagccgacgttcgagaggaagattcttacctctttgatctcgacaataagatctcctcggcttagcagctgaagactgacgctgcctgatcgcatcccctaggaagccccctggatcatcacggacgccgagcttcgggtaactcttatggtggagggggaaaacgtccagaaacaaatgaatcctcaggtctggaactcaggagaagactctggactgagctatggatctggaaactcctgaacagagcagtggttccaagctggagacgattttgcacctgggggacgtctgcaaggtctggagacagtttgggttgtcacaaccgaaggagtgctatggcacttagtgggatcaggcagggatgttgttaaacactgtacagtgcacaggacagccctccccaacagagttcctggaccgtacatgttaatggtgctggggctgagaggccactgatggactcgtggagctggcgaggcggccctggagtctgtggcctgtgagggaagcgggaacctctgagggagtgcagcgttcagcagcatccacccatccagccacgaggcctggcagaggggtgggagaggaggtggacctgccgtagaccccacaagcctgtcaaggagctgggacttggagtgaaaaggagagcgacgtggtcagaactgtgccttagaaagaccactctggacacagagagggggctggggagaggcgagggctgcatggtgctgtggctgcctgctggaatggcaggctaggccattgtgggcagcagtgagggaaggggtgattcgggagctggaagaggcaggacagggcaacgggctggacttgatgggtgagagaagctagtgacctttggcatgtagcaaacagttctcatgccctgccaccagcatcatgccagggcaggctgggctctcaccctcacagaatgtcccatgaataattatgtaactaaaagtgctgtgtgttgcaggtagcaactaaccggggctggtggcgtgggcagtaaaaagaatttaccaagactgttgtaggtaaagaaaggcagatttatgagagaaagtaggaaaatacgttgcaagaaagcaatgggcaatcaccaagagaggcgctggcagcaagagctgaaggcgtgctggggattttataggatggggcttgtgccggagagggccatgtgcagtgctgataacgcccaggttgcagggagctaacgcgtttttctatcagccgaggatctggtgataactgggcgtaggaagattgtgatttgtctgcacgggagggccgtgtgtcctggaccatgaagaaaggcagactcacagcttctccgctctctctgttgctttcccctggtcccaccagtctgactcctttccctcattaggactccgcagcatggacaccatgaagggaggcagagcctgtgacaggaacgctcagccagggaggcttctctgatgagggccagagctgtccaggccaggcctggggggacagacgcacattcacgttcaaggttttatttgaacatggtttcaatgaatcctctcaatgttttgaaattgcaacttagtttcagtcgtctacaaaacctttgctcccccgtagcagcaccccctttatgttgttattatcacaaattacatcttgacacactgggccaccagcaggacttataattattgtaataggcagttgtctctttaaattgcaaggcacttacagcgaaggtgcctgcatgctccctctagtcccccagggaagcagcccgagcccctgggaagggccaggtattaacttgccagacatcgcagctcattccaggctcccagccactcttccgtcagtggattccaattctgaaaatcggctcatgtccagaaacagcacgggagtgtgacttcctgctggggcagcccctcagcccctgccctctgttgactcttacatgtgaagcttcccccttgttggccactggtttcacccctcagggcaccgtgctctgttaccaccccctgttactgcccccaggcccctcggtggccgcctgcctcatcttccccacggggattagggagcccggctctgtagctgcgtctcccatcatcagcacaggctgcagagggggaacccctcgactctcccaccctcagcacaggctgcagatggggaacccctcaactctcccaccctcagcacaggctgcagacggggaacccctcgactctcccaccctcagcacaggctgcagagggggaacccctcgactctcccaccctcagcacaggctgcagacggggaacccctcgactctcccaccctcagcacaggctgcagacggggaacctcttgactctcccaccctcagcacaggctgcagacggggaatgcctcgacttcctggtgatgctggtgttctccctagggcttcctgcacacccacctccctccaccccattccttcctctaccagctgtcagagaacttgagggtttctgcttcactgtgagctggctaccacttttttcaaggcttttaagagccattccaagttttccccacctcctgggtcctgagaaagtgccccactgcagcaaatgcttccagacccttggtcaagctcctcactctcccatcccgggacttctcttctgccccagctgaggccatcaaccagttcttgcaattacttagctgtgcagcccctttctccctttttaggcttagcaccctgccccttcccgttggtctgtgctgggatttagccctcgcaattggcctggcaggcaggtgggacagctcctgaggcgagcacttgcttcctggtgagacaggtgattccgtaacatctccagcacagtagatgtgctcacctttatggggcaggaggacctgtgcacttccagaggttccagaggactggagggtcctcatcgttacatctttgggacccagattttccccaggggacccttactttctacctttgcagagctgacccaccggtggcccttcactctggttaagtgcctgtttacctctgtggtagaggcactccagtctcacaccgagcttggtaacagttctcaggatgtcggtatggggaaccagcccgctgtcctgtctttgttggtttggttgctccccactcccagtttttcaggggcctgcatcatcccaccagccacagcgctgtgctccaccgagatattttcccaggtcatcactcatgaagctcccaccgtgtgccagggaccaccggacctcccagccaaccaggacagcagcctctgcaccctttgggtggtgggcaggacagtcccagatcctctcctgatgccacttatgttagtccaggtcttccaagatgcagatgggataaaggtataaggatttggttagattttattagatgatgaaggctgagtgtggtggctcgtgcctgtaatcccagcactttgagaggccaaggtgggcagatcacttgaactcaggagttcgaggccagcctgggcaacatggtgaaacaccgtctcaacaaaaacaaacaaacaaaaattagcctggcatggtggtgtgtgcctgtagtccttgctacctgggaggctggaatgggagggttgcttgagtccaggaggtggaggttgcagtgagccgagatcatgcccctgtactgcagcctaggtgatgggaatgaagccctttcaaaaaaagagagaagattttattagatgatgaagattagatattgttgttattattagagatgaagcatggaggtagctaagaaacttggaagagcttcagaatgtgagtagctctaacttccagagaggaagagagggaacgaaggttgactgggagtgacctagatcactaaacaacctaaggaaggttcaggaaagctgccagggagttcttgagccaaagaagtgtggcctcagcacaaatgcagagacagattctgagcacaagagctgaggccattggtcatgacattcccatagttggaggcctatgaagcacactttcaaggaaactgcaactgtttaaaataacagtaatgtcctatgtgtgttttttttaaaagaaaggctgaaagttaattagctcatcatccacccgaagaagcaaaatcaacctaaaacaagaggtataaagagaagcactaattagatagaaactaacatgcactggagacaatcaaaccaaaactggttctttggcaacactaatcagaatggcaaccctctgggcaggtggggaagggggagcataaataaacaatttaaaggtgggccaggtgcagtggctgacacctgtaatcccagcactttgggaggctgaggtgggaggatcacttgagcccaggagttggagaccagcctgggcaacatagcaagaccctgtctctggaaaaaatttaaaaactagctggacatggtggcatgcacctgtgatcccagctactcgggaggctgaggtgggaggctggcttgagcctgggaggttgaggctgcagtgagctgagattctaccactgcagtccagtctgggtgacagagcaagaccatgtctcaataaataaataaataaataaataaataaataaagtggacacagccatagatataacatagatttaaaagataatatgaacaattttaggccaatacatttctagaaaaatataactgcactaacactgactcaagaggaaatagagaacccgaatagtcttataactcttaaagagatagaatcagtaattaaaatcacaaacaaaacatcaggcccagtcagtgagttccactgaactttcaaaatataaattccctatagaaatgctctctaactcatttacaaggctagcataacctggatatccaaacctgatgagaatagtgcagtgcacagctgcaaaaagtctagacaagttattggtaaaccagatctgaattgtacgcaaagatgattatgtttgatttaccccaggaatgacaggttggtttaactttaggaaatcagtttatgtaagccattcccttaacacatagaaggagaaaaattaggtcatttcaatgcagaaaaagcatttgacagaatttatcacctattcgtgagaaaaactcctagaaattaagactagaggggaactttgtgacctgatgaacggtatcttttgaacaaaaaaaaaaagaacaggcctggcgcagtggctcatgcctgtaatcccagcactgtgggaggccaaggtgggcagatcaccctgaggtcagtagttcaagaccaacatggcaaaaccccatctctactaaaagtacaaaaattagccaggtgtggtggcacgcgcctataatcccagctactcaggaggctgagacaggagaattgcttgaacctgggaggtggtggaggttgcagtgagctgagatagtgccactgcacttcagcctgggcaacagatcgagatttcgtct

SEQ ID NO: 389530 - DNA, 9063 bp, Homo sapiens
  misc_feature (981)..(983): n is a, c, g, or t
atggttctcgggaggggcggggccacgctgcgggcccgggccatggccgccgccgatgcgcgaggcagttccggcgaggggggagcctcagcaggattgctgtgtgaaaaccgagctgctgggagaagagacacctatggctgccgatgaaggctcagcagagaaacaggcaggagaggcccacatggctgcggacggtgagaccaatgggtcttgtgaaaacagcgatgccagcagtcatgcaaatgctgcaaagcacactcaggacagcgcaagggtcaacccccaggatggcaccaacacactaactcggatagcggaaaatggggtttcagaaagagactcagaagcggcgaagcaaaaccacgtcactgccgacgactttgtgcagacttctgtcatcggcagcaacggatacatcttaaataagccggccctacaggcacagcccttgaggactaccagcactctggcctcttcgctgcctggccatgctgcaaaaacccttcctggaggggctggcaaaggcaggactccaagcgcttttccccagacgccagccgccccaccagccacccttggggaggggagtgctgacacagaggacaggaagctcccggcccctggcgccgacgtcaaggtccacagggcacgcaagaccatgccgaagtccgtcgtgggcctgcatgcagccagtaaagatcccagagaagttcgagaagctagagatcataaggaaccaaaagaggagatcaacaaaaacatttctgactttggacgacagcagcttttaccccccttcccatcccttcatcagtcgctacctcagaaccagtgctacatggccaccacaaaatcacagacagcagctgcagtatctcggaagaaaaaacgaagaatgggaacctatagcctggttcctaagaaaaagaccaaagtattaaaacagaggacggtgattgagatgtttaagagcccccnnnaaaaaaaaaaaaatttttttttttgggggaaaaaaaagaaaaaggccccccttttggccccgaatttgtgccccaaggggagaaggacctgggcgccagcagcctgcacgtgaatggggagagcctggagatggactcggatgaggacgactcagaggagctcgaggaggacgacggccatggtgcagagcaggcggccgcgttccccacagaggacagcaggacttccaaggagagcatgtcggaggctgatcgcgcccagaagatggacggggagtccgaggaggagcaggagtccgtggacaccggggaggaggaggaaggcggtgacgagtctgacctgagttcggaatccagcattaagaagaaatttctcaagaggaaaggaaagaccgacagtccctggatcaagccagccaggaaaaggaggcggagaagtagaaagaagcccagcggtgccctcggttctgagtcgtataagtcatctgcaggaagcgctgagcagacggcaccaggagacagcacagggtacatggaagtttctctggactccctggatctccgagtcaaaggaattctgtcttcacaagcagaagggttggccaacggtccagatgtgctggagacagacggcctccaggaagtgcctctctgcagctgccggatggaaacaccgaagagtcgagagatcaccacactggccaacaaccagtgcatggctacagagagcgtggaccatgaattgggccggtgcacaaacagcgtggtcaagtatgagctgatgcgcccctccaacaaggccccgctcctcgtgctgtgtgaagaccaccggggccgcatggtgaagcaccagtgctgtcctggctgtggctacttctgcacagcgggtaattttatggagtgtcagcccgagagcagcatctctcaccgtttccacaaagactgtgcctctcgagtcaataacgccagctattgtccccactgtggggaggagagctccaaggccaaagaggtgacgatagctaaagcagacaccacctcgaccgtgacaccagtccccgggcaggagaagggctcggccctggagggcagggccgacaccacaacgggcagtgctgccgggccaccactctcggaggacgacaagctgcagggtgcagcctcccacgtgcccgagggctttgatccaacgggacctgctgggcttgggaggccaactcccggcctttcccagggaccagggaaggaaaccttggagagcgctctcatcgccctcgactcggaaaaacccaagaagcttcgcttccacccaaagcagctgtacttctccgccaggcaaggggagcttcagaaggtgctcctcatgctggtggacggaattgaccccaacttcaaaatggagcaccagaataagcgctctccactgcacgccgcggcagaggctggacacgtggacatctgccacatgctggttcaggcgggcgctaatattgacacctgctcagaagaccagaggaccccgttgatggaagcagccgaaaacaaccatctggaagcagtgaagtacctcatcaaggctggggccctggtggatcccaaggacgcagagggctctacgtgtttgcacctggctgccaagaaaggccactacgaagtggtccagtacctgctttcaaatggacagatggacgtcaactgtcaggatgacggaggctggacacccatgatctgggccacagagtacaagcacgtggacctcgtgaagctgctgctgtccaagggctctgacatcaacatccgagacaacgaggagaacatttgcctgcactgggcggcgttctccggctgcgtggacatagccgagatcctgctggctgccaagtgcgacctccacgccgtgaacatccacggagactcgccactgcacattgccgcccgggagaaccgctacgactgtgtcgtcctctttctttctcgggattcagatgtcaccttaaagaacaaggaaggagagacgcccctgcagtgtgcgagcctcaactctcaggtgtggagcgctctgcagatgagcaaggctctgcaggactcggcccccgacaggcccagccccgtggagaggatagtgagcagggacatcgctcgaggctacgagcgcatccccatcccctgtgtcaacgccgtggacagcgagccatgccccagcaactacaagtacgtctctcagaactgcgtgacgtcccccatgaacatcgacagaaatatcactcatctgcagtactgcgtgtgcatcgacgactgctcctccagcaactgcatgtgcggccagctcagcatgcgctgctggtacgacaaggatggccggctcctgccagagttcaacatggcggagcctcccttgatcttcgaatgcaaccacgcgtgctcctgctggaggaactgccgaaatcgcgtcgtacagaatggtctcagggcaaggctgcagctctaccggacgcgggacatgggctggggcgtgcggtccctgcaggacatcccaccaggcacctttgtctgcgagtatgttggggagctgatttcagactcagaagccgacgttcgagaggaagattcttacctctttgatctcgacaataagatctcctcggcttagcagctgaagactgacgctgcctgatcgcatcccctaggaagccccctggatcatcacggacgccgagcttcgggtaactcttatggtggagggggaaaacgtccagaaacaaatgaatcctcaggtctggaactcaggagaagactctggactgagctatggatctggaaactcctgaacagagcagtggttccaagctggagacgattttgcacctgggggacgtctgcaaggtctggagacagtttgggttgtcacaaccgaaggagtgctatggcacttagtgggatcaggcagggatgttgttaaacactgtacagtgcacaggacagccctccccaacagagttcctggaccgtacatgttaatggtgctggggctgagaggccactgatggactcgtggagctggcgaggcggccctggagtctgtggcctgtgagggaagcgggaacctctgagggagtgcagcgttcagcagcatccacccatccagccacgaggcctggcagaggggtgggagaggaggtggacctgccgtagaccccacaagcctgtcaaggagctgggacttggagtgaaaaggagagcgacgtggtcagaactgtgccttagaaagaccactctggacacagagagggggctggggagaggcgagggctgcatggtgctgtggctgcctgctggaatggcaggctaggccattgtgggcagcagtgagggaaggggtgattcgggagctggaagaggcaggacagggcaacgggctggacttgatgggtgagagaagctagtgacctttggcatgtagcaaacagttctcatgccctgccaccagcatcatgccagggcaggctgggctctcaccctcacagaatgtcccatgaataattatgtaactaaaagtgctgtgtgttgcaggtagcaactaaccggggctggtggcgtgggcagtaaaaagaatttaccaagactgttgtaggtaaagaaaggcagatttatgagagaaagtaggaaaatacgttgcaagaaagcaatgggcaatcaccaagagaggcgctggcagcaagagctgaaggcgtgctggggattttataggatggggcttgtgccggagagggccatgtgcagtgctgataacgcccaggttgcagggagctaacgcgtttttctatcagccgaggatctggtgataactgggcgtaggaagattgtgatttgtctgcacgggagggccgtgtgtcctggaccatgaagaaaggcagactcacagcttctccgctctctctgttgctttcccctggtcccaccagtctgactcctttccctcattaggactccgcagcatggacaccatgaagggaggcagagcctgtgacaggaacgctcagccagggaggcttctctgatgagggccagagctgtccaggccaggcctggggggacagacgcacattcacgttcaaggttttatttgaacatggtttcaatgaatcctctcaatgttttgaaattgcaacttagtttcagtcgtctacaaaacctttgctcccccgtagcagcaccccctttatgttgttattatcacaaattacatcttgacacactgggccaccagcaggacttataattattgtaataggcagttgtctctttaaattgcaaggcacttacagcgaaggtgcctgcatgctccctctagtcccccagggaagcagcccgagcccctgggaagggccaggtattaacttgccagacatcgcagctcattccaggctcccagccactcttccgtcagtggattccaattctgaaaatcggctcatgtccagaaacagcacgggagtgtgacttcctgctggggcagcccctcagcccctgccctctgttgactcttacatgtgaagcttcccccttgttggccactggtttcacccctcagggcaccgtgctctgttaccaccccctgttactgcccccaggcccctcggtggccgcctgcctcatcttccccacggggattagggagcccggctctgtagctgcgtctcccatcatcagcacaggctgcagagggggaacccctcgactctcccaccctcagcacaggctgcagatggggaacccctcaactctcccaccctcagcacaggctgcagacggggaacccctcgactctcccaccctcagcacaggctgcagagggggaacccctcgactctcccaccctcagcacaggctgcagacggggaacccctcgactctcccaccctcagcacaggctgcagacggggaacctcttgactctcccaccctcagcacaggctgcagacggggaatgcctcgacttcctggtgatgctggtgttctccctagggcttcctgcacacccacctccctccaccccattccttcctctaccagctgtcagagaacttgagggtttctgcttcactgtgagctggctaccacttttttcaaggcttttaagagccattccaagttttccccacctcctgggtcctgagaaagtgccccactgcagcaaatgcttccagacccttggtcaagctcctcactctcccatcccgggacttctcttctgccccagctgaggccatcaaccagttcttgcaattacttagctgtgcagcccctttctccctttttaggcttagcaccctgccccttcccgttggtctgtgctgggatttagccctcgcaattggcctggcaggcaggtgggacagctcctgaggcgagcacttgcttcctggtgagacaggtgattccgtaacatctccagcacagtagatgtgctcacctttatggggcaggaggacctgtgcacttccagaggttccagaggactggagggtcctcatcgttacatctttgggacccagattttccccaggggacccttactttctacctttgcagagctgacccaccggtggcccttcactctggttaagtgcctgtttacctctgtggtagaggcactccagtctcacaccgagcttggtaacagttctcaggatgtcggtatggggaaccagcccgctgtcctgtctttgttggtttggttgctccccactcccagtttttcaggggcctgcatcatcccaccagccacagcgctgtgctccaccgagatattttcccaggtcatcactcatgaagctcccaccgtgtgccagggaccaccggacctcccagccaaccaggacagcagcctctgcaccctttgggtggtgggcaggacagtcccagatcctctcctgatgccacttatgttagtccaggtcttccaagatgcagatgggataaaggtataaggatttggttagattttattagatgatgaaggctgagtgtggtggctcgtgcctgtaatcccagcactttgagaggccaaggtgggcagatcacttgaactcaggagttcgaggccagcctgggcaacatggtgaaacaccgtctcaacaaaaacaaacaaacaaaaattagcctggcatggtggtgtgtgcctgtagtccttgctacctgggaggctggaatgggagggttgcttgagtccaggaggtggaggttgcagtgagccgagatcatgcccctgtactgcagcctaggtgatgggaatgaagccctttcaaaaaaagagagaagattttattagatgatgaagattagatattgttgttattattagagatgaagcatggaggtagctaagaaacttggaagagcttcagaatgtgagtagctctaacttccagagaggaagagagggaacgaaggttgactgggagtgacctagatcactaaacaacctaaggaaggttcaggaaagctgccagggagttcttgagccaaagaagtgtggcctcagcacaaatgcagagacagattctgagcacaagagctgaggccattggtcatgacattcccatagttggaggcctatgaagcacactttcaaggaaactgcaactgtttaaaataacagtaatgtcctatgtgtgttttttttaaaagaaaggctgaaagttaattagctcatcatccacccgaagaagcaaaatcaacctaaaacaagaggtataaagagaagcactaattagatagaaactaacatgcactggagacaatcaaaccaaaactggttctttggcaacactaatcagaatggcaaccctctgggcaggtggggaagggggagcataaataaacaatttaaaggtgggccaggtgcagtggctgacacctgtaatcccagcactttgggaggctgaggtgggaggatcacttgagcccaggagttggagaccagcctgggcaacatagcaagaccctgtctctggaaaaaatttaaaaactagctggacatggtggcatgcacctgtgatcccagctactcgggaggctgaggtgggaggctggcttgagcctgggaggttgaggctgcagtgagctgagattctaccactgcagtccagtctgggtgacagagcaagaccatgtctcaataaataaataaataaataaataaataaataaagtggacacagccatagatataacatagatttaaaagataatatgaacaattttaggccaatacatttctagaaaaatataactgcactaacactgactcaagaggaaatagagaacccgaatagtcttataactcttaaagagatagaatcagtaattaaaatcacaaacaaaacatcaggcccagtcagtgagttccactgaactttcaaaatataaattccctatagaaatgctctctaactcatttacaaggctagcataacctggatatccaaacctgatgagaatagtgcagtgcacagctgcaaaaagtctagacaagttattggtaaaccagatctgaattgtacgcaaagatgattatgtttgatttaccccaggaatgacaggttggtttaactttaggaaatcagtttatgtaagccattcccttaacacatagaaggagaaaaattaggtcatttcaatgcagaaaaagcatttgacagaatttatcacctattcgtgagaaaaactcctagaaattaagactagaggggaactttgtgacctgatgaacggtatcttttgaacaaaaaaaaaaagaacaggcctggcgcagtggctcatgcctgtaatcccagcactgtgggaggccaaggtgggcagatcaccctgaggtcagtagttcaagaccaacatggcaaaaccccatctctactaaaagtacaaaaattagccaggtgtggtggcacgcgcctataatcccagctactcaggaggctgagacaggagaattgcttgaacctgggaggtggtggaggttgcagtgagctgagatagtgccactgcacttcagcctgggcaacagatcgagatttcgtct

SEQ ID NO: 389531 - DNA, 8445 bp, Homo sapiens
ctaagtgtggaactaccatgtgatccagcagttccactgctgggcacgtgccccagcagcactgaaagcagggtcttgaagagatgcttgtacacccacgttgatagcagcatcaaccacagcagccaaaagggggaagccacccgagggtcggctgtcgggcgaacggatcagcaaagtgtcgtgtgcaaaacgcagtgacgtgtgactcagcctgagaagcagcgaagctggggcccgcgctgcagcgtggatgagcctcggggacactgtgccgaatgaacttgcttgccttttgttttagcagctgcagtatctcggaagaaaaaacgaagaatgggaacctatagcctggttcctaagaaaaagaccaaagtattaaaacagaggacggtgattgagatgtttaagagcataactcattccactgtgggttccaagggggagaaggacctgggcgccagcagcctgcacgtgaatggggagagcctggagatggactcggatgaggacgactcagaggagctcgaggaggacgacggccatggtgcagagcaggcggccgcgttccccacagaggacagcaggacttccaaggagagcatgtcggaggctgatcgcgcccagaagatggacggggagtccgaggaggagcaggagtccgtggacaccggggaggaggaggaaggcggtgacgagtctgacctgagttcggaatccagcattaagaagaaatttctcaagaggaaaggaaagaccgacagtccctggatcaagccagccaggaaaaggaggcggagaagtagaaagaagcccagcggtgccctcggttctgagtcgtataagtcatctgcaggaagcgctgagcagacggcaccaggagacagcacagggtacatggaagtttctctggactccctggatctccgagtcaaaggaattctgtcttcacaagcagaagggttggccaacggtccagatgtgctggagacagacggcctccaggaagtgcctctctgcagctgccggatggaaacaccgaagagtcgagagatcaccacactggccaacaaccagtgcatggctacagagagcgtggaccatgaattgggccggtgcacaaacagcgtggtcaagtatgagctgatgcgcccctccaacaaggccccgctcctcgtgctgtgtgaagaccaccggggccgcatggtgaagcaccagtgctgtcctggctgtggctacttctgcacagcgggtaattttatggagtgtcagcccgagagcagcatctctcaccgtttccacaaagactgtgcctctcgagtcaataacgccagctattgtccccactgtggggaggagagctccaaggccaaagaggtgacgatagctaaagcagacaccacctcgaccgtgacaccagtccccgggcaggagaagggctcggccctggagggcagggccgacaccacaacgggcagtgctgccgggccaccactctcggaggacgacaagctgcagggtgcagcctcccacgtgcccgagggctttgatccaacgggacctgctgggcttgggaggccaactcccggcctttcccagggaccagggaaggaaaccttggagagcgctctcatcgccctcgactcggaaaaacccaagaagcttcgcttccacccaaagcagctgtacttctccgccaggcaaggggagcttcagaaggtgctcctcatgctggtggacggaattgaccccaacttcaaaatggagcaccagaataagcgctctccactgcacgccgcggcagaggctggacacgtggacatctgccacatgctggttcaggcgggcgctaatattgacacctgctcagaagaccagaggaccccgttgatggaagcagccgaaaacaaccatctggaagcagtgaagtacctcatcaaggctggggccctggtggatcccaaggacgcagagggctctacgtgtttgcacctggctgccaagaaaggccactacgaagtggtccagtacctgctttcaaatggacagatggacgtcaactgtcaggatgacggaggctggacacccatgatctgggccacagagtacaagcacgtggacctcgtgaagctgctgctgtccaagggctctgacatcaacatccgagacaacgaggagaacatttgcctgcactgggcggcgttctccggctgcgtggacatagccgagatcctgctggctgccaagtgcgacctccacgccgtgaacatccacggagactcgccactgcacattgccgcccgggagaaccgctacgactgtgtcgtcctctttctttctcgggattcagatgtcaccttaaagaacaaggaaggagagacgcccctgcagtgtgcgagcctcaactctcaggtgtggagcgctctgcagatgagcaaggctctgcaggactcggcccccgacaggcccagccccgtggagaggatagtgagcagggacatcgctcgaggctacgagcgcatccccatcccctgtgtcaacgccgtggacagcgagccatgccccagcaactacaagtacgtctctcagaactgcgtgacgtcccccatgaacatcgacagaaatatcactcatctgcagtactgcgtgtgcatcgacgactgctcctccagcaactgcatgtgcggccagctcagcatgcgctgctggtacgacaaggatggccggctcctgccagagttcaacatggcggagcctcccttgatcttcgaatgcaaccacgcgtgctcctgctggaggaactgccgaaatcgcgtcgtacagaatggtctcagggcaaggctgcagctctaccggacgcgggacatgggctggggcgtgcggtccctgcaggacatcccaccaggcacctttgtctgcgagtatgttggggagctgatttcagactcagaagccgacgttcgagaggaagattcttacctctttgatctcgacaataagatctcctcggcttagcagctgaagactgacgctgcctgatcgcatcccctaggaagccccctggatcatcacggacgccgagcttcgggtaactcttatggtggagggggaaaacgtccagaaacaaatgaatcctcaggtctggaactcaggagaagactctggactgagctatggatctggaaactcctgaacagagcagtggttccaagctggagacgattttgcacctgggggacgtctgcaaggtctggagacagtttgggttgtcacaaccgaaggagtgctatggcacttagtgggatcaggcagggatgttgttaaacactgtacagtgcacaggacagccctccccaacagagttcctggaccgtacatgttaatggtgctggggctgagaggccactgatggactcgtggagctggcgaggcggccctggagtctgtggcctgtgagggaagcgggaacctctgagggagtgcagcgttcagcagcatccacccatccagccacgaggcctggcagaggggtgggagaggaggtggacctgccgtagaccccacaagcctgtcaaggagctgggacttggagtgaaaaggagagcgacgtggtcagaactgtgccttagaaagaccactctggacacagagagggggctggggagaggcgagggctgcatggtgctgtggctgcctgctggaatggcaggctaggccattgtgggcagcagtgagggaaggggtgattcgggagctggaagaggcaggacagggcaacgggctggacttgatgggtgagagaagctagtgacctttggcatgtagcaaacagttctcatgccctgccaccagcatcatgccagggcaggctgggctctcaccctcacagaatgtcccatgaataattatgtaactaaaagtgctgtgtgttgcaggtagcaactaaccggggctggtggcgtgggcagtaaaaagaatttaccaagactgttgtaggtaaagaaaggcagatttatgagagaaagtaggaaaatacgttgcaagaaagcaatgggcaatcaccaagagaggcgctggcagcaagagctgaaggcgtgctggggattttataggatggggcttgtgccggagagggccatgtgcagtgctgataacgcccaggttgcagggagctaacgcgtttttctatcagccgaggatctggtgataactgggcgtaggaagattgtgatttgtctgcacgggagggccgtgtgtcctggaccatgaagaaaggcagactcacagcttctccgctctctctgttgctttcccctggtcccaccagtctgactcctttccctcattaggactccgcagcatggacaccatgaagggaggcagagcctgtgacaggaacgctcagccagggaggcttctctgatgagggccagagctgtccaggccaggcctggggggacagacgcacattcacgttcaaggttttatttgaacatggtttcaatgaatcctctcaatgttttgaaattgcaacttagtttcagtcgtctacaaaacctttgctcccccgtagcagcaccccctttatgttgttattatcacaaattacatcttgacacactgggccaccagcaggacttataattattgtaataggcagttgtctctttaaattgcaaggcacttacagcgaaggtgcctgcatgctccctctagtcccccagggaagcagcccgagcccctgggaagggccaggtattaacttgccagacatcgcagctcattccaggctcccagccactcttccgtcagtggattccaattctgaaaatcggctcatgtccagaaacagcacgggagtgtgacttcctgctggggcagcccctcagcccctgccctctgttgactcttacatgtgaagcttcccccttgttggccactggtttcacccctcagggcaccgtgctctgttaccaccccctgttactgcccccaggcccctcggtggccgcctgcctcatcttccccacggggattagggagcccggctctgtagctgcgtctcccatcatcagcacaggctgcagagggggaacccctcgactctcccaccctcagcacaggctgcagatggggaacccctcaactctcccaccctcagcacaggctgcagacggggaacccctcgactctcccaccctcagcacaggctgcagagggggaacccctcgactctcccaccctcagcacaggctgcagacggggaacccctcgactctcccaccctcagcacaggctgcagacggggaacctcttgactctcccaccctcagcacaggctgcagacggggaatgcctcgacttcctggtgatgctggtgttctccctagggcttcctgcacacccacctccctccaccccattccttcctctaccagctgtcagagaacttgagggtttctgcttcactgtgagctggctaccacttttttcaaggcttttaagagccattccaagttttccccacctcctgggtcctgagaaagtgccccactgcagcaaatgcttccagacccttggtcaagctcctcactctcccatcccgggacttctcttctgccccagctgaggccatcaaccagttcttgcaattacttagctgtgcagcccctttctccctttttaggcttagcaccctgccccttcccgttggtctgtgctgggatttagccctcgcaattggcctggcaggcaggtgggacagctcctgaggcgagcacttgcttcctggtgagacaggtgattccgtaacatctccagcacagtagatgtgctcacctttatggggcaggaggacctgtgcacttccagaggttccagaggactggagggtcctcatcgttacatctttgggacccagattttccccaggggacccttactttctacctttgcagagctgacccaccggtggcccttcactctggttaagtgcctgtttacctctgtggtagaggcactccagtctcacaccgagcttggtaacagttctcaggatgtcggtatggggaaccagcccgctgtcctgtctttgttggtttggttgctccccactcccagtttttcaggggcctgcatcatcccaccagccacagcgctgtgctccaccgagatattttcccaggtcatcactcatgaagctcccaccgtgtgccagggaccaccggacctcccagccaaccaggacagcagcctctgcaccctttgggtggtgggcaggacagtcccagatcctctcctgatgccacttatgttagtccaggtcttccaagatgcagatgggataaaggtataaggatttggttagattttattagatgatgaaggctgagtgtggtggctcgtgcctgtaatcccagcactttgagaggccaaggtgggcagatcacttgaactcaggagttcgaggccagcctgggcaacatggtgaaacaccgtctcaacaaaaacaaacaaacaaaaattagcctggcatggtggtgtgtgcctgtagtccttgctacctgggaggctggaatgggagggttgcttgagtccaggaggtggaggttgcagtgagccgagatcatgcccctgtactgcagcctaggtgatgggaatgaagccctttcaaaaaaagagagaagattttattagatgatgaagattagatattgttgttattattagagatgaagcatggaggtagctaagaaacttggaagagcttcagaatgtgagtagctctaacttccagagaggaagagagggaacgaaggttgactgggagtgacctagatcactaaacaacctaaggaaggttcaggaaagctgccagggagttcttgagccaaagaagtgtggcctcagcacaaatgcagagacagattctgagcacaagagctgaggccattggtcatgacattcccatagttggaggcctatgaagcacactttcaaggaaactgcaactgtttaaaataacagtaatgtcctatgtgtgttttttttaaaagaaaggctgaaagttaattagctcatcatccacccgaagaagcaaaatcaacctaaaacaagaggtataaagagaagcactaattagatagaaactaacatgcactggagacaatcaaaccaaaactggttctttggcaacactaatcagaatggcaaccctctgggcaggtggggaagggggagcataaataaacaatttaaaggtgggccaggtgcagtggctgacacctgtaatcccagcactttgggaggctgaggtgggaggatcacttgagcccaggagttggagaccagcctgggcaacatagcaagaccctgtctctggaaaaaatttaaaaactagctggacatggtggcatgcacctgtgatcccagctactcgggaggctgaggtgggaggctggcttgagcctgggaggttgaggctgcagtgagctgagattctaccactgcagtccagtctgggtgacagagcaagaccatgtctcaataaataaataaataaataaataaataaataaagtggacacagccatagatataacatagatttaaaagataatatgaacaattttaggccaatacatttctagaaaaatataactgcactaacactgactcaagaggaaatagagaacccgaatagtcttataactcttaaagagatagaatcagtaattaaaatcacaaacaaaacatcaggcccagtcagtgagttccactgaactttcaaaatataaattccctatagaaatgctctctaactcatttacaaggctagcataacctggatatccaaacctgatgagaatagtgcagtgcacagctgcaaaaagtctagacaagttattggtaaaccagatctgaattgtacgcaaagatgattatgtttgatttaccccaggaatgacaggttggtttaactttaggaaatcagtttatgtaagccattcccttaacacatagaaggagaaaaattaggtcatttcaatgcagaaaaagcatttgacagaatttatcacctattcgtgagaaaaactcctagaaattaagactagaggggaactttgtgacctgatgaacggtatcttttgaacaaaaaaaaaaagaacaggcctggcgcagtggctcatgcctgtaatcccagcactgtgggaggccaaggtgggcagatcaccctgaggtcagtagttcaagaccaacatggcaaaaccccatctctactaaaagtacaaaaattagccaggtgtggtggcacgcgcctataatcccagctactcaggaggctgagacaggagaattgcttgaacctgggaggtggtggaggttgcagtgagctgagatagtgccactgcacttcagcctgggcaacagatcgagatttcgtct

SEQ ID NO: 389532 - DNA, 1934 bp, Homo sapiens
atggttctcgggaggggcggggccacgctgcgggcccgggccatggccgccgccgatgcgcgaggcagttccggcgaggggggagcctcagcaggattgctgtgtgaaaaccgagctgctgggagaagagacacctatggctgccgatgaaggctcagcagagaaacaggcaggagaggcccacatggctgcggacggtgagaccaatgggtcttgtgaaaacagcgatgccagcagtcatgcaaatgctgcaaagcacactcaggacagcgcaagggtcaacccccaggatggcaccaacacactaactcggatagcggaaaatggggtttcagaaagagactcagaagcggcgaagcaaaaccacgtcactgccgacgactttgtgcagacttctgtcatcggcagcaacggatacatcttaaataagccggccctacaggcacagcccttgaggactaccagcactctggcctcttcgctgcctggccatgctgcaaaaacccttcctggaggggctggcaaaggcaggactccaagcgcttttccccagacgccagccgccccaccagccacccttggggaggggagtgctgacacagaggacaggaagctcccggcccctggcgccgacgtcaaggtccacagggcacgcaagaccatgccgaagtccgtcgtgggcctgcatgcagccagtaaagatcccagagaagttcgagaagctagagatcataaggaaccaaaagaggagatcaacaaaaacatttctgactttggacgacagcagcttttaccccccttcccatcccttcatcagtcgctacctcagaaccagtgctacatggccaccacaaaatcacagacagcagctgcagtatctcggaagaaaaaacgaagaatgggaacctatagcctggttcctaagaaaaagaccaaagtattaaaacagaggacggtgattgagatgtttaagagcataactcattccactgtgggttccaagggggagaaggacctgggcgccagcagcctgcacgtgaatggggagagcctggagatggactcggatgaggacgactcagaggagctcgaggaggacgacggccatggtgcagagcaggcggccgcgttccccacagaggacagcaggacttccaaggagagcatgtcggaggctgatcgcgcccagaagatggacggggagtccgaggaggagcaggagtccgtggacaccggggaggaggaggaaggcggtgacgagtctgacctgagttcggaatccagcattaagaagaaatttctcaagaggaaaggaaagaccgacagtccctggatcaagccagccaggaaaaggaggcggagaagtagaaagaagcccagcggtgccctcgcagcatctctcaccgtttccacaaagactgtgcctctcgagtcaataacgccagctattgtccccactgtggggaggagagctccaaggccaaagaggtgacgatagctaaagcagacaccacctcgaccgtgacaccagtccccgggcaggagaagggctcggccctggagggcagggccgacaccacaacgggcagtgctgcgggccacactctcggaggagacaagctgaggtgcagcttcacgtgccgagctttgatcaacggactgtggagtggagggcactcggcttccaggcagggaggaacttggaggggctataggcctgaatggaaacaggaggtggtcaccaaaaggtggttttcgcagcagggcaaaaggtctttgtgtgggggtgcccataaggacgaaaacgcatgggcaggagagacaggatcgctatgagcgggaataagacgtgaacaatagtagggaacatatagagaacatagagtagagagagtagcaaagaatatatggtgatatggtagctattctgacgt

SEQ ID NO: 389533 - DNA, 424 bp, Homo sapiens
gggttccggcgtggctcgaggtggctgtttatgtggaggatggtcatttgtgagtgcttgccagccatcgtgacagtcctgagctggagtctgtggctacatctgaaatcattaataaaactgtgtttgttcacagtggacggaattgaccccaacttcaaaatggagcaccagaataagcgctctccactgcacgccgcggcagaggctggacacgtggacatctgccacatgctggttcaggtgcggcggcacggcgccctcctagggctcttcacctgctctcttttatttttaccaaagtaaaatcataccacgttcgcggttcttccagtgtaagagttccgtagtgctgtgaatcgggcacagagtcagcttttctgcccccgagtcctgcaggtggatcagtgcttcccgctgtttc

SEQ ID NO: 389534 - DNA, 484 bp, Homo sapiens
catttgagtgagttgccacgtgtgcgtggaaatgcgtttctgtgttcagggcctcgttatcagtaatttgggtgacctcagtccccgggaaggtgccagtgccatgaagctcctctgccataggggcagagtgttcgtgtccaagatcattgtgggggactccaccccgtcctccctgccctcctcaccacagcccacctgtctgccgggctcttctccaggtggcaggggcacctcttcgtgtgtccccgcctccccacaggcccttgcacctcccagtcacccaagactcctcagtgaaagcaagtttgttcatgatgcgcactgatcctgccttggggtatacacctgcccgtgttggggagaaggacctgggcgccagcagcctgcacgtgaatggggagagcctggagatggactcggatgaggacgactcagaggagctcgaggaggacgacggccatggtgcagagcaggcggccgc

SEQ ID NO: 389535 - DNA, 315 bp, Homo sapiens
gtagtgactacaggggagaagaggaaacaaaagaaggtttagaaagataagtagtttgccaagttcattcaatgggaacagaatagtctctttgaacagatagatggtgctgggacaactggataatcacatgccaaagaatgaagttggactcctacctcacaccatatacaaaaattaactcaaaatggatcaacaacctaaatatatgagctaaaaccataaaactcttataagaaaacaggggtgaatcttcatgacccaatatttggcaatggattcttagatatgatgccaaaagcacaagcaacaaaa

SEQ ID NO: 389536 - DNA, 586 bp, Homo sapiens
cctcatggttttgccgagggctgtttcaaaggttggtgcacctggagaaagccttgccatctgctccctttggacagcctcaagtttgcctctgctggaagtgagcttccaaaattagtctggaacattaaaaacctcggtttccattaattcagctcaaggtccccaaggactagcatatttaatctagatttagctgattagcctgcatttcgctgtgtaattcccatccttggctgctaaaatgggaggaaaaaagagcaagtgaaagtaacaagtcctgtcgggatttggctcaaggcaggagttagagaagccaggtggcagactgcctgggaggaagtgcagagtgggaagcaagggtgaggcagaggtagagtgtagagttgaaggtcagtgaaggtgaagaatgagtcttatgaagtagttattgatgcaagggcaggaatctagctactgacagatcatcaaggattaagagaaaatcttacacaatacttaccagagaacaatgacattgaactttgttcctctgaccggatgtggatctcaaaatgtgagttcagtgtgggagccaagctagcac

SEQ ID NO: 389537 - DNA, 632 bp, Homo sapiens
ccccactggagcatattacgtttgcctaagatgtataaaagtttgtttaagatgtgtaaaagtttgcttaaggaactgaggatccttaaataaaaatattagaaattagaaattgaacctaatactaaacagtaaattcagcttaacctgaaccttggcatagtcagagcttcctcctacatctaaagtatttgctctctgttttagttaaagtcataatttgcgctgatgtgtaatcactttccaagaagagggcaatgagaaaagatatttaaagctttctctccatagccctccaagacttctgggacaactaaatttactttcaccattactgtgagaggaggtgagaaaactctagtattttgttggcagagtaatcactttgttctcatcgctcaaagcatttttaggattatttttctagcgtaacctttagagagaactggaagaaaaaggaaattggtctactaggtattgtagacacaaataagtaacattaggctaaccccttatgagacatttccacacaatttcatcgtgcctgtacttttctctatggtaaaagccagtgtttacactttgtagggatcagggtgtatttgttgaattaaacaaaatattttcaatga

SEQ ID NO: 389538 - DNA, 355 bp, Homo sapiens
cgcccctatgcttcttgtgttcaagtgattcttgtgcctgagcctgctgaacagatggggttacagacgcatgcgcccagacccagcgttttttgtatttttagtagagacggggtttctccatgttggtcaggctggtctcaaactcccaacctcaggtgatccacccgcctcggcctcccaaagcgctgggattacaggcatgagccacagcgcccggcctaaggggtgctcattcttaatggtgttctgatattgtaggtctgcaggacccaatacagtagccagtagcacatgagtttttgaacacttgaattgggactagctctactaaaagactgagaggaggtgtgct

SEQ ID NO: 389539 - DNA, 404 bp, Homo sapiens
tcttgtaaatttgtttgagttctttgtagattctggatattagccctttgtcagataggtcgattgcaaaaatgttctcccattctgtaggttgcctgttcactttgatggtactttcttttgctgtgcagaagctctttaattagatcccatttgtctgttttggcttttgctgccattgcttttggtgttttaatcatgaagtcgttgcccatgcctatgtcctgaatggtattgcctaggttttcttctagggtttttatggttttaggtccaacatttaagtctttaatcaaatttgaaaactacatatctcaatagataccgaaaaagtgtttgacaaaatccaacatccattcttgatttaaaagttagtttaaaatctagttaacctctcagctaac

SEQ ID NO: 389540 - DNA, 269 bp, Homo sapiens
actcgaaggcgagtgttagaagcaccctggcctcccctgcccccaagtcctgagatgcactagggtcatgttcgggcctgtcagggccacactggaaggtcacaaccacctggccctggcggtgaccctgggcctgggccaggagcagttgggctgcataggccgtactgagagagcagctgaccctccctgactcacgacaagtgccgcattccgaggcggcccggccaggctggaaagcgtgtgtgtctgtgtgtgtgtgtgtgtgt

SEQ ID NO: 389541 - DNA, 609 bp, Homo sapiens
atcatcgagagtcgactgtgggcttgaaaggtgtagagaaggccagtcgatagcataacgtcggtgagggaggtatcaaatggtgtcatttgtggatacttggaatctcaaaaaaaatctcatcactaggaaatgatggcaaaaataaataaaaattaaaaaataaaaaaagagcagaagaaatatttgaaaaaaaaatggccaagaatttagttacagacatgaaaactccagaaccaagaagcccaccaagcatgatgaatatcaaaaaacacacaccaaaaaaaccccaaaacaagaaaaatgatagcaaatccccaaatataggtatatcaatcaaattcaaactgctgaaaattaaaatcaaaaacagttttgaaggcagtccaagtaaaaaaatacatgactgccatgcatacgttaactataggaatatggtctgagaagtacatcataggatgatttcatcattctgtgaacatcatagagtatgcttacatgaacctagattgcagttgtgtagcttattgtacctgtaagctacatagtacagctgaatgcttttaggctataaacctgtacagcacgttactgtactgaatactatag

SEQ ID NO: 389542 - DNA, 254 bp, Homo sapiens
tctatatggtgataatgcttccttctgggtaatacattaatacacaatttaattctgtaagatatcattgaataaaatatgctaatttaaatatagcatatttggcattttaaaactttaatagcaattttaaatttttctaaagaatgaggatactcatagaatcattaaaaatttgaattattcaataaggcacttaaatcggtgtgagatgactaaagccaacaatatttttcataaattatgtaggtgac

SEQ ID NO: 389543 - DNA, 341 bp, Homo sapiens
tcttcatcagggttttgtttttgttgctttaaagcaagagttaagtttatagtctgttaagctcttacaaatttggcttattagttaaatggacgtagtttagcttaaactttatgttagagtgagatgaaaccctatgaatataatcagttttagaaaaactaatcagtttattgtgcatcagagacgtcacatgaagaagaaaacttgttgacatccaggatgatcaggagccttcattaaaacagaaattttagggaaaaccacaaaaaccttcgtaaagtgaattgcattaaacatcaattataataaaatttcatattttgaataaatgacatttt

SEQ ID NO: 389544 - DNA, 347 bp, Homo sapiens
cagacgcacactaccatgcctggctactttttgtatttttaggaaagatgaggtttgccatgttggtcaggctggtcttgaactcctgacctcaagtgatccgcctgccttggcctcccaaagtactaggattacaggcgtgagccaccacacccagcctgaaaattatatcttgtgctcaagatgattacaatttaatagatttgtttataaaattttagagagatttaattggccttatgctgtctttatcttttgagaagaaattccctcaaagaataaaggtttctacatttttttttgaaatctttgagttatctcagcaccataggaaaggtaaaaacaga

SEQ ID NO: 389545 - DNA, 979 bp, Homo sapiens
ctaatgctccgagaggaatgtgtacttgggcaaagtcatgcaggaaggtcatatcagagctgtggaggctggagtgtcctgattcttggaccacagatgtctccctgagccattatttatttatttttaaaaagcacagttattccatcattttgagtctttgtatttcgcttatattggggggcaggactattttctcaggtgtctcatttggcagtcaacattgtcccctatgttccctatgactagttgaaaattcaagtgtgcccacaggggtgcacaaaaccacacccatgcacacacacaccctcagcccccacacacaccccgttgaacccgtgggtctatcaggacatcctaaaactccgtgattgacatttcagtaatttcaggggaaggtgttttccagggatggggtctcccaggttcagatagtgcctttggctgcaaatgctcctttagctaaacttttcctcaggaagaattcattattctagacattatgtgatatatctgttaggaataaaaggtgcttaaccttcctccctgggatgtgggagaaggtgctggaggttgtactgtgaagtcttcaggctcttagaaggctccagcctgagagagccctttattattgacattcctgtccttcctcaaggcctggtgacctgtgacctttcgctctgggcagggcccaggtagatgggccgtcatccgggcctgtaagccgtacttgatttctgcattgatttacatattttttactgtgatcttggttccaaacacagaatcgtcaccccattctcccttgaatgtgccggatccttgtaaattctcatttacctacttgttcttagtgtgtatgtgtgtgcgaaactctatgttcaagaaagaaatcatacaaagagtaagaacatgtttgtgccattgaagaaatggttttttgatttctaataaatatttgttttgcctcgttaaaaca

SEQ ID NO: 389546 - DNA, 772 bp, Homo sapiens
ccgagtagctgggattacaggcatgcaccaccatacccagctaattttgtatttttagtagagatggggtttctccatgttggtcaggctggtctcgaactcctgacctcaggtgagctgcccgcctcggcctcccgaagtgctgggatcacaggcgtgagctactgcacctggccagatgtgctttctttatcctttgaacctctaaaatccttgagtccttgctatggctttatttgcatttgctgcttaacaaacatttactgaatgtctttcacgtgccaaccactgggctgggtgttgaggttggggagatggagggacaagatagagaggccagtgggaaggtgacttcagatctaggtaagatactatctttccctagagaagttcacattaacagtggttttctgtcttggctacacattagaatcacttggggagcttaaaaagatcgaagtgcctgggtcctaatcccagagattctgatttaatggttttgggatatggccaaaacattgggagtttcagaagctcctcgggtgattctaatatggagccaaggttgagagctattgtgctaatggaagagacagaccgataaatggctaatttcattgcttccaatgccagaagaatatacagggcacatggggaacaggagtatttaatttagcctagagtgatttttattgtacaactagaccgtaagctgtttatgggcagggcccagggctttgtcatcttggggttctcttgcctgattcttata

SEQ ID NO: 389547 - DNA, 319 bp, Homo sapiens
ctggggtctccagacaccctggctcaatgcctggacactgttcaaagctgctacagctagagctggggaccaagcaccaggacccctgagttccaggcccaactcggtggctgatgtgctgcgggagcttgggcaaatccctacccctccattggcctcagtttcctggaaggcagttgaataagattgctcctgtccgtgaccttcctccataatatcatctgtgacaggctggacatttgggataccacaaagtagtccctcctgcatggaacccaggccccaggttatttaggatctctccttggtaccaagcgct

SEQ ID NO: 389548 - DNA, 392 bp, Homo sapiens
cctatcacaggcagtgcccagaacatccgcatccacatccacccacaattgcacactgggagtcccgctctgagtggtggagagcagcagtgagaagctgggaggaggcagaggggaggacagaggaggaggctgacacaggtcacacgagcggctgctgggcctcggaaggctcagctacaaaatgacaaggggaggcagaagacttctctcttaatatctgagtaaaagccaacgcaaaagccaccgcatttgtcttgtgtcacccatgggcccaactggactgttcattccttcattcaacaacaatggactgagtttcccctgggtgctgggcactatgctggccatctggggacagcacactgagacaggggtcctgtccttctgga

SEQ ID NO: 389549 - DNA, 161 bp, Homo sapiens
tttttaagtgattgtgaatggtattgatttaattttgatatccacatattcattgttcaaaaacatatcttgtttgtctgagtttgttttgttttgttttgtttttttgaggcaaagtctcactctgtcacccaggctggagtgcagcggcatgatctggg

SEQ ID NO: 389550 - DNA, 586 bp, Homo sapiens
atgggtgctggcaagacaaagcggtaaagaagcagagtgtgaagcagcaggagccaggcgtggagaaggatctgcagcgcgccggaagtggaagctcgggtggtagcaagaaaagcgagaggcagacgtggaacacagctagggctcgggaatgggggagcactggagaacacgctccctcatctctccttcctgtgaacttgctcaaggacacttctgcctcccccagctcccatgtaggtcagcttctcccaggtgtccaccaacacctacctgtctttaccacaaatccccaatatcttaagatagcttgcattcatctttgctcctttaactgaattagccaatggttcgcttctttgagtccatttccttatctaaaaaatggcaacaattattcctgccttccctcacagggtggcttgggacctgtggtggtgccaccacacacagagaccacgcgtggtggtgggtgcctatagctactcgggaggctgaggcaggagaatggtgtgaacctgggaggcggagcttgcagtgagctgagatcatcccactgtactccagcctgggcgacacagtgaga

SEQ ID NO: 389551 - DNA, 173 bp, Homo sapiens
ggaagaggttgatcaaatccaggtctacctgatcacaaagataagtttttaaccactgggccgtattaccacccttagagaatgtggtcaatcccgtgtcctcatttttacatctgtaactgccagctaaatgaggtcaagtaacttgctgaaggtcacagagtcaaaagtgg

SEQ ID NO: 389552 - DNA, 260 bp, Homo sapiens
gggaacagtagctaggattttttaggggggggtgctagtttaagggtttttggaagaggtgcacatttatgtgtgtgtgtatgtgtgtgtgttgcactgatgcaaacaactatattgttgtaagtcaagaataatttaactagtttttagattttagaggagctaggctgagagaaagaaatgcattttaaattttatttacaggagtgtaccttgcttgttaaaaggttttaagaaattcttacttactttgaaaagca

SEQ ID NO: 389553 - DNA, 323 bp, Homo sapiens
attgtactaggccctgaagatactgtagtaaacaagacagacaagttctctgttctcttgaagcttatattgtagtgacagtaaacagagtaagcaaattagaaaacaagttaacttcaggcattttagtgacatgagaacaacaaaaacagcagggtgatgtgaggcaatgggatatgagaatggctgagaggcctactctggagtaagtctgcaagtgaaatcacctttgatgaggtgatgtttgagttgagacaggaatcacagaaaggagccaattagtgaagatctcagggccaaccatgccaggcagagggaataag

SEQ ID NO: 389554 - DNA, 387 bp, Homo sapiens
acgagaggatgatgcctgatgtgtggtctcaaatccttctcagtacagcctcccaccaagcaatcacatatggcacaagagccaaccctactgaacatcgctgtgccagacgggagtctttgagttcttttgtgggtccctagtacctggcacatagtaggtgcttattccatgctgcttgactgaataaagaccactggaactaagacctgtatgttctgaatccggcttcagtgctttctcctggttttaaggcaaaatatgtggcctctccagcaggtcttgttggctcgctccttcaaaatacaatttttgtggcgttactatatgcctagtcctgtgttaggccctggagatagggtgatgaacaagactttatgctcccct

SEQ ID NO: 389555 - DNA, 200 bp, Homo sapiens
gtgattgtttggtgatggaatcatgcgggcggagggaaatgatctgtttgtgcttgaatctgcctctaggtagggaccacatgactggctgagccattagtcataggtatgaatgaggtcagccggttgccagaatgcaaaagaatgagaaacatctcaaaagaccagtctcgcgttctacaatagtgatgttatctata

SEQ ID NO: 389556 - DNA, 182 bp, Homo sapiens
gtctaaaacaaacaaacacctgtagaaccagataaaaaattagtccttatgtgggatagattgtgtgttataaattcacaaggatatttaaaaattgtcataatctttcttttttcaaactcagtataaaatgtgttctcataatagtatagcacatgtttgaactgtgtttctagcagctg

SEQ ID NO: 389557 - DNA, 323 bp, Homo sapiens
aaactcctgggctcaagcatctgcccgttttggcctcccaaaatgctaggattccaggtgtgagccactgtgccccaccaacatgatgtttatatattgtggcatgggttaatcaagctaattaacatataggcattatctcacatactcttttttttttggtaagaacacttacaagtatgcaatacatgttattagctatggtcaccatgttgattatagatctcttgaacttattcctcttaacagaaattttgtatcttttgaccaatatctctccaataccttcttcctacagcccttggtaaccatcattgtactct

SEQ ID NO: 389558 - DNA, 305 bp, Homo sapiens
ttttctgacatttgatatcaggcaacacaggacagtgatccacaagataaggaaaacaaataagttgagtttcccaggttcctgcctggaaagagtttcgagggtacagcacagggaggagaaatccaagcagagcccagcagtctctctaagttgaggaagtgaatctgggaatctgggagggtcaatggagctagagttcccagggcagaatatcagcacactagagagaagagaactgcaccgagagagcagcagaggtctgcagagggctccccaaaagtcttcagctgggtacccatcag

SEQ ID NO: 389559 - DNA, 1108 bp, Homo sapiens
tggaggggagcctggaagccccacggggctcactagctgatgcctgagcccttctggggagctgagccacatccaggggttcaggttttgcttgctcctcagtggtgcaccagtgactttggtcaggagccctggttgccacaattgacgtctgagctgctggcacctggcagaggcctgtcagcagccatgggtggggtcagcgcagggaatctttccaagaggcccaacagtgtgactcacgccagggttcctggaggtctgcatagagtcggggtgggcgcctctgctcatgttaacctgtgcccacctaggtggtatttgagcctgtctatctttgctcagtggagtgcccatagccaaggtagtggcaggctcttctctgcagctgtcatctcccctggcatcaacagagcctgggccgggcgcggtggctcacacctgtaatcccaacactttgggaggccaaggtgggcagatcacaaggtcaagagatcgagaccagcccagccaacatggtgaaaccccgtctctactaaaaatacaaaaattagctgggcatggtgatgtgtgcctgtagtcccaagtaactcgagaggctgaggcaggagaatcgcttgaacctggaggtagaggttgcggtgagctgagatcatgccactgcactccagcctggcgacagagcgagactctgtctcagaaacaaaaagaacaaacctccccccggccaaaaaaaaccaaaaaacaaaaacagagtctgacacaggaaggacctgagacctgaagccacacagccccactctgcacatgctagagatgacatggcaagcccaggctggtgaggataaaagtctcagccccagctgggtgcagtggctcaagcctgtaatcccagcactttgggatccaggcagacggattgcttgaggccaggaatttgagaccagcctggccaacacagtgaaaccctgtctctactaaaaatacaaaaattagccaggtgtagtggcccatgcctgtaatcccagctactggggaggctgaggcatgagaatcacttgagcccgggagccggaggttgcagtgagccaagaccatgccattgcac

SEQ ID NO: 389560 - DNA, 515 bp, Homo sapiens
cctggtcaccccacctctgtgtcctgtctcttcagataccctgctcgccacccgccgaccattcttcccagcaagctgtgttatcttgtcattcctgtgctcaagaacccagaatctcttctaaggcctctaagacaagatccaagcttcttctcccagaattccaggccttcctaaatctgacccctggtctctgaagccccctggtcacctgctactggagcccaggtgctctcctctcactgaagcttcctcattattcccaagacacacgccagtcgcttttgcctctctgatgttgagtgaaacagtgaaaggagcatgggctttgcttcctgtgtgtctctaggcaagtcacccagtgtctccgtgcctcctgctgcttacctgggaaatactttaaagactgttgtgagatgagaatgtttgcgtacaaagtgccagccacacagtaggtgctcaatacatgcacagtatccgtcataccatgctcttgctgctccctgacttgatgg

SEQ ID NO: 389561 - DNA, 599 bp, Homo sapiens
cacagcaaggcaacactacaagaaaacttaagtcagaaactgccctaatttcagtgtcggaaaatggacagtaacatatcttgtaccaagaggagcttaaaaatgccctgacaggctgggcagggtataatcccagcactttgggagcctgaagctgggggatcacttgagctcaggagttcaaggctagcctaggcaacattgcaaaactcttatctctacaaaaaaaaaatacaaaataattagcaaataaaaaataattaggcagtggcatgcacctgtggtcccagctactctggaggctgaggcaggagaatctcgagcccaggaggcagaggttgcagtgagccgagatcatgccactgcacttcagcctaggtgaagggagtgaaatcctgtctcccaaaaaaaaaaaaaaaaaaaagctaaagaattataggtaatttcccataagacgttgcgaactgtagggagaagctggcctgggagagggaggaaatgaggtgtggtgggtcaggcacagtggctcactccaataatcccaacaagcaggaggattgcttgaacccaggagttcaggaccagcctgggcaacatag

SEQ ID NO: 389562 - DNA, 477 bp, Homo sapiens
ggcatttcagactcttattgttgtataaggagccatttgaggagactgtctccaaaggtagttgatctctttctgccacaactagttcaatcaccaggggaatatcttggagttagttgtaactaaatctgctcaactaagaatacaaattcccactgcccccttcatttcatcataatctcatttaacaagtttttttgtttgttttgttttgttttgtttttatttgagatcatgccactgcacttcagcctaggtgaagggagtgaaatcctgtctcccaaaaaaaaaaaaaaaaaaaagctaaagaattataggtaatttcccataagacgttgcgaactgtagggagaagctggcctgggagagggaggaaatgaggtgtggtgggtcaggcacagtggctcactccaataatcccaacaagcaggaggattgcttgaacccaggagttcaggaccagcctgggcaacatag

SEQ ID NO: 389563 - DNA, 213 bp, Homo sapiens
  misc_feature (175)..(175): n is a, c, g, or t
cacagcaaggcaacactacaagaaaacttaagtcagaaactgccctaatttcagtgtcggaaaatggacagtaacatatcttgtaccaagaggagcttaaaaatgccctgacaggctgggcagggtataatcccagcactttgggagcctgaagctgtctttaatggttccaganagttctctggctaaggatcggtgccgcatctgtcgagc

SEQ ID NO: 389564 - DNA, 281 bp, Homo sapiens
atgggaatcatgggtattgctagtgttttctcaaaaagaaagaacactcataagggaagtttatatgtctagaaatgtaggacagaccagtctttagagggaaaaaatactcatctagcagtataatatttcataagaaaaagaagtgtctcgaataggaaagatgatttactttttgtgctattaataaagccttaataaagggatttttaatgtgaatatgccatgatcattctctcctgtatggcgatagagtaatttggctacttatagggtattca

SEQ ID NO: 389565 - DNA, 397 bp, Homo sapiens
gccagcagctgcacatgaagggagattttggaacaggcctggccagaggcgaatcactcatcccagcagtcagaactcagcaagcctcaccactatatgcttaagtgctctgaggttctaggtaaacttgaaagacagtctaggacacaaggattgcaattcctaggtaactcctagtgctgggctgggctcagaaccagagggataggggtggcacatgacctaggaagtcatcagctggggcagctaagggagtgcttgtgccacccctcccctaatcccaggcagtgaagcttgcagcaacaaaagtcactccttccttctgcttaaggagaggagagaaaagagtaaagaggactttgtcttgcatcttggataccagctcagccacagtagg

SEQ ID NO: 389566 - DNA, 579 bp, Homo sapiens
acggatcgaagcggctgggttgggcggtaaacaggccgtgggtagggaggacagagaggcggcgttcgctcctctgggacttttcacgcctcgttttgttttttttcttcagatgtggctttttcctgacgcagggtccaagcagtcagcttgagcttactcttctgtgaaagcggaaagtctcctctgaggaaagcggttgaacttgtggagggcgtgcgagacgggcgttctcccccatgccaggcgaatggtgcggccttgagctggtccagcagccggctcgatgacaggtctgagggaggccccagaggcggcgggaaggtggcccgcagaacgcgggttctgtaaagacacgtggagaagattcgattccgagaacaggaagaggcggatggaaagacagccaggcggctgccgggaagggggctgccaagatggcgtcggcctcctcccaaccgtcgttggcggtcggtttttcatcctttgatcccggggccccttcctgtaccgcgtcctcagcatctggaatcttgagccccacggcatctgaggtgccttatgcctctggcatgccca

SEQ ID NO: 389567 - DNA, 356 bp, Homo sapiens
tctggcatcacatggggatctcaggcagaatagaccacagcctctcatgttttaagaaaatgtggttttgattctataatagaaaactcacaggccatccaagagaattccaaatgacgaaatgaacagagcaggcttcattaccacacggagcctccctctctgtggaggcatttggaatttggtgaggactcaccatgtccctataacaagaaccagggcagtatctggaacctgcaccccaaggcctcccagagaggaaaacaacagggcattcccagggaatcgcgccttccccttgctctcatctccaacctgccccatctcctggaaaaacatagaataaactttctgct

SEQ ID NO: 389568 - DNA, 373 bp, Homo sapiens
acatcacccagccaaatgtttcctgctccttagacacaagtcacccttcatgctgtttcagtcaccatgcccacacatctgtccttctatgaagatctagtcaatgccatctcctcccaaaagtctttcctggttatggccaatccatgatcatctcacacctttgaactgcaaaagcacttcttactgctgattaaaactatcactttttgcctggtattctaagcattcttaaacggagatgacacctcgagccctcggctagcctgtaaacgccttgagggcagcacctccaaccaaacaccctgcacataaaagggttatctggatgtgatgagtgatcgtgttacaaccccacgatcacgaacaggga

SEQ ID NO: 389569 - DNA, 326 bp, Homo sapiens
tggctttacctgttttctatgtggccagagtaccctcctgatggctcttggtgaataaaggagccaaagctaaaagttagaggctccagtctttggaaggcgtcttcagtaaaaatatcctttggggatgcttagttattctaagaatagttatagatctaataaatattgcctttgaacggttaagtttggatatgcaagaaggccagctgtgagaagaacaggcagccgtgcaagctggcaaagggagaaaaaactgtttagggataggagaaaacagatggatgccttaggccagctgtgtctgcactcaggagcccaggttg

SEQ ID NO: 389570 - DNA, 715 bp, Homo sapiens
gaatggaaaatgtattccatgcaaatggaaaccaaaagaactgggatagctatacttaggtaaaatagattttaagtaatgtatacaaggagacaaaggtcattgtataatgataaagggatcaattcaagaggatataacaattataaatatatatgcactcagcatcagagcacctaaatatataaagcaaagatataaagatctgaagagataaactgcaatacaataatggtaggggacctcaatacccattttcaacaatgtacagatcatgcagacagaaaatcaatatggaaatgttggaattgagccacagtttagacaaatggatctaacatatatacagaacatttcatccaatagcaacagaatacacattattttgaagctcacacagagctttctgcagaatagatcatacattaagctacaaaagaaaacttaacaaatttaagcaggttaaagtcatatccagtatctttcaaccacagtggtatgaaattaggaattaataataggaaaaatgtcagaaaattcacaatatgtagaattaaaccaaattctcctgtacaaccagtgggtcaaagacgaaagtaaaagggacattaaaaattgtcttgagacaaatgaaaatggaaacaccacatgccaaaacttgcgggtagcagccaaagcagtcccaagaggaagataatagcaataaacacctata

SEQ ID NO: 389571 - DNA, 186 bp, Homo sapiens
cagtttctgatgtttccaaataattttattttctgacttttttttctttgcctttgacatctgaactatacttggcaagaaaaaaaaacataaaaactttccattgcaactcatatctcatggtgattcctgttgcatcaaatcttaagttatccatcagaaaagttacgcaaaatctataaccat

SEQ ID NO: 389572 - DNA, 225 bp, Homo sapiens
cccaactttctcagttactctcagactctagagtgttcgccagccttggagcgtacccgttcctccagccattcttcggcctcagttcctttccatcattcgccctcaggccttcgcctaccccagcttcaaagaagcgaccgtaacctcctagctggctgggttcgagaagccggggacctgcgcctcctggtggctgatcggaaggaggctgagtgcagaggg

SEQ ID NO: 389573 - DNA, 349 bp, Homo sapiens
cccctgtgttagggttagatttaggctatgaccctggctttatggctagatagtttgatttgggctttgtccccatagtgtctcctacccttttttggaataggacagcattgcacattgaacagtcactgagcccaagctctgtactttggtatttgggagagctttgaagataaaacacctgatctctggcttcccagaagttagtcttgagaaatgcaatcagttagttggaatagttagctgcaactaagtgttaaatcttaggatgctaactggatttacaatagggcatttagaaatgttagagatcaaagtgtactgaagatatgggaagtggcttcatttt

SEQ ID NO: 389574 - DNA, 379 bp, Homo sapiens
gcccaggttgtctcaaactactgggttcaagcaatcctcccaccttggcctcccaaggtgttgggattacaggcgtgagccgctgcacttggccctaaatgttttaaagtggttaatttgaagttctttctgtgaaagaaatgaaatagtgtaagctactcaaattgtttctgaatgcagatgaatgtaaaggttaaatttcattaatgatactttcgactagtatagatcattattggaagttaatttagtcctttcatttccttaatctttttaaagatgccaacttttttctgtattttggaaaggcattgatggaacccaggtctactaagagcattgaatggatggttggactaaattgctcctcaggtccttt

SEQ ID NO: 389575 - DNA, 1454 bp, Homo sapiens
gacctgactgagcggaagtaggagctctcagaggctaagaaggtggagaccggagaagctgtgaggttctttagcgtcacctccctcactgggcagcatgggggagaagtcagagaactgtggggttccagaggatctgttaaatggtttgaaggttacagatactcaggaagccgagtgtgctggccctccagttcctgatcccaaaaatcagcattcccagagtaagctgctcagggatgatgaggcccatctccaggaggaccagggagaagaggagtgttttcatgactgcagtgcctcatttgaggaggagccaggagcggacaaggttgagaacaaatctaatgaagatgtgaattcctctgaactagatgaagaatacctaatagaactggaaaaaaacatgtcggatgaagagaaacagaaaagaagagaagagagcactagactaaaggaggagggaaatgaacagtttaagaaaggagattatatagaagctgaaagttcttatagtcgagccctcgaaatgtgcccatcctgcttccaaaaggagaggtcgattctattttcaaatagagctgcagcaaggatgaaacaggacaagaaagaaatggccatcaatgactgcagcaaagcaattcaattaaaccccagctatatcagggcaatattgaggagagcagagttgtatgagaagacggacaagctagatgaagccctggaagactataaatctatattagaaaaagatccatcaatacatcaagcaagagaagcttgtatgagattacctaagcaaattgaagaacgtaatgaaagactaaaagaagagatgttaggtaaattaaaagatcttgggaacttggttctccgaccttttgggctctccacggaaaatttccagatcaaacaggattcctctaccggctcgtactccatcaatttcgttcaaaatccaaataataacagataacaaagataacaaaagctttacaagctgacttggaattgtgtgctgcttgctgttagctaggggaaaggccctgccaatgtttaacttttaaaagcatcttatctaaaagaaaggctatccagtagagcccagtgctcccttgtccctcttttatgatcagggtgaaatgtacttcctgatgtaatgaacctaatttgatttccattttaaggtggtgtctgtgcagctggtgtccccgattctggctgtcctatgtccaggaagaagcccatttgttgaggctgaccttcctgatcatacacacacacagcccagcaaaagcctctcctgaaccaaacaaacctgttggttgggagactgcccagacatgattgatgacgggttcccgcctgctgtcccctccctgatcacacagctaacgaggctgcctccagcatttcctgatttcctctgtggtaataaaagctttctgtgctta

SEQ ID NO: 389576 - DNA, 1030 bp, Homo sapiens
gacctgactgagcggaagtaggagctctcagaggctaagaaggtggagaccggagaagctgtgaggttgtgagtaaccccgtgggtctaagcgtgttggctgtgaggaacaaagctagggaataatctgctgggaagcgcgaggcatcacttccctaactgtaggagctcaaactcctgtgttcttccagtagacctgggagcgaagagaagcaagacattgctgtggaggcgaagtctccgtattaagatcttgctggttttttaagttttcttggcacatactagggcaaattcagactcttgtcgtgatacaagggtcgttggcgtgattttgctgcgactagagcaatttacgttcttgcaaatctgtcgcaaatttttgcaaatgtctgggctgctgatgctctgactcagcttctacagcagtggttcgcaattggctgcatatcagaatcacctgggatgaaaacataaataaataaataaataaacctgatgcccttgcttgacgcgacactaataaatcagaatttggtcagggtctgagcagtggtattttctaaagtatctctagtgttctcttgggcagctagggttcagagtcacgctttctaatgcctgactctggcccccacggtaatcctgattagggtcacctgcgccagggttccccttccagtgtaagctgagtgggctctaccacacgcatttgggttaaagtgatcacaattttggcacggattttattttgaagtctactagaaacgtattcttgggcttcctgtggtggtgctaaaaagacggaccgtagtttcttactcgtgccttggttattcattctgaatggagattagggctgcttcctttttcttggcactgttttagtttctgcctaatttttgctatccaaacagaacacgaacggtggaacgtggaagagttacattaaaaacggcttcttttgttgcttttaagaagttctgggccaggcgcggtggcaggcgcctgtaatcccagctactcgggag

SEQ ID NO: 389577 - DNA, 325 bp, Homo sapiens
tcctggcaaggtggaaatcaggacaagaaagaaatggccatcaatgactgcagcgaaggtggtgtctgtgcagctggtgtccccgattctggctgtcctatgtccaggaagaagcccatttgttgaggctgaccttcctgatcatacacacacacagcccagcaaaagcctctcctgaaccaaacaaacctgttggttgggagactgcccagacatgattgatgacgggttcccgcctgctgtcccctccctgatcacacagctaacgaggctgcctccagcatttcctgatttcctctgtggtaataaaagctttctgtgctta

SEQ ID NO: 389578 - DNA, 170 bp, Homo sapiens
gcggccgcctactactactactactgctcgaattcaagcttctaacgatgtacggggacatgattgatgacgggttcccgcctgctgtcccctccctgatcacacagctaacgaggctgcctccagcatttcctgatttcctctgtggtaataaaagctttctgtgctta

SEQ ID NO: 389579 - DNA, 1435 bp, Homo sapiens
ctgctcagacggcgttgactcggcacgaggacggagaagctgtgaggttctttagcgtcacctccctcactgggcagcatgggggagaagtcagagaactgtggggttccagaggatctgttaaatggtttgaaggttacagatactcaggaagccgagtgtgctggccctccagttcctgatcccaaaaatcagcattcccagagtaagctgctcagggatgatgaggcccatctccaggaggaccagggagaagaggagtgttttcatgactgcagtgcctcatttgaggaggagccaggagcggacaaggttgagaacaaatctaatgaagatgtgaattcctctgaactagatgaagaatacctaatagaactggaaaaaaacatgtcggatgaagagaaacagaaaagaagagaagagagcactagactaaaggaggagggaaatgaacagtttaagaaaggagattatatagaagctgaaagttcttatagtcgagccctcgaaatgtgcccatcctgcttccaaaaggagaggtcgattctattttcaaatagagctgcagcaaggatgaaacaggacaagaaagaaatggccatcaatgactgcagcaaagcaattcaattaaaccccagctatatcagggcaatattgaggagagcagagttgtatgagaagacggacaagctagatgaagccctggaagactataaatctatattagaaaaagatccatcaatacatcaagcaagagaagcttgtatgagattacctaagcaaattgaagaacgtaatgaaagactaaaagaagagatgttaggtaaattaaaagatcttgggaacttggttctccgaccttttgggctctccacggaaaatttccagatcaaacaggattcctctaccggctcgtactccatcaatttcgttcaaaatccaaataataacagataacaaagataacaaaagctttacaagctgacttggaattgtgtgctgcttgctgttagctaggggaaaggccctgccaatgtttaacttttaaaagcatcttatctaaaagaaaggctatccagtagagcccagtgctcccttgtccctcttttatgatcagggtgaaatgtacttcctgatgtaatgaacctaatttgatttccattttaaggtggtgtctgtgcagctggtgtccccgattctggctgtcctatgtccaggaagaagcccatttgttgaggctgaccttcctgatcatacacacacacagcccagcaaaagcctctcctgaaccaaacaaacctgttggttgggagactgcccagacatgattgatgacgggttcccgcctgctgtcccctccctgatcacacagctaacgaggctgcctccagcatttcctgatttcctctgtggtaataaaagctttctgtgctta

SEQ ID NO: 389580 - DNA, 1400 bp, Homo sapiens
gacctgactgagcggaagtaggagctctcagaggctaagaaggtggagaccggagaagctgtgaggttctttagcgtcacctccctcactgggcagcatgggggagaagtcagagaactgtggggttccagaggatctgttaaatggtttgaaggttacagatactcaggaagccgagtgtgctggccctccagttcctgatcccaaaaatcagcattcccagagtaagctgctcagggatgatgaggcccatctccaggaggaccagggagaagaggagtgttttcatgactgcagtgcctcatttgaggaggagccaggagcggacaaggttgagaacaaatctaatgaagatgtgaattcctctgaactagatgaagaatacctaatagaactggaaaaaaacatgtcggatgaagagaaacagaaaagaagagaagagagcactagactaaaggaggagggaaatgaacagtttaagaaaggagattatatagaagctgaaagttcttatagtcgagccctcgaaatgtgcccatcctgcttccaaaaggagaggtcgattctattttcaaatagagctgcagcaaggatgaaacaggacaagaaagaaatggccatcaatgactgcagcaaagcaattcaattaaaccccagctatatcagggcaatattgaggagagcagagttgtatgagaagacggacaagctagatgaagccctggaagactataaatctatattagaaaaagatccatcaatacatcaagcaagagaagcttgtatgagattacctaagcaaattgaagaacgtaatgaaagactaaaagaagagatgttaggtaaattaaaagatcttgggaacttggttctccgaccttttgggctctccacggaaaatttccagatcaaacaggattcctctaccggctcgtactccatcaatttcgttcaaaatccaaataataacagataacaaagataacaaaagctttacaagctgacttggaattgtgtgctgcttgctgttagctaggggaaaggccctgccaatgtttaacttttaaaagcatcttatctaaggtgaaatgtacttcctgatgtaatgaacctaatttgatttccattttaaggtggtgtctgtgcagctggtgtccccgattctggctgtcctatgtccaggaagaagcccatttgttgaggctgaccttcctgatcatacacacacacagcccagcaaaagcctctcctgaaccaaacaaacctgttggttgggagactgcccagacatgattgatgacgggttcccgcctgctgtcccctccctgatcacacagctaacgaggctgcctccagcatttcctgatttcctctgtggtaataaaagctttctgtgctta

SEQ ID NO: 389581 - DNA, 1200 bp, Homo sapiens
gacctgactgagcggaagtaggagctctcagaggctaagaaggtggagaccggagaagctgtgaggttctttagcgtcacctccctcactgggcagcatgggggagaagtcagagaactgtggggttccagaggatctgttaaatggtttgaaggttacagatactcaggaagccgagtgtgctggccctccagttcctgatcccaaaaatcagcattcccagagtaagctgctcagggatgatgaggcccatctccaggaggaccagggagaagaggagtgttttcatgactgcagtgcctcatttgaggaggagccaggagcggacaaggttgagaacaaatctaatgaagatgtgaattcctctgaactagatgaagaatacctaatagaactggaaaaaaacatgtcggatgaagagaaacagaaaagaagagaagagagcactagactaaaggaggagggaaatgaacagtttaagaaaggagattatatagaagctgaaagttcttatagtcgagccctcgaaatgtgcccatcctgcttccaaaaggagaggtcgattctattttcaaatagagctgcagcaaggatgaaacaggacaagaaagaaatggccatcaatgactgcagcaaagcaattcaattaaaccccagctatatcagggcaatattgaggagagcagagttgtatgagaagacggacaagctagatgaagccctggaagactataaatctatattagaaaaagatccatcaatacatcaagcaagagaagcttgtatgagattacctaagcaaattgaagaacgtaatgaaagactaaaagaagagatgttaggtaaattaaaagatcttgggaacttggttctccgaccttttgggctctccacggaaaatttccagatcaaacaggattcctctaccggctcgtggtgtctgtgcagctggtgtccccgattctggctgtcctatgtccaggaagaagcccatttgttgaggctgaccttcctgatcatacacacacacagcccagcaaaagcctctcctgaaccaaacaaacctgttggttgggagactgcccagacatgattgatgacgggttcccgcctgctgtcccctccctgatcacacagctaacgaggctgcctccagcatttcctgatttcctctgtggtaataaaagctttctgtgctta

SEQ ID NO: 389582 - DNA, 1095 bp, Homo sapiens
gacctgactgagcggaagtaggagctctcagaggctaagaaggtggagaccggagaagctgtgaggttctttagcgtcacctccctcactgggcagcatgggggagaagtcagagaactgtggggttccagaggatctgttaaatggtttgaaggttacagatactcaggaagccgagtgtgctggccctccagttcctgatcccaaaaatcagcattcccagagtaagctgctcagggatgatgaggcccatctccaggaggaccagggagaagaggagtgttttcatgactgcagtgcctcatttgaggaggagccaggagcggacaaggttgagaacaaatctaatgaagatgtgaattcctctgaactagatgaagaatacctaatagaactggaaaaaaacatgtcggatgaagagaaacagaaaagaagagaagagagcactagactaaaggaggagggaaatgaacagtttaagaaaggagattatatagaagctgaaagttcttatagtcgagccctcgaaatgtgcccatcctgcttccaaaaggagaggtcgattctattttcaaatagagctgcagcaaggatgaaacaggacaagaaagaaatggccatcaatgactgcagcaaagcaattcaattaaaccccagctatatcagggcaatattgaggagagcagagttgtatgagaagacggacaagctagatgaagccctggaagactataaatctatattagaaaaagatccatcaatacatcaagcaagagaagcttgtatgagattacctaagcaaattgaagaacgtaatgaaagactaaaagaagagatgttaggtaaattaaaagatcttgggaacttggttctccgaccttttgggctctccacggaaaatttccagatcaaacaggattcctctaccggctcgtaatccatctcgtttctttttcaagtagaggggtgagctctgggtgcggctcctcataataggccgccactgtctccaggtagccccctttgaagtcgtcctccagctctaccaggctcgatttcacctgtccaggtcctgattaccaccttgccaggtac

SEQ ID NO: 389583 - DNA, 884 bp, Homo sapiens
gctcagtggtcccctggcaggtggaaatcaggacaagaaagaaatggccatcaatgactgcagcaaagcaattcaattaaaccccagctatatcagggcaatattgaggagagcagagttgtatgagaagacggacaagctagatgaagccctggaagactataaatctatattagaaaaagatccatcaatacatcaagcaagagaagcttgtatgagattacctaagcaaattgaagaacgtaatgaaagactaaaagaagagatgttaggtaaattaaaagatcttgggaacttggttctccgaccttttgggctctccacggaaaatttccagatcaaacaggattcctctaccggctcgtactccatcaatttcgttcaaaatccaaataataacagataacaaagataacaaaagctttacaagctgacttggaattgtgtgctgcttgctgttagctaggggaaaggccctgccaatgtttaacttttaaaagcatcttatctaaaagaaaggctatccagtagagcccagtgctcccttgtccctcttttatgatcagggtgaaatgtacttcctgatgtaatgaacctaatttgatttccattttaaggtggtgtctgtgcagctggtgtccccgattctggctgtcctatgtccaggaagaagcccatttgttgaggctgaccttcctgatcatacacacacacagcccagcaaaagcctctcctgaaccaaacaaacctgttggttgggagactgcccagacatgattgatgacgggttcccgcctgctgtcccctccctgatcacacagctaacgaggctgcctccagcatttcctgatttcctctgtggtaataaaagctttctgtgctta

SEQ ID NO: 389584 - DNA, 595 bp, Homo sapiens
gaattcgcggtccgcgtcgacacggtgcgagtaagacgacagaaggggatcaaacaggattcctctaccggctcgtactccatcaatttcgttcaaaatccaaataataacagataacaaagataacaaaagctttacaagctgacttggaattgtgtgctgcttgctgttagctaggggaaaggccctgccaatgtttaacttttaaaagcatcttatctaaaagaaaggctatccagtagagcccagtgctcccttgtccctcttttatgatcagggtgaaatgtacttcctgatgtaatgaacctaatttgatttccattttaaggtggtgtctgtgcagctggtgtccccgattctggctgtcctatgtccaggaagaagcccatttgttgaggctgaccttcctgatcatacacacacacagcccagcaaaagcctctcctgaaccaaacaaacctgttggttgggagactgcccagacatgattgatgacgggttcccgcctgctgtcccctccctgatcacacagctaacgaggctgcctccagcatttcctgatttcctctgtggtaataaaagctttctgtgctta

SEQ ID NO: 389585 - DNA, 1808 bp, Homo sapiens
gacctgactgagcggaagtaggagctctcagaggctaagaaggtggagaccggagaagctgtgaggttctttagcgtcacctccctcactgggcagcatgggggagaagtcagagaactgtggggttccagaggatctgttaaatggtttgaaggttacagatactcaggaagccgagtgtgctggccctccagttcctgatcccaaaaatcagcattcccagagtaagctgctcagggatgatgaggcccatctccaggaggaccagggagaagaggagtgttttcatgactgcagtgcctcatttgaggaggagccaggagcggacaaggttgagaacaaatctaatgaagatgtgaattcctctgaactagatgaagaatacctaatagaactggaaaaaaacatgtcggatgaagagaaacagaaaagaagagaagagagcactagactaaaggaggagggaaatgaacagtttaagaaaggagattatatagaagctgaaagttcttatagtcgagccctcgaaatgtgcccatcctgcttccaaaaggagaggtcgattctattttcaaatagagctgcagcaaggatgaaacaggacaagaaagaaatggccatcaatgactgcagcaaagcaattcaattaaaccccagctatatcagggcaatattgaggagagcagagttgtatgagaagacggacaagctagatgaagccctggaagactataaatctatattagaaaaagatccatcaatacatcaagcaagagaagcttgtatgagattacctaagcaaattgaagaacgtaatgaaagactaaaagaagagatgttaggtaaattaaaagatcttgggaacttggttctccgaccttttgggctctccacggaaaatttccagatcaaacaggattcctctaccggctcgtactccatcaatttcgttcaaaatccaaataataacagataacaaagataacaaaagctttacaagctgacttggaattgtgtgctgcttgctgttagctaggggaaaggccctgccaatgtttaacttttaaaagcatcttatctaaaagaaaggctatccagtagagcccagtgctcccttgtccctcttttatgatcagggtgaaatgtacttcctgatgtaatgaacctaatttgatttccattttaaggtggtgtctgtgcagctggtgtccccgattctggctgtcctatgtccaggaagaagcccatttgttgaggctgaccttcctgatcatacacacacacagcccagcaaaagcctctcctgaaccaaacaaacctgttggttgggagactgcccagacatgattgatgacgggttcccgcctgctgtcccctccctgatcacacagctaacgaggctgcctccagcatttcctgatttcctctgtggtaataaaagctttctgtgcttaaaaaaaaaaaaaaaaaaaaaatttttcgggggggctcggccccgaaaaatttttaaaacaacttcgttgggggcgggggcccaagttatatgcacctgggcccaaagcggctccagagaaccggccatgactggcgtgcgttcccccataaaaacccggcgcacgcctttgaacacaaccgagggcgtcgggcatacgggtctcacggggccaggacatcaccccgcccgtgcagaagagaaagaaacaaaggatacacaacacatacaaggcacaaagaaagcaaaagaagaaaagacagaaaaacaaagacagaggacagaggacaaacagaaagaacacaactccgacaca

SEQ ID NO: 389586 - DNA, 1432 bp, Homo sapiens
cggtctccaccttcttagcctctgagagcggagaagctgtgaggttctttagcgtcacctccctcactgggcagcatgggggagaagtcagagaactgtggggttccagaggatctgttaaatggtttgaaggttacagatactcaggaagccgagtgtgctggccctccagttcctgatcccaaaaatcagcattcccagagtaagctgctcagggatgatgaggcccatctccaggaggaccagggagaagaggagtgttttcatgactgcagtgcctcatttgaggaggagccaggagcggacaaggttgagaacaaatctaatgaagatgtgaattcctctgaactagatgaagaatacctaatagaactggaaaaaaacatgtcggatgaagagaaacagaaaagaagagaagagagcactagactaaaggaggagggaaatgaacagtttaagaaaggagattatatagaagctgaaagttcttatagtcgagccctcgaaatgtgcccatcctgcttccaaaaggagaggtcgattctattttcaaatagagctgcagcaaggatgaaacaggacaagaaagaaatggccatcaatgactgcagcaaagcaattcaattaaaccccagctatatcagggcaatattgaggagagcagagttgtatgagaagacggacaagctagatgaagccctggaagactataaatctatattagaaaaagatccatcaatacatcaagcaagagaagcttgtatgagattacctaagcaaattgaagaacgtaatgaaagactaaaagaagagatgttaggtaaattaaaagatcttgggaacttggttctccgaccttttgggctctccacggaaaatttccagatcaaacaggattcctctaccggctcgtactccatcaatttcgttcaaaatccaaataataacagataacaaagataacaaaagctttacaagctgacttggaattgtgtgctgcttgctgttagctaggggaaaggccctgccaatgtttaacttttaaaagcatcttatctaaaagaaaggctatccagtagagcccagtgctcccttgtccctcttttatgatcagggtgaaatgtacttcctgatgtaatgaacctaatttgatttccattttaaggtggtgtctgtgcagctggtgtccccgattctggctgtcctatgtccaggaagaagcccatttgttgaggctgaccttcctgatcatacacacacacagcccagcaaaagcctctcctgaaccaaacaaacctgttggttgggagactgcccagacatgattgatgacgggttcccgcctgctgtcccctccctgatcacacagctaacgaggctgcctccagcatttcctgatttcctctgtggtaataaaagctttctgtgctta

SEQ ID NO: 389587 - DNA, 1432 bp, Homo sapiens
ttttaaattcgatccaggggcacgcgtttagcatgttacatttcttgccctgtggccttccctactctgggcagcatgggggagaagtcagagaactgtggggttccagaggatctgttaaatggtttgaaggttacagatactcaggaagccgagtgtgctggccctccagttcctgatcccaaaaatcagcattcccagagtaagctgctcagggatgatgaggcccatctccaggaggaccagggagaagaggagtgttttcatgactgcagtgcctcatttgaggaggagccaggagcggacaaggttgagaacaaatctaatgaagatgtgaattcctctgaactagatgaagaatacctaatagaactggaaaaaaacatgtcggatgaagagaaacagaaaagaagagaagagagcactagactaaaggaggagggaaatgaacagtttaagaaaggagattatatagaagctgaaagttcttatagtcgagccctcgaaatgtgcccatcctgcttccaaaaggagaggtcgattctattttcaaatagagctgcagcaaggatgaaacaggacaagaaagaaatggccatcaatgactgcagcaaagcaattcaattaaaccccagctatatcagggcaatattgaggagagcagagttgtatgagaagacggacaagctagatgaagccctggaagactataaatctatattagaaaaagatccatcaatacatcaagcaagagaagcttgtatgagattacctaagcaaattgaagaacgtaatgaaagactaaaagaagagatgttaggtaaattaaaagatcttgggaacttggttctccgaccttttgggctctccacggaaaatttccagatcaaacaggattcctctaccggctcgtactccatcaatttcgttcaaaatccaaataataacagataacaaagataacaaaagctttacaagctgacttggaattgtgtgctgcttgctgttagctaggggaaaggccctgccaatgtttaacttttaaaagcatcttatctaaaagaaaggctatccagtagagcccagtgctcccttgtccctcttttatgatcagggtgaaatgtacttcctgatgtaatgaacctaatttgatttccattttaaggtggtgtctgtgcagctggtgtccccgattctggctgtcctatgtccaggaagaagcccatttgttgaggctgaccttcctgatcatacacacacacagcccagcaaaagcctctcctgaaccaaacaaacctgttggttgggagactgcccagacatgattgatgacgggttcccgcctgctgtcccctccctgatcacacagctaacgaggctgcctccagcatttcctgatttcctctgtggtaataaaagctttctgtgctta

SEQ ID NO: 389588 - DNA, 1154 bp, Homo sapiens
actgttcctttaaagagagaagaaaagaagaaatgatttttactgcgccagacttaatagactgttaccatcttttaactcaaaaccttcatcctatgaatggaaaacagtgcttctgagatcctgtggaatatagtagtatcaggaataaaatcaaaatgaccattcatcctttctcttatcctcagattatatagaagctgaaagttcttatagtcgagccctcgaaatgtgcccatcctgcttccaaaaggagaggtcgattctattttcaaatagagctgcagcaaggatgaaacaggacaagaaagaaatggccatcaatgactgcagcaaagcaattcaattaaaccccagctatatcagggcaatattgaggagagcagagttgtatgagaagacggacaagctagatgaagccctggaagactataaatctatattagaaaaagatccatcaatacatcaagcaagagaagcttgtatgagattacctaagcaaattgaagaacgtaatgaaagactaaaagaagagatgttaggtaaattaaaagatcttgggaacttggttctccgaccttttgggctctccacggaaaatttccagatcaaacaggattcctctaccggctcgtactccatcaatttcgttcaaaatccaaataataacagataacaaagataacaaaagctttacaagctgacttggaattgtgtgctgcttgctgttagctaggggaaaggccctgccaatgtttaacttttaaaagcatcttatctaaaagaaaggctatccagtagagcccagtgctcccttgtccctcttttatgatcagggtgaaatgtacttcctgatgtaatgaacctaatttgatttccattttaaggtggtgtctgtgcagctggtgtccccgattctggctgtcctatgtccaggaagaagcccatttgttgaggctgaccttcctgatcatacacacacacagcccagcaaaagcctctcctgaaccaaacaaacctgttggttgggagactgcccagacatgattgatgacgggttcccgcctgctgtcccctccctgatcacacagctaacgaggctgcctccagcatttcctgatttcctctgtggtaataaaagctttctgtgctta

SEQ ID NO: 389589 - DNA, 790 bp, Homo sapiens
gaaagcttttattaccacagaggaaatcaggaaatgctggaggagcctcgttagctgtgtgatcagggaggggacagcaggcgggaaccgtcatcaatacatcaagcaagagaagcttgtagcagattacctaagcaaattgaagaacgtaatgaaagactaaaagaagagatgttaggtaaattaaaagatcttgggaacttggttctccgaccttttgggctctccacggaaaatttccagatcaaacaggattcctctaccggctcgtactccatcaatttcgttcaaaatccaaataataacagataacaaagataacaaaagctttacaagctgacttggaattgtgtgctgcttgctgttagctaggggaaaggccctgccaatgtttaacttttaaaagcatcttatctaaaagaaaggctatccagtagagcccagtgctcccttgtccctcttttatgatcagggtgaaatgtacttcctgatgtaatgaacctaatttgatttccattttaaggtggtgtctgtgcagctggtgtccccgattctggctgtcctatgtccaggaagaagcccatttgttgaggctgaccttcctgatcatacacacacacagcccagcaaaagcctctcctgaaccaaacaaacctgttggttgggagactgcccagacatgattgatgacgggttcccgcctgctgtcccctccctgatcacacagctaacgaggctgcctccagcatttcctgatttcctctgtggtaataaaagctttctgtgctta

SEQ ID NO: 389590 - DNA, 2550 bp, Homo sapiens
gggtagctgcctgctcagaacccacaaagcctgcccctcatcccaggcagagagcaacccagctctttccccagacactgagagctggtggtgcctgctgtcccagggagagttgcatcgccctccacagagcaggcttgcatctgactgacccaccatgacacccacagacttcacaagccctattcctaacatggctgatgactatggctctgaatccacatcttccatggaagactacgttaacttcaacttcactgacttctactgtgagaaaaacaatgtcaggcagtttgcgagccatttcctcccacccttgtactggctcgtgttcatcgtgggtgccttgggcaacagtcttgttatccttgtctactggtactgcacaagagtgaagaccatgaccgacatgttccttttgaatttggcaattgctgacctcctctttcttgtcactcttcccttctgggccattgctgctgctgaccagtggaagttccagaccttcatgtgcaaggtggtcaacagcatgtacaagatgaacttctacagctgtgtgttgctgatcatgtgcatcagcgtggacaggtacattgccattgcccaggccatgagagcacatacttggagggagaaaaggcttttgtacagcaaaatggtttgctttaccatctgggtattggcagctgctctctgcatcccagaaatcttatacagccaaatcaaggaggaatccggcattgctatctgcaccatggtttaccctagcgatgagagcaccaaactgaagtcagctgtcttgaccctgaaggtcattctggggttcttccttcccttcgtggtcatggcttgctgctataccatcatcattcacaccctgatacaagccaagaagtcttccaagcacaaagccctaaaagtgaccatcactgtcctgaccgtctttgtcttgtctcagtttccctacaactgcattttgttggtgcagaccattgacgcctatgccatgttcatctccaactgtgccgtttccaccaacattgacatctgcttccaggtcacccagaccatcgccttcttccacagttgcctgaaccctgttctctatgtttttgtgggtgagagattccgccgggatctcgtgaaaaccctgaagaacttgggttgcatcagccaggcccagtgggtttcatttacaaggagagagggaagcttgaagctgtcgtctatgttgctggagacaacctcaggagcactctccctctgaggggtcttctctgaggtgcatggttcttttggaagaaatgagaaatacagaaacagtttccccactgatgggaccagagagagtgaaagagaaaagaaaactcagaaagggatgaatctgaactatatgattacttgtagtcagaatttgccaaagcaaatatttcaaaatcaactgactagtgcaggaggctgttgattggctcttgactgtgatgcccgcaattctcaaaggaggactaaggaccggcactgtggagcaccctggctttgccactcgccggagcatcaatgccgctgcctctggaggagcccttggattttctccatgcactgtgaacttctgtggcttcagttctcatgctgcctcttccaaaaggggacacagaagcactggctgctgctacagaccgcaaaagcagaaagtttcgtgaaaatgtccatctttgggaaattttctaccctgctcttgagcctgataacccatgccaggtcttatagattcctgatctagaacctttccaggcaatctcagacctaatttccttctgttctccttgttctgttctgggccagtgaaggtccttgttctgattttgaaacgatctgcaggtcttgccagtgaacccctggacaactgaccacacccacaaggcatccaaagtctgttggcttccaatccatttctgtgtcctgctggaggttttaacctagacaaggattccgcttattccttggtatggtgacagtgtctctccatggcctgagcagggagattataacagctgggttcgcaggagccagccttggccctgttgtaggcttgttctgttgagtggcacttgctttgggtccaccgtctgtctgctccctagaaaatgggctggttcttttggccctcttctttctgaggcccactttattctgaggaatacagtgagcagatatgggcagcagccaggtagggcaaaggggtgaagcgcaggccttgctggaaggctatttacttccatgcttctccttttcttactctatagtggcaacattttaaaagcttttaacttagagattaggctgaaaaaaataagtaatggaattcacctttgcatcttttgtgtctttcttatcatgatttggcaaaatgcatcacctttgaaaatatttcacatattggaaaagtgctttttaatgtgtatatgaagcattaattacttgtcactttctttaccctgtctcaatattttaagtgtgtgcaattaaagatcaaatagatacattaagagt

SEQ ID NO: 389591 - DNA, 2501 bp, Homo sapiens
gggtagctgcctgctcagaacccacaaagcctgcccctcatcccaggcagagagcaacccagctctttccccagacactgagagctggtggtgcctgctgtcccagggagagttgcatcgccctccacaagccctattcctaacatggctgatgactatggctctgaatccacatcttccatggaagactacgttaacttcaacttcactgacttctactgtgagaaaaacaatgtcaggcagtttgcgagccatttcctcccacccttgtactggctcgtgttcatcgtgggtgccttgggcaacagtcttgttatccttgtctactggtactgcacaagagtgaagaccatgaccgacatgttccttttgaatttggcaattgctgacctcctctttcttgtcactcttcccttctgggccattgctgctgctgaccagtggaagttccagaccttcatgtgcaaggtggtcaacagcatgtacaagatgaacttctacagctgtgtgttgctgatcatgtgcatcagcgtggacaggtacattgccattgcccaggccatgagagcacatacttggagggagaaaaggcttttgtacagcaaaatggtttgctttaccatctgggtattggcagctgctctctgcatcccagaaatcttatacagccaaatcaaggaggaatccggcattgctatctgcaccatggtttaccctagcgatgagagcaccaaactgaagtcagctgtcttgaccctgaaggtcattctggggttcttccttcccttcgtggtcatggcttgctgctataccatcatcattcacaccctgatacaagccaagaagtcttccaagcacaaagccctaaaagtgaccatcactgtcctgaccgtctttgtcttgtctcagtttccctacaactgcattttgttggtgcagaccattgacgcctatgccatgttcatctccaactgtgccgtttccaccaacattgacatctgcttccaggtcacccagaccatcgccttcttccacagttgcctgaaccctgttctctatgtttttgtgggtgagagattccgccgggatctcgtgaaaaccctgaagaacttgggttgcatcagccaggcccagtgggtttcatttacaaggagagagggaagcttgaagctgtcgtctatgttgctggagacaacctcaggagcactctccctctgaggggtcttctctgaggtgcatggttcttttggaagaaatgagaaatacagaaacagtttccccactgatgggaccagagagagtgaaagagaaaagaaaactcagaaagggatgaatctgaactatatgattacttgtagtcagaatttgccaaagcaaatatttcaaaatcaactgactagtgcaggaggctgttgattggctcttgactgtgatgcccgcaattctcaaaggaggactaaggaccggcactgtggagcaccctggctttgccactcgccggagcatcaatgccgctgcctctggaggagcccttggattttctccatgcactgtgaacttctgtggcttcagttctcatgctgcctcttccaaaaggggacacagaagcactggctgctgctacagaccgcaaaagcagaaagtttcgtgaaaatgtccatctttgggaaattttctaccctgctcttgagcctgataacccatgccaggtcttatagattcctgatctagaacctttccaggcaatctcagacctaatttccttctgttctccttgttctgttctgggccagtgaaggtccttgttctgattttgaaacgatctgcaggtcttgccagtgaacccctggacaactgaccacacccacaaggcatccaaagtctgttggcttccaatccatttctgtgtcctgctggaggttttaacctagacaaggattccgcttattccttggtatggtgacagtgtctctccatggcctgagcagggagattataacagctgggttcgcaggagccagccttggccctgttgtaggcttgttctgttgagtggcacttgctttgggtccaccgtctgtctgctccctagaaaatgggctggttcttttggccctcttctttctgaggcccactttattctgaggaatacagtgagcagatatgggcagcagccaggtagggcaaaggggtgaagcgcaggccttgctggaaggctatttacttccatgcttctccttttcttactctatagtggcaacattttaaaagcttttaacttagagattaggctgaaaaaaataagtaatggaattcacctttgcatcttttgtgtctttcttatcatgatttggcaaaatgcatcacctttgaaaatatttcacatattggaaaagtgctttttaatgtgtatatgaagcattaattacttgtcactttctttaccctgtctcaatattttaagtgtgtgcaattaaagatcaaatagatacattaagagt

SEQ ID NO: 389592 - DNA, 428 bp, Homo sapiens
cagaaaattctgcctccagaaatacaaatatgctcttttctaaacaagtgacaacacaatgtagccataggctcccttaagcagccacctcatgtcaactaatagtctttgctctctagcctctctcctccaaagtccatttcgtctcctgaggcttcagctattactgtcagaccctcagttacttctgatgaacagggattaggcttgagaaaatggagatgcatttagattggcagatatgggggacttcttaatgtgcttttattgctgccttatctctgaaaacaggttctgggagtttgggaataagtctgagggcatataaaggattgagactgagtgacttaggagtgtgagaggaaatatcttgatgttgagaacagggttgatgtggaggggtattctctgtgttatgcatgtaaaaa

SEQ ID NO: 389593 - DNA, 463 bp, Homo sapiens
ttctggaagctgagtaggaatggtaggttatgacatgtcagcatctaatatgtataccttcgtttagtactcattttcagtgtaagcctttattgcctgtcaaaggctttattgcccgtcctcaactgtacctggtgtcaccaggcctttctggttcagttcttctagaaagtaaacacatattcctctggagaggtgtgggaaagtctgttaactagctcattgagctgggagaggagatccttgggattgaattactcctatttttatttgcaccccgtctcctagccttcagagattctgggtgtctccagttcctttttggaattctttttgtgctatgagttgggctgaatgctcggtgctgtgcctgcccaccttatccgtagctttaagctttccttctcaacctcagtcgcatgcttgtcagcttgggccagatcattctttgttgaatggggct

SEQ ID NO: 389594 - DNA, 154 bp, Homo sapiens
gatactgtaacctttctgtcccagcctcaagccctggagtcagctgtttctccaaggagcccagcttccttttagtgggaaatactagaagtaaacatctgggactcctgtatgctcactgctgctattgctactgtggagtcttctgcccttt

SEQ ID NO: 389595 - DNA, 278 bp, Homo sapiens
ccgaggctggagaattgcttgagcccaggaggatgaggctgcagtgagccaagatcgcaccactgcactccagcttgggtaacagagtgagaccctgtttcaaaacagacaaataaaaacaacggattaaaggtaatatgttttaagttcctagtctgtttagacattcaaaaaatgttggctgatgtaaccaattaagtagacgtgtggttctcacctctggaaaattctagtaatccttttgtgggcaacttctatcagtctctcttatctctgct

SEQ ID NO: 389596 - DNA, 326 bp, Homo sapiens
gctccttccttctcttgcttccttcagtcaacttccctggtcttattaagtgatgtcaagttctagcttgatttagacaaacagacaaataataaccccaactcagaatctatctgaaaggcctacactgaccaaatggctctatggcacctttaaatccagtcccttggggccactgggattgatgctctcctctttgctctcccacagagcacactagaacaagccagtgaagctgagtaaactgagccacttcccccaaatgacatccatgagtgtccctgagccctggggttctgccatcaggtgtaaggggaagcgaagca

SEQ ID NO: 389597 - DNA, 726 bp, Homo sapiens
cttagaaaaacagactggagatcatctaaaactctgaagacagatgaagggactaccttttccccgttttgtgttcttctcaactttgttgaaaatcagcaggctgtaaatgtgtggatctatttctgggttccctattctgttccgtggctccatatgtctgcttttcggagtatgatgctggaattgatgaagctgaactagaaggagtaaatatcttcactttaacaaaataaaatagcttctactttctttatgattattatatcaaaatataagcattattttaacttaattcagtaatcgttatatttcaaaaataaatctatttaataatataattattcatcattataacaaatgtttaaattatatgtatagatttgaggctgttaaggtcatgatgacaattttatcctatacattttatagcaaataaatatccatatatgcagcaaaacaatattaaatctatcaaagcatgtggttcctttatagaatcataaacatcaagttttattctaatttagttgaggctagtttatgaggcaaataaatacttgaattttttaaatttaaattttgctaatttattataatttatcagttatagtattttgctgaaaaattataattgtacatacttatgaagtacaatgtgctgttttaagcatgcattaatgttgcttttaaatttcacctattaaacagtttttgaaatagagt

SEQ ID NO: 389598 - DNA, 688 bp, Homo sapiens
agcagaagaaaagattaaagatcctacggggaaggagtttccaagctgcaggttgttaccaccattcgttacaaacataaagtaggccagaatggcacgtaattgagcaagaaatactagcgtgatattaaagagagtaaagagaactataatttcataaaactgtggtttcagttttgagggcagagtcatagtatggagcatatttattactgtgagtctcagtgaccagtgtttgggaacagtgcggtaggtgtctgcaggaagcagagaaagcaaattaagaagacagttgaatatgttaccttacatggacaatgaacaatatcataatagagtgttctttaataataaagctttgattaaacttgtttcaatgttactcgaaagtttaagattatatatatatacacatatatatgtatatatgaacaaagagttaaaacaaaaataacaaaacataacactgcttatggatacatactagacatggaagaaagaagctataatgtccatgtgtttatgtgaatgaatgcatgtgtttgtgtctgcccatgaaatactacccatctaaaagaagaattagattgtcctttacaagtagcaacctgacactgaatacagtggtaaggcaagttatatggacttgtgatttggtctcatggctatatgagtctcattgaatatg

SEQ ID NO: 389599 - DNA, 283 bp, Homo sapiens
gaactcatgaattagacaaatagcagcattgtatcttctttttctgggcctgattttgaggtatactgcacttcctaagggtgatttcagagctagcttgcaggtggagctccacctgctgatacttgtgagggatagctcagtaagcactccttcagctagcatgtttcccactaacattcacactgatactccagcctagagaaagacctttgggttacaccagtctccagaaagccttcatttaaatgcaactagggagaggcgtggtggctcaccacct

SEQ ID NO: 389600 - DNA, 324 bp, Homo sapiens
gagaaaggcgtggccttccttttcgcagtttaatgcctttacctttcctttgggtcctgctaccccttactccatcagtggtcgccccatctcctgttgagcagtagatttttaagccactcatcatagtgaaccctgtgggccctttattgaaactgtctgtttggttcctgtgccactagactctggctccggccttccccacagctgtggctcctgaacctctgccgcccctagattccgcccctttcttggcaacagctgtcatctttccaagggcgacttctcagtcctctcatttatctaacacgtgaatgtggcgct

SEQ ID NO: 389601 - DNA, 758 bp, Homo sapiens
gtttaaaacatagttgtaatagtggagacgattgttgatccagtcatctggcattttgtcagctggaaagctgtttcctggcctttcagtccctcagtacaacagggattgatggcttttggtgttggagcccagtgctgcagggtcctctggtggcctctgagtgagcaaagaaaggcttacgtcatgctcagcaagatacatttagaagcacttgtcatagtgctgagtgtgttttctgcagctttgaatgttggggctcctcacgtggcatatagagagaattctttgttaactgttatgtttgattttctagaccaccatattccccagttatccttgataacagagcatttgctctggcagttacaataatttttgtcagtgcacagaatgccttttaaatagtgacttgctggttttctctacagctcataagtctatagagaaccttgtgttcatacctttctcttctgcccagcagatggctgtctgagtcatactagtattacaagactaccagcggaggctgggtgcagtggctcacgcctgtaatcccagcactttgggaggcccaagtaggcagatcacttgaggccaggattttgagaccagcctggccaacatggtgaaaccccgtctctactaaaaatacgaaaattaaccagtcatagtagcacatgcctgtaatcccagctactctggaggctgaggcacgagaatcgcttgaacccaggaggcggaggctgcagtgagca

SEQ ID NO: 389602 - DNA, 349 bp, Homo sapiens
catgcctgtcgccttttctgcgcccccatcctgtcggccactctccgcaggccttacctgttagtgcctgttttccttgcaatgcaggtctggagtcggccctgagtgtgttccctagttggcccccttactgcctgggtgaccttgggtggtctgcttcaccttgagtctcctggtgtcaagcgtgagagaatgagtccaggtgcccagcatggaagctgtcccacggtgtcagctccttctctttggcccccactcccccattttcccaaagtgtgtttctcatctttctcaccctcatggggctgcttccttcctgggcatcttatctcgcacctcctccttttgt

SEQ ID NO: 389603 - DNA, 456 bp, Homo sapiens
accattgaacccaaatgagctgaatctaacacaagaatgaaatcaggcctggcacagtggctcatgcctgtaatcgcagcactttgggaagccgaggtgggcagatcacttaaggccaggagtttgagaccagcctgaccaacatggcaaaactgcatctctactaaaaatacaaaaattagccaggcgtggtgatgtccacctgtaatcccagctactcgggaagctgaggcatgagaatcacttgaatccaggaggcagaggttgcagtgagccgagatcatgccactgcactccagcctgggcaacagagagagtctgtctcaggaaaaaaaaaaaaaaagataaataaatacaggtctaagaaaccgcatgtacaaagttggagggttaggtagagggttcttgctactaaagtgtaagtggaagataagagattgtttagtaaaaaagtta

SEQ ID NO: 389604 - DNA, 631 bp, Homo sapiens
gtgctttcctgagttctgtgagcctttctagcaaattattgaacttgaggagggggtcgtgggaactcccaatttattagccaggtcagtcagaggtacaggtggcaccctggggcttttgactggtatctgaagcaggggcaatcttatgggactgagatcttaacctgtggggtctgcactaactccaggcatttagtgtccgtatgaattgaattgaaggacaccaagttggtgtccagagaaatggagaagtggttggtatgaggaaaaaaaccccacaaacttggtgtcagaagtgtgagtaaaaacagtttacaaggtatgaacataaagaaactaactccagatcctgaactcttgaaaactatgctttttggcttttactcctacttttccccctgaaaattgaggctcagagaagtcaagtaacttccccaatgtcacacagtgagtatcccctggaacactaatgcctggactaagcaagtgctcagtaagtatctgttgaatgaatgaacgtgtcagtggtcaagtcagggctggaacttgggtctgtcagattttaaagcctactcccttacccactatactggcacactgtaagaatctaatagatctattggtcttt

SEQ ID NO: 389605 - DNA, 328 bp, Homo sapiens
gggaagtctagaatgatctcggtcataatgagtcagaatgtatatatacaaccattcctttcagctacgatacaacagaagcaaatatttgccactggaaaaaatattcaaagacactcttaggttaatctatagctgatgacagtcagtctagtctacatagcaagcagcttcaagatatgattacttagctaagcgggaaatgggacgtgactgctgcctcattcccacgcctctctggacctgataatttagaggaagctcacattcgcaagataaaaattttcttttctttctcagtattaaatatgctgtcacagtagaagaa

SEQ ID NO: 389606 - DNA, 263 bp, Homo sapiens
ggtgaggtaagaagggggagcaaagctagaaacagggaaacccatgacagggaaactgcacttttcaaagtaacacatgaaggtggtttgaatggagatggaaattggtgaaatggtgtgaagtagtcagatcctgaatatactttacaggtagagtcaacagaacatgttggaggatcagttattccttttctctctgttgtttctagtgtttccttcattccttaaagctaggcaagattatgtccttacgggtttcacat

SEQ ID NO: 389607 - DNA, 786 bp, Homo sapiens
gtcctgcagttgcagtcgtgttctccgagttcctgtctctctgccaacgccgcccggatggcttcccaaaaccgcgacccagccgccactagcgtcgccgccgcccgtaaaggagctgagccgagcgggggcgccgcccggggtccggtgggcaaaaggctacagcaggagctgatgaccctcatgatgtctggcgataaagggatttctgccttccctgaatcagacaaccttttcaaatgggtagggaccatccatggagcagctggaacagtatatgaagacctgaggtataagctctcgctagagttccccagtggctacccttacaatgcgcccacagtgaagttcctcacgccctgctatcaccccaacgtggacacccagggtaacatatgcctggacatcctgaaggaaaagtggtctgccctgtatgatgtcaggaccattctgctctccatccagagccttctaggagaacccaacattgatagtcccttgaacacacatgctgccgagctctggaaaaaccccacagcttttaagaagtacctgcaagaaacctactcaaagcaggtcaccagccaggagccctgacccaggctgcccagcctgtccttgtgtcgtctttttaatttttccttagatggtctgtcctttttgtgatttctgtataggactctttatcttgagctgtggtatttttgttttgtttttgtcttttaaattaagcctcggttgagcccttgtatattaaataaatgcatttttgtcctttttagacaa

SEQ ID NO: 389608 - DNA, 1558 bp, Homo sapiens
gtcctgcagttgcagtcgtgttctccgagttcctgtctctctgccaacgccgcccggatggcttcccaaaaccgcgacccagccgccactagcgtcgccgccgcccgtaaaggagctgagccgagcgggggcgccgcccggggtccggtgggcaaaaggctacagcaggagctgatgaccctcatgatgtctggcgataaagggatttctgccttccctgaatcagacaaccttttcaaatgggtagggaccatccatggagcagctggaacagtatatgaagacctgaggtataagctctcgctagagttccccagtggctacccttacaatgcgcccacagtgaagttcctcacgccctgctatcaccccaacgtggacacccagggtaacatatgcctggacatcctgaaggaaaagtggtctgccctgtatgatgtcaggaccattctgctctccatccagagccttctaggagaacccaacattgatagtcccttgaacacacatgctgccgagctctggaaaaaccccacagcttttaagaagtacctgcaagaaacctactcaaagcaggtcaccagccaggagccctgacccaggctgcccagcctgtccttgtgtcgtctttttaatttttccttagatggtctgtcctttttgtgatttctgtataggactctttatcttgagctgtggtatttttgttttgtttttgtcttttaaattaagcctcggttgagcccttgtatattaaataaatgcatttttgtcctttttagacaaaaacaaaaaaaaaaaaacaaaaaaaaaaaaaaaaaaaaaaaaaaaaaaaaaaaaaaaaaaaaaaaaaaaaaaaaaaaagaaaaaaaaaaaaaaaaaaaaaaaaaacaacacgaaaaaacaaagagaagcggagcggcccgcgcagccagataaacggacgcggagagacgacacagcgaagagacgcagcacaccccgccccgaccacagcgcgcagccaacggaggagagagactgatatcgcaccagcgcacggccgccgagcacaacacgagacagacgagcagcgacgacgcagtgagaataactgcggcggaaagcacactcactactgcgggtgcaggatcaaacgacaagacaaccacacaatcgagacagagagagagacaagatcaccaaccagatagccgcgcgagtaacagaatcatactagggggagagacgaacaccaccgagtgagcgaataatgagccgcgcacaaagcacaatacggagagacgaacaaagaaccagaacacgagagaacagaagagaaggagaagcaggagaggacgacgagaacggacagacagaaggcgacagagagcgaatgcggaagacactagagcgtacgagcctgacatcttgaggatccggcacccccacacggcacaaagagaaagcgaggcaaaaggaaagaagaagacagagaagacagagaggagcaaggagagagaaaagagcgagaagaggagacaaacgagcacgaaagaacacggaaagaaggcagaaa

SEQ ID NO: 389609 - DNA, 699 bp, Homo sapiens
gtcctgcagttgcagtcgtgttctccgagttcctgtctctctgccaacgccgcccggatggcttcccaaaaccgcgacccagccgccactagcgtcgccgccgcccgtaaaggagctgagccgagcgggggcgccgcccggggtccggtgggcaaaaggctacagcaggagctgatgaccctcatggtatatgaagacctgaggtataagctctcgctagagttccccagtggctacccttacaatgcgcccacagtgaagttcctcacgccctgctatcaccccaacgtggacacccagggtaacatatgcctggacatcctgaaggaaaagtggtctgccctgtatgatgtcaggaccattctgctctccatccagagccttctaggagaacccaacattgatagtcccttgaacacacatgctgccgagctctggaaaaaccccacagcttttaagaagtacctgcaagaaacctactcaaagcaggtcaccagccaggagccctgacccaggctgcccagcctgtccttgtgtcgtctttttaatttttccttagatggtctgtcctttttgtgatttctgtataggactctttatcttgagctgtggtatttttgttttgtttttgtcttttaaattaagcctcggttgagcccttgtatattaaataaatgcatttttgtcctttttagacaa

SEQ ID NO: 389610 - DNA, 459 bp, Homo sapiens
gcagtggggagcatcagaaccagctcaacagtttgtctactgtccggtcccagagaaactcaagattctagcaagccccttgtgtggggcttgggttgggacatgaggctgctgctggagcttactctgcaactgtttctccaaatgccagaacccaacattgatagtcccttgaacacacatgctgccgagctctggaaaaaccccacagcttttaagaagtacctgcaagaaacctactcaaagcaggtcaccagccaggagccctgacccaggctgcccagcctgtccttgtgtcgtctttttaatttttccttagatggtctgtcctttttgtgatttctgtataggactctttatcttgagctgtggtatttttgttttgtttttgtcttttaaattaagcctcggttgagcccttgtatattaaataaatgcatttttgtcctttttagacaa

SEQ ID NO: 389611 - DNA, 1503 bp, Homo sapiens
aacgatggtctcagctcagatggtcctcagctcaacgatggtcctcagctcaacgatggtcctcagctcaacgatggtcctcagcccaacgatggtcctcagctcaacgatggtcctctgccaacgccgcccggatggcttcccaaaaccgcgacccagccgccactagcgtcgccgccgcccgtaaaggagctgagccgagcgggggcgccgcccggggtccggtgggcaaaaggtgagtgatgcggcctaccactcgccgggcctgccatgccctaggcattggtacccagagcaaagatttctaggaccaccccccgccgccacctcctggagcgggagatctgcgggtgcaggagaacacaccaggagctcggggcctggcattcccctgggcatgggtgtcgagggcggagacttccgggactcccacctccttgcgcgggtgagattcgagagatgggggacaggccaggagctcagaccgctctttgagactctcccgaaggagaatgggagggtaggggcgctgccagactccttccctggtgggcctagatgaagacgctcaaggaccctcgtgacttggccgagacaggggaagggagaagttgagtcgggcaaggaagagatgctaaagcctggggaattaagaacatgccagaatcatcccgagggagtctggaattagggagggtgaggactcgctaggatcgtcctgtggatctggtgagtataccctgagctgagcctgaccttggtgatgtggggagcctccatgacggctccccctgagattcaggtgggagaagatgcaccgtctggaggcctggaccatccagactcccaggtaaccccgaatactcttttttcaggctacagcaggagctgatgaccctcatgatgtctggcgataaagggatttctgccttccctgaatcagacaaccttttcaaatgggtagggaccatccatggagcagctggaacagtatatgaagacctgaggtataagctctcgctagagttccccagtggctacccttacaatgcgcccacagtgaagttcctcacgccctgctatcaccccaacgtggacacccagggtaacatatgcctggacatcctgaaggaaaagtggtctgccctgtatgatgtcaggaccattctgctctccatccagagccttctaggagaacccaacattgatagtcccttgaacacacatgctgccgagctctggaaaaaccccacagcttttaagaagtacctgcaagaaacctactcaaagcaggtcaccagccaggagccctgacccaggctgcccagcctgtccttgtgtcgtctttttaatttttccttagatggtctgtcctttttgtgatttctgtataggactctttatcttgagctgtggtatttttgttttgtttttgtcttttaaattaagcctcggttgagcccttgtatattaaataaatgcatttttgtcctttttagacaa

SEQ ID NO: 389612 - DNA, 1601 bp, Homo sapiens
aacgatggtctcagctcagatggtcctcagctcaacgatggtcctcagctcaacgatggtcctcagctcaacgatggtcctcagcccaacgatggtcctcagctcaacgatggtcctctgccaacgccgcccggatggcttcccaaaaccgcgacccagccgccactagcgtcgccgccgcccgtaaaggagctgagccgagcgggggcgccgcccggggtccggtgggcaaaaggtgagtgatgcggcctaccactcgccgggcctgccatgccctaggcattggtacccagagcaaagatttctaggaccaccccccgccgccacctcctggagcgggagatctgcgggtgcaggagaacacaccaggagctcggggcctggcattcccctgggcatgggtgtcgagggcggagacttccgggactcccacctccttgcgcgggtgagattcgagagatgggggacaggccaggagctcagaccgctctttgagactctcccgaaggagaatgggagggtaggggcgctgccagactccttccctggtgggcctagatgaagacgctcaaggaccctcgtgacttggccgagacaggggaagggagaagttgagtcgggcaaggaagagatgctaaagcctggggaattaagaacatgccagaatcatcccgagggagtctggaattagggagggtgaggactcgctaggatcgtcctgtggatctggtgagtataccctgagctgagcctgaccttggtgatgtggggagcctccatgacggctccccctgagattcaggtgggagaagatgcaccgtctggaggcctggaccatccagactcccaggtaaccccgaatactcttttttcaggctacagcaggagctgatgaccctcatgatgtctggcgataaagggatttctgccttccctgaatcagacaaccttttcaaatgggtagggaccatccatggagcagctggaacaagaaactcaagattctagcaagccccttgtgtggggcttgggttgggacatgaggctgctgctggagcttactctgcaactgtttctccaaatgccaggtatatgaagacctgaggtataagctctcgctagagttccccagtggctacccttacaatgcgcccacagtgaagttcctcacgccctgctatcaccccaacgtggacacccagggtaacatatgcctggacatcctgaaggaaaagtggtctgccctgtatgatgtcaggaccattctgctctccatccagagccttctaggagaacccaacattgatagtcccttgaacacacatgctgccgagctctggaaaaaccccacagcttttaagaagtacctgcaagaaacctactcaaagcaggtcaccagccaggagccctgacccaggctgcccagcctgtccttgtgtcgtctttttaatttttccttagatggtctgtcctttttgtgatttctgtataggactctttatcttgagctgtggtatttttgttttgtttttgtcttttaaattaagcctcggttgagcccttgtatattaaataaatgcatttttgtcctttttagacaa

SEQ ID NO: 389613 - DNA, 581 bp, Homo sapiens
gtcctgcagttgcagtcgtgttctccgagttcctgtctctctgccaacgccgcccggatggcttcccaaaaccgcgacccagccgccactagcgtcgccgccgcccgtaaaggagctgagccgagcgggggcgccgcccggggtccggtgggcaaaaggctacagcaggagctgatgaccctcatgatgtctggcgataaagggatttctgccttccctgaatcagacaaccttttcaaatgggtagggaccatccatggagcagctggaacaaacccaacattgatagtcccttgaacacacatgctgccgagctctggaaaaaccccacagcttttaagaagtacctgcaagaaacctactcaaagcaggtcaccagccaggagccctgacccaggctgcccagcctgtccttgtgtcgtctttttaatttttccttagatggtctgtcctttttgtgatttctgtataggactctttatcttgagctgtggtatttttgttttgtttttgtcttttaaattaagcctcggttgagcccttgtatattaaataaatgcatttttgtcctttttagacaa

SEQ ID NO: 389614 - DNA, 1156 bp, Homo sapiens
aacgatggtctcagctcagatggtcctcagctcaacgatggtcctcagctcaacgatggtcctcagctcaacgatggtcctcagcccaacgatggtcctcagctcaacgatggtcctctgccaacgccgcccggatggcttcccaaaaccgcgacccagccgccactagcgtcgccgccgcccgtaaaggagctgagccgagcgggggcgccgcccggggtccggtgggcaaaaggtgagtgatgcggcctaccactcgccgggcctgccatgccctaggcattggtacccagagcaaagatttctaggaccaccccccgccgccacctcctggagcgggagatctgcgggtgcaggagaacacaccaggagctcggggcctggcattcccctgggcatgggtgtcgagggcggagacttccgggactcccacctccttgcgcgggtgagattcgagagatgggggacaggccaggagctcagaccgctctttgagactctcccgaaggagaatgggagggtaggggcgctgccagactccttccctggtgggcctagatgaagacgctcaaggaccctcgtgacttggccgagacaggggaagggagaagttgagtcgggcaaggaagagatgctaaagcctggggaattaagaacatgccagaatcatcccgagggagtctggaattagggagggtgaggactcgctaggatcgtcctgtggatctggtgagtataccctgagctgagcctgaccttggtgatgtggggagcctccatgacggctccccctgagattcaggtgggagaagatgcaccgtctggaggcctggaccatccagactcccaggtaaccccgaatactcttttttcaggctacagcaggagctgatgaccctcatggtgagtgattaagtgcccagaaccccagccttccatccaattttcagtagcctccttttttccgtcagcttttttgctagacataggggtaatgtaatttgctccctcctgggaaagaagttcatacaccccacctacatccatttcttccagcagtccctcctcccaattccatccccccacacgaagttatctcgaacacttccctgaagtcaaacaagaccctccctatccagtgtgtccctacttccta

SEQ ID NO: 389615 - DNA, 1344 bp, Homo sapiens
ttgtctgattcagggaaggtccctacccatttgaaaaggttgtctgattcaggaaggcagaaatccctttatcgccagacaaccttttcaaatgggtagggaccatccatggagcagctggaacagtatatgaagacctgaggtataagctctcgctagagttccccagtggctacccttacaatgcgcccacagtgaagttcctcacgccctgctatcaccccaacgtggacacccagggtaacatatgcctggacatcctgaaggaaaagtggtctgccctgtatgatgtcaggaccattctgctctccatccagagccttctaggagaacccaacattgatagtcccttgaacacacatgctgccgagctctggaaaaaccccacagcttttaagaagtacctgcaagaaacctactcaaagcaggtcaccagccaggagccctgacccaggctgcccagcctgtccttgtgtcgtctttttaatttttccttagatggtctgtcctttttgtgatttctgtataggactctttatcttgagctgtggtataataagtaaagtcatagtccttttaccagttaagccctcggtttgagaccccttttgttattattcaacattcactgtgcgatttgtgtccccttttttaagaccaagaacaacaagacaaaaactcgagagggaccactacatagtgagacgggaagccagagaacaaagagacgattcaagcgaacactggcgcccacaaggggccaaaaagacgggataccagagacaccccacaacagaaatagcgtagtgcaaccacaaacattgggcggtacaccacatcttgagcccgggaacactacccaccagaactaagagagaggaccgcaacatataacagatcgaccgaaacaacccagagggtatacacctcgcaattaaaggaaagagcgcgaacaacgaaagaacgaacacacgagacacggagacgaacagacgacgaaggaacgacagagaacgaaggaagagcggcgaaacagacacataaggacaaaaaaaaaaaaaggcacagcacaagaacaagcgaagagagacacaaatagacaacagaggacgaagcaaagaatacgacacaaacacaacaaccaagaacagcaataatgctgctcgagtacaaaaaagcatacacaagacgagaagcagagaaaacgagaagagcaacaagaacagaacaagaaccaacaaacaggaagaacagaacagagacaaacacaagaaaggaaagaagagaaagaagaaagacaaagcgagcacaagagaacagagacgtcgagaacgagctgcacca

SEQ ID NO: 389616 - DNA, 1357 bp, Homo sapiens
aacgatggtctcagctcagatggtcctcagctcaacgatggtcctcagctcaacgatggtcctcagctcaacgatggtcctcagcccaacgatggtcctcagctcaacgatggtcctctgccaacgccgcccggatggcttcccaaaaccgcgacccagccgccactagcgtcgccgccgcccgtaaaggagctgagccgagcgggggcgccgcccggggtccggtgggcaaaaggtgagtgatgcggcctaccactcgccgggcctgccatgccctaggcattggtacccagagcaaagatttctaggaccaccccccgccgccacctcctggagcgggagatctgcgggtgcaggagaacacaccaggagctcggggcctggcattcccctgggcatgggtgtcgagggcggagacttccgggactcccacctccttgcgcgggtgagattcgagagatgggggacaggccaggagctcagaccgctctttgagactctcccgaaggagaatgggagggtaggggcgctgccagactccttccctggtgggcctagatgaagacgctcaaggaccctcgtgacttggccgagacaggggaagggagaagttgagtcgggcaaggaagagatgctaaagcctggggaattaagaacatgccagaatcatcccgagggagtctggaattagggagggtgaggactcgctaggatcgtcctgtggatctggctacagcaggagctgatgaccctcatgatgtctggcgataaagggatttctgccttccctgaatcagacaaccttttcaaatgggtagggaccatccatggagcagctggaacagtatatgaagacctgaggtataagctctcgctagagttccccagtggctacccttacaatgcgcccacagtgaagttcctcacgccctgctatcaccccaacgtggacacccagggtaacatatgcctggacatcctgaaggaaaagtggtctgccctgtatgatgtcaggaccattctgctctccatccagagccttctaggagaacccaacattgatagtcccttgaacacacatgctgccgagctctggaaaaaccccacagcttttaagaagtacctgcaagaaacctactcaaagcaggtcaccagccaggagccctgacccaggctgcccagcctgtccttgtgtcgtctttttaatttttccttagatggtctgtcctttttgtgatttctgtataggactctttatcttgagctgtggtatttttgttttgtttttgtcttttaaattaagcctcggttgagcccttgtatattaaataaatgcatttttgtcctttttagacaa

SEQ ID NO: 389617 - DNA, 683 bp, Homo sapiens
cacgaggtttttttttaaaaaaggacaaaaatgcatttatttaatatacaagggctcaaccgaggcttaatttaaaagacaaaaacaaaacaaaaataccacagctcaagataaagagtcctatacagaaatcacaaaaaggacagaccatccatggagcagctggaacagtatatgaagacctgaggtataagctctcgctagagttccccagtggctacccttacaatgcgcccacagtgaagttcctcacgccctgctatcaccccaacgtggacacccagggtaacatatgcctggacatcctgaaggaaaagtggtctgccctgtatgatgtcaggaccattctgctctccatccagagccttctaggagaacccaacattgatagtcccttgaacacacatgctgccgagctctggaaaaaccccacagcttttaagaagtacctgcaagaaacctactcaaagcaggtcaccagccaggagccctgacccaggctgcccagcctgtccttgtgtcgtctttttaatttttccttagatggtctgtcctttttgtgatttctgtataggactctttatcttgagctgtggtatttttgttttgtttttgtcttttaaattaagcctcggttgagcccttgtatattaaataaatgcatttttgtcctttttagacaa

SEQ ID NO: 389618 - DNA, 571 bp, Homo sapiens
aacgatggtctcagctcagatggtcctcagctcaacgatggtcctcagctcaacgatggtcctcagctcaacgatggtcctcagcccaacgatggtcctcagctcaacgatggtcctctgccaacgccgcccggatggcttcccaaaaccgcgacccagccgccactagcgtcgccgccgcccgtaaaggagctgagccgagcgggggcgccgcccggggtccggtgggcaaaaggctacagcaggagctgatgaccctcatgaacccaacattgatagtcccttgaacacacatgctgccgagctctggaaaaaccccacagcttttaagaagtacctgcaagaaacctactcaaagcaggtcaccagccaggagccctgacccaggctgcccagcctgtccttgtgtcgtctttttaatttttccttagatggtctgtcctttttgtgatttctgtataggactctttatcttgagctgtggtatttttgttttgtttttgtcttttaaattaagcctcggttgagcccttgtatattaaataaatgcatttttgtcctttttagacaa

SEQ ID NO: 389619 - DNA, 248 bp, Homo sapiens
acccagggtaacatatgcctggacatcctgaaggaaaagtggtctgccctgtatgatgtcaggaccattctgctctccatccagagccttctaggaggtgactttagagaccacccctcccctccatgcaacttgggaacctgtcaggactccctggggtcagcctcttctaccgccttgaccttctctttctctccacccacagaacccaacattgatagtcccttgaacacacatgctgccgagct

SEQ ID NO: 389620 - DNA, 159 bp, Homo sapiens
atctaccaacctgatggatttttgtgagaattaatgaataaaatatacaaaatggttatgtcaggccagtggcaatcaataaatgctagttttcttttttcttcttttcctttcagattaaaatttaattggttttagcttaaattcagggtgaaaatg

SEQ ID NO: 389621 - DNA, 132 bp, Homo sapiens
agcgcaggtcccgacagaggtcgccgggtggtggcgtcagctgcggcgccctccgcgtggaaattagccggttgcccgggcaaatcagggaggaagggagggagctgaacacggaagtggtggcggcgccca

SEQ ID NO: 389622 - DNA, 430 bp, Homo sapiens
cttttccagcccttagtgacaaatgttttatctttatggaaggcacagggaaactgcaaatcaacaatttgtcctgaacttgatcatttctgtccagtcttattttcagaaaagataagattcatcaatgtgtatattagcacttttatgttttatgataacatgcagtatattcagtataaaactcaaatgtatattatacctttatcatttctacaatttagtagttaaaaataacttcacccacccacaaattttctgacaaaatatgattgctctatattctgttatacacctgtggctcatttggaatattcatcagctgagaagattaaaactacgattacttcaaatagaaggtgaaaatctcgcttggttctaataaagcacctataatgtccttcaaatctgtagttataaacaagcttga

SEQ ID NO: 389623 - DNA, 316 bp, Homo sapiens
cataatactcctgccatctataattaaatggaaggggttacaactgttgaaacttgttaaaactgaagttgtcctaccatgtattaatataccagggataggaagatgtttacagttggcacagtgttagagaagtcctggaaaggcaagagagagaaaaattaaaataataatataaaacagaggtggggtaaactatggtctgtggccaaatctggcctgctaactagttttccaattaacattttattggaataaaagcaactggagcaggcatgctgatctatctatgtgttgtctatagctgtttttaaaa

SEQ ID NO: 389624 - DNA, 326 bp, Homo sapiens
ctggagctctgaggagaggtctgagctagagacataagcctggcagaaagagagactccggaaggcaaaaggagcaagacacaggtataaacacacactcgtcagagccacaaagccaagaaccacacacacacaaaagggacggagccggtcaaaaagatgcacaaacagggaaagtcagatgaacagagacagactttcatgaagcaatcgcttgtggcttttctgggtatggaagaaatatatttttcaagctaagttgcagtttgacaattccaggcagaaataaggtgagcacttggccagagtccaccctcccttgctgg

SEQ ID NO: 389625 - DNA, 158 bp, Homo sapiens
taatgtgtgtcaaatttgggatatttagaaattagtttcactgcttaatttattaccttaattgagtggttttaagttgtgccttgatttgccaaccatatgtgttaagaaaccgctcagtgctaagcacattcctgaattcctcatttctctcaatc

SEQ ID NO: 389626 - DNA, 211 bp, Homo sapiens
attagaatataagttatggagaaaaaaattttcagcacaaaactaaatcataaaaaatgtattttactacataaaattttaaaacagcacacccagttattaggcaactgaaaatcaaaagaaaaacctctgtaacacatgacagcattagcatctttataaagaatcagtcaaggccaggagcggtggctcaagcctgtaaccccagcac

SEQ ID NO: 389627 - DNA, 313 bp, Homo sapiens
ctgctcacctcggcctcccaaagtgctgggattacaggcatgagcaaaaccagcttttctagtgctgacttcaggcttccagagcaggcatagaaagtgctcttaactgtccagctctatgaaagtgagagcatcttccttcccaattccagttctctgtcctgaatgaaaagaggcaggagggccactgagggattgctcatactcacctggacaggacttctgttcctatagttgcaccattttctctattgccttcttggtctttatgttagccagagccaggccttttcttaaattctgtatctccaga

SEQ ID NO: 389628 - DNA, 769 bp, Homo sapiens
atgttgccactttgatcacaggattttggtcagaaagaatgtgggatttggactttgagtttggctcttgactgtcacctgttcagtgtgtgaccttgggtaagtttctttaccctctgagccttcgtttcctcatctgtatagtgggaatgtgcaatctggagtctgtgctaggattccgtcacatctagtggactagcagggaaaccctacagggatctgggaaaactcccttcttgaggaaatgcagggagctgcgcacagtgggctcaccaaaaggtgaagcatcatactggagaaaggagtagttttgagtacactgtggtaacaggggcggaaccccatccttcaccctaccccatatcagaccctgtctcattcctgggcagagttgtcactaaaagctaaagggactatttgttagtgcttcataagacactggagtacagggtcactgagatgaaactcctataaatgaacataagagagaaaaaggcaacttttccacctgacaatccacagagcaactttaccagagtgagatggcagagcagagtaagggacagtgcctgggcattgatttgctgatgagcacatgtaagacctcctaccccaggaactccccaaaagtgcagggtagaaggtgctttgcagggagctaggttcaaagtgagaaatggtggtaacaaactaacatttagattattagtcttgatgtgactttatttgtgcatgcgtagtgtatcacacagggttctctagagaaaca

SEQ ID NO: 389629 - DNA, 455 bp, Homo sapiens
atatttatccaaaacttagaagtttaagatcattgctaagtactccttattctttttttcactttttcataacttttctattgtaattataaggtgctagaatccatagttcatcaatgcaaaatgtaaaatgggattcacttccacaaagtcaaacacaagaagtaacagcaaaataaacagaaaaactttatgtaacacattcatccaatgaaataactatctaccatgactggtaatggttgtcctacaagatggacgaaaatttcatgaaataacaccaatacgaaaaatttaaataatagtaatgtttctacttttcaattataaatggctatccacataactgaattttcttctaatctgcttcaagacttaaagaattttctttttctttcctgtactaatcattgaacctcagtttctaataaattttggagcatctgggcctttga

SEQ ID NO: 389630 - DNA, 267 bp, Homo sapiens
ctctcagcggcagcgcagcaggatgggaggagaaagagttttgcttgcacaagcagcagtagactcctcagtatggagacagaagcctgaggaagaaaggctttttcttcttttctgggccaggttgtctatcataacaatgtttgcaagcccctggatgaatgaaggcatggctggtacccacagagcagctcactttactttcctgacattcttaccaccccagagcatgtataagaacagggttggcagcaccagtcatgaggg

SEQ ID NO: 389631 - DNA, 508 bp, Homo sapiens
gggcatggaggtagaagtcaggtagagggaatggcttgagtgagggcatggaggtagaagaatgcatggtataaagattttggggagaaagttttcataattcaagtgctacttctgtcttttttgtttgtttgtttgccaaatctgtatatcacttataatttacttaacctatttctttgagatggctcacttcattttatttaacaagttaattgaaaaaggaaactttacaacagtacactaaatagaaaacaattcaatagaaagtaatagtaaaaaataaactcaattaaaaaaaggtattattaaattttagctagatattgcagttggctcaaaacctgaggcctgctctctctttgttaagagtgatgtttctttagccgggtactgtggttcacgcctgtaatcccagcactgtgggaggccgaggtaagaggattgcttgaggtcaggagttcaagaccagcctgggcaacatagtgagacccccatctctatttaa

SEQ ID NO: 389632 - DNA, 248 bp, Homo sapiens
aagcagcaacataaatcagtaaattgtacagggcgttacaccgcgactgagtgctctgggggaaacattcgctaaggggaacgggtactaggttcgtagttttaaataaggtggtctggcaggcctcatcaagagaggtaatttgagagaagactctaaggagaaggaggaatcggccctgtggctctccaggaagagcactgcaggcaggacaggcggccagtgcgtgcaaaggcccaaggcagtag

SEQ ID NO: 389633 - DNA, 751 bp, Homo sapiens
gtattcagaccataaatcagtaaaaaaagattcataaaagtgagtaaaagataaaaataggcattttgcagagggggtaatataaattgctcataatttttttaatgcttaagcttaatactaattagcaaactgcaaattaaaaccaaaacccaattccaaaacataatgacctgattgcaaaaagtattaaaagcacattagtatttgttcaatactagtgtgctgggatgattttaatgataagaaacactttatttttcttaaaataatttagcatgggtctgctttgtgaccaagcaaattcataatcatgtacgtagactatagtaacactttcacatttgtaccaagagacttttacaatattctattcttatcaaaactgtttataatagtaaaaaattggaaaccactcaaataagccattaaaagggtctggctgctgggcacagtggctcaagcctgtaatcccagcactttggaaggctgaggcgaaaggattgcttaagcccaggaattgaagaccagcctgggaaaaatagcaaggtgctaaatatatatatgcaagctgggcatgctggtatgtgcctgtggtcccagctacatgggagactggggtagaaggattgcttcagcccagaagattgaggctgcagtgagctgtgtttgggccgctgtatgccagcctaggcaacagagcaagactgtcaaaaaaaaaaaaaagtggactagttatacattcaaatac

SEQ ID NO: 389634 - DNA, 913 bp, Homo sapiens
taatttatccttagagaccccgaagacaccccctccccagggtttgtagaaatttgttttgtgtgctgtgagtggttgatgtagtcttgtcattgttaataacttgtatgtgaacactattatttgtacagttgaattaatttattttcagacatcatcctttttttttttctttcctggaagagttcaaagcacaccaaagaattatattatacattttggtgaaagattgtcatttatgatccatggtttatttaaaaaaaaaaggaaagaaaatggaaaaatatatttttaagcttacttgaatgaacaacgtaatgtgaaaaccaagactcttcctgcatgtcttttttgcattgtgttgataagattatatatagtttatagatatattatattactagtacagtgcatggtgctgtcacttggaaagcctttcaatgttgtcttcagattgttgtgatgaatatgaaacatgcagaccctcctttataaagaaaaagaccttaaaacttgaatatgagataattttacattttaaaagtttatttgattttcatattattcactttcaaagccctttcaaatagaaaaggtatgaacttttggggggataatttatgtatcgtaaacttattagaacaaaatattcctgatgtataatgagttgttttatttatacaactttttcaatggtagtttgcactattctttattatgctacaggtttatttattatgaaacaaaggaatatgtattttatgtattttaccatgcataggttaactctttgccacagatttattggttcttgatacacctaaaataaaaaaaaatgtgtacctccaatagagagcaagcaagaatgattatgaagtaacaaatttaataaaggtattcttgttattattgc

SEQ ID NO: 389635 - DNA, 190 bp, Homo sapiens
cagtgccccatccagcataccaaactcaccgtgtgtgaggaacagcagagggaagcctgtgctgttgtcctgcaggtgaatgagtgaaaatcatctgatctcacaggtagtgctgccccattgactgaaaatgtctccagtagtgtgttcctggcattccactttgaagatgttggcaatcataaatgcc

SEQ ID NO: 389636 - DNA, 648 bp, Homo sapiens
agctcctcagcacaggacctgaggtggtgagctgggaggaaacccaccagacgtgctcttcttcctgaggtgcttagagtcaggttccacagtttcaagcatggccaacctccaccttcccctctctcagcccatccacctgattctcctttgctgttggttgaagagctcagacaaaagaccaaggctgtggctccagttccagcactgcctctccctgtgcattagaccctaagtgaatttcttaacttggctgagcctctattttcccatctgtacagtggggataatacccttctccacagagttgttgagaggatccactcgaatgtaaattatgaaaaagagctgtcctttccaaaaagccaaaagaagactgttggaggaggaggtgggcgatactcttctccttcgacaggtgaatatattatggggagacgtttctaggtggagctggaagcccggtctgaactcagtcactattcttattagatcaggtgagaagatcacacaggattcagatggctccgaggtgacaagctcaggaataatcccagcttcactgttagaaactgcattttctgggtcttaagacatggaaatctccatccaatgaggatgtagatcattgaacagatgtacaccctc

SEQ ID NO: 389637 - DNA, 306 bp, Homo sapiens
atagtttactctgcattaaatctattgtgatacgttcttctggttgaggtaaatgaaaaaaaaccttgtttcacacatatgtgtagtactactttgatcactttggatcattgtggatactcctccttaataccacacgaaaactgacttttcatagttttggccaaaacaggtagtagttttctaaaggttcgctgcagagcagaatctgaaactttaccattaaactttttgtaccctgctacattaaaatccatttgtctgtcttgtactttgaatgactcttttactcatgcatgcttttgt

SEQ ID NO: 389638 - DNA, 331 bp, Homo sapiens
actactactactaaattcgcggccgcgtcgacagcaggcaggagctgaacaagagccttcaggagtgtctgtccacaggcagccttcctctgggtcctgcaccacacacccccagggccctggggattctgaggaggcagcctctccctgccagcatgcctgcctgacccacctcagagcctgctttgcatcactgggaagcaggcagtgtcttgggtgggggcttggtcagtatcctctccgtctgggtgcccagctcccacgcacacctgagctttcggcatgctcccacctcgttaaaggtgatttccctctccccatgctgtgatat

SEQ ID NO: 389639 - DNA, 1860 bp, Homo sapiens
tagggcggtcgcgtaattcggcacgagggcgcctcacgtatgccggcggtcagtggtccaggtcccttattctgccttctcctcctgctcctggacccccacagccctgagacggggtgtcctcctctacgcaggtttgagtacaagctcagcttcaaaggcccaaggctggcattgcctggggctggaatacccttctggagccatcatggagacgccatcctgggcctggaggaagtgcggctgacgccatccatgaggaaccggagtggcgccgtgtggagcagggcctctgtccccttctctgcctgggaagtagaggtgcaaatgagggtgacgggactggggcgccggggagcccacggcatggccgtgtggtacacccggggcaggggccatgtaggctctgtccttggggggctggcttcgtgggacggcatcgggatcttctttgactctccggcagaggatactcaggacagtcctgccatccgtgtgctggccagcgacgggcacatcccctctgagcagcctggggatggagctagccaagggctgggctcctgtcattgggacttccggaaccggccacaccccttcagagcacggatcacctactgggggcagaggctgcgcatgtccttgaacagtggcctcactcccagtgatccaggtgagttctgtgtggatgtggggcccctgcttttggtccctggaggtttctttggggtctcagcagccaccggcaccctggcagatgatcatgatgtcctgtccttcctgaccttcagcctgagtgagcccagcccagaggttccccctcagcccttcctggagatgcagcagctccgcctggcgaggcagctggaagggctgtgggcaaggctgggcttgggcaccagggaggatgtaactccaaaatcagactctgaagctcaaggagaaggggaaaggctctttgacctggaggagacgctgggcagacaccgccggatcctgcaggctctgcggggtctctccaagcagctggcccaggctgagagacaatggaagaagcagctggggcccccaggccaagccaggcctgacggaggctgggccctggatgcttcctgccagattccatccaccccagggaggggtggccacctctccatgtcactcaataaggactctgccaaggtcggtgccctgctccatggacagtggactctgctccaggccctgcaagagatgagggatgcagctgtccgcatggctgcagaagcccaggtctcctacctgcctgtgggcattgagcatcatttcttagagctggaccacatcctgggcctcctgcaggaggagcttcggggcccggcgaaggcagcagccaaggccccccgcccacctggccagcccccaagggcctcctcgtgcctgcagcctggcatcttcctgttctacctcctcattcagactgtaggcttcttcggctacgtgcacttcaggtgggccaccccgtgagcaggatttcccacagcactggcatctcttggttctcagctataaccattggatttaggagaggggacacttcagctcagaggggacctgccgagtccccaaatcacaaagagcacagtgcgggatagggcccattctctcaccaagcactactgaccacctgctcggcccccagccccatctgggtcctgctctcacggagctcactcacacaggtctaactgaccctgtgtcgtcaatgccatgatgtcaggaagctgaggggctacgagagtgcaggagaacacacttgaccccccttggttagggaatcaacctggaagggacatttgatatggtcattaaggtgactag

SEQ ID NO: 389640 - DNA, 377 bp, Homo sapiens
gcgcctcacgtatgccggcggtcagtggtccaggtcccttattctgccttctcctcctgctcctggacccccacagccctgagacggggtgtcctcctctacgcaggtttgagtacaagctcagcttcaaaggcccaaggctggcattgcctggggctggaatacccttctggagccatcatggaggtgaggggcaggggtggggaccagctatgcccagggtccctcaaagtgctggaggggctgtgacttggtggggagtgggtctgtcacagccatcctctgtccagggtggggcaaggcctgggacagtgccaggcaccccaggaccccttccaggcttgtctcctgctccaccgcctcaacaccccccaccc

SEQ ID NO: 389641 - DNA, 770 bp, Homo sapiens
gagatgccagctatttggactcagctctgtagatgaatgacagaaatagactaggtgctaatttgcatgtagcttcacatgcgatttgcatagggcttgcttaatgctcagttgcaccagaagcctcattgcatctccattgccatctggctcctcccccagggagtcataactcgggtcatgcccagcctgggggcctgagagctaaactcagccaaggtgttagatactgggcagaggaggccagcagctcttgtgggctttgctgggctctgacagctcgaggttttaatcttgtgtcagagcagcttaggctgggctgctagtgtggggaagaggggaggggacttacactccagggccaagcctctctgatcctatccccaggccctggatgcttcctgccagattccatccaccccagggaggggtggccacctctccatgtcactcaataaggtagggacccaaacactgggtgttgaccagcactggccccagcttggctggtgctctgggagaaccagggcagagaggactgggctgggcctctgcttccttcaggggacagaaccacttttagaagggagacgtattttggcttggcatggtggctcacgcgtgtaatcctagcactttgggaggccaaggcggacagatcacgaggtcaaaagactgacaccatcgggcagatcacaaggtcaaaagatcgagaccatcctggccaacatggtgaaaccctgtctctactgaaaatacaaaaattatac

SEQ ID NO: 389642 - DNA, 1787 bp, Homo sapiens
tagggcggtcgcgtaattcggcacgagggcgcctcacgtatgccggcggtcagtggtccaggtcccttattctgccttctcctcctgctcctggacccccacagccctgagacggggtgtcctcctctacgcaggtttgagtacaagctcagcttcaaaggcccaaggctggcattgcctggggctggaatacccttctggagccatcatggagacgccatcctgggcctggaggaagtgcggctgacgccatccatgaggaaccggagtggcgccgtgtggagcagggcctctgtccccttctctgcctgggaagtagaggtgcaaatgagggtgacgggactggggcgccggggagcccacggcatggccgtgtggtacacccggggcaggggccatgtaggctctgtccttggggggctggcttcgtgggacggcatcgggatcttctttgactctccggcagaggatactcaggacagtcctgccatccgtgtgctggccagcgacgggcacatcccctctgagcagcctggggatggagctagccaagggctgggctcctgtcattgggacttccggaaccggccacaccccttcagagcacggatcacctactgggggcagaggctgcgcatgtccttgaacagtggcctcactcccagtgatccaggtgagttctgtgtggatgtggggcccctgcttttggtccctggaggtttctttggggtctcagcagccaccggcaccctggcagatgatcatgatgtcctgtccttcctgaccttcagcctgagtgagcccagcccagaggttccccctcagcccttcctggagatgcagcagctccgcctggcgaggcagctggaagggctgtgggcaaggctgggcttgggcaccagggaggatgtaactccaaaatcagactctgaagctcaaggagaaggggaaaggctctttgacctggaggagacgctgggcagacaccgccggatcctgcaggctctgcggggtctctccaagcagctggcccaggctgagagacaatggaagaagcagctggggcccccaggccaagccaggcctgacggaggctgggccctggatgcttcctgccagattccatccaccccagggaggggtggccacctctccatgtcactcaataaggactctgccaaggtcggtgccctgctccatggacagtggactctgctccaggccctgcaagagatgagggatgcagctgtccgcatggctgcagaagcccaggtctcctacctgcctgtgggcattgagcatcatttcttagagctggaccacatcctgggcctcctgcaggaggagcttcggggcccggcgaaggcagcagccaaggccccccgcccacctggccagcccccaagggcctcctcgtgcctgcagcctggcatcttcctgttctacctcctcattcagactgtaggcttcttcggctacgtgcacttcagcaggcaggagctgaacaagagccttcaggagtgtctgtccacaggcagccttcctctgggtcctgcaccacacacccccagggccctggggattctgaggaggcagcctctccctgccagcatgcctgcctgacccacctcagagcctgctttgcatcactgggaagcaggcagtgtcttgggtgggggcttggtcagtatcctctccgtctgggtgcccagctcccacgcacacctgagctttcggcatgctcccacctcgttaaaggtgatttccctctccccatgctgtgatat

SEQ ID NO: 389643 - DNA, 1307 bp, Homo sapiens
tagggcggtcgcgtaattcggcacgagggcgcctcacgtatgccggcggtcagtggtccaggtcccttattctgccttctcctcctgctcctggacccccacagccctgagacggggtgtcctcctctacgcaggtttgagtacaagctcagcttcaaaggcccaaggctggcattgcctggggctggaatacccttctggagccatcatggagacgccatcctgggcctggaggaagtgcggctgacgccatccatgaggaaccggagtggcgccgtgtggagcagggcctctgtccccttctctgcctgggaagtagaggtgcaaatgagggtgacgggactggggcgccggggagcccacggcatggccgtgtggtacacccggggcaggggccatgtaggctctgtccttggggggctggcttcgtgggacggcatcgggatcttctttgactctccggcagaggatactcaggacagtcctgccatccgtgtgctggccagcgacgggcacatcccctctgagcagcctggggatggagctagccaagggctgggctcctgtcattgggacttccggaaccggccacaccccttcagagcacggatcacctactgggggcagaggctgcgcatgtccttgaacagtggcctcactcccagtgatccaggtgagttctgtgtggatgtggggcccctgcttttggtccctggaggtttctttggggtctcagcagccaccggcaccctggcagatgatcatgatgtcctgtccttcctgaccttcagcctgagtgagcccagcccagaggttccccctcagcccttcctggagatgcagcagctccgcctggcgaggcagctggaagggctgtgggcaaggctgggcttgggcaccagggaggatgtaactccaaaatcagactctgaagctcaaggagaaggggaaaggctctttgacctggaggagacgctgggcagacaccgccggatcctgcaggctctgcggggtctctccaagcagctggcccaggctgagagacaatggaagaagcagctggggcccccaggccaagccaggcctgacggaggctgggccctggatgcttcctgccagattccatccaccccagggaggggtggccacctctccatgtcactcaataagcactttgggaggccaaggcggacagatcacgaggtcaaaagactgacaccatcgggcagatcacaaggtcaaaagatcgagaccatcctggccaacatggtgaaaccctgtctctactgaaaatacaaaaattatac

SEQ ID NO: 389644 - DNA, 624 bp, Homo sapiens
gaaccagagactcaaatgcagctttccttatttctctttctttcatctctgcttctctcagagtattagctcattttccctctgcagacttactctctcatgcacattatgtgaaacatgattgctaagcatgcctgggttatacatctcccaacaatcaagagaaactctctctagcacatttagtgagaaaaaccttggaaaaattctctggtccaggttgggccaagtgcccaattctgaacaaatcaaccaaggccaaggggcaggacccctagtttggttccagtgccttctctggactgatctcgggatggaaaaaattggctcttaggagaactataattgagaaaagcagttcacagaaaaaagagggatgctttttccagaaaagaatgtggggggcaggcaatatagtaattgcatgtattcaaaggttagctcaatcagaaatattagagaaatgaatcttatgttggtgggaatttgaactggaagaacttgaagttctttccaactcagagatgatgtgattctagctgtttttcaggtaaggcaggcacatattggtttatactaggaattttctttttccacgtatttctactcaaggattactctgtt

SEQ ID NO: 389645 - DNA, 318 bp, Homo sapiens
cttcattttaagtcaaatgagagaaacagacaagacaagtgtcagtgttgatgccacatgaccaaagccatgtcaagtataaacattttatgtaaaatgtagctattttaggacacagggaaagagtgacttttccgcacttaaagggcctggtaaggatttctaaatgaagtggttcttgaaataagtcttcatggatgataaggctaattacccagataaagaaagggggaatgcattctggacatgtacctgccattgcattcacaaaggcaggcaagaaacagcaggtccaggcatgcaggacaagtagttaag

SEQ ID NO: 389646 - DNA, 1370 bp, Homo sapiens
ctgctgatcctgaaattgtaccagcggcaagatgtggcctggaaggggactttaagttctccacaactgccagcaatccttccaccaggcaaaacacatcatctaaggaaaagaagtgaggtttgcttagggcgtggcagcttcggataaacgcaggactccgcctggcagcccgatttctcccggaacctctgctcagcctggtgaaccacacaggccagcgctctgacatgcagaaggtgaccctgggcctgcttgtgttcctggcaggctttcctgtcctggacgccaatgacctagaagataaaaacagtcctttctactatgactggcacagcctccaggttggcgggctcatctgcgctggggttctgtgcgccatgggcatcatcatcgtcatgagtgcaaaatgcaaatgcaagtttggccagaagtccggtcaccatccaggggagactccacctctcatcaccccaggctcagcccaaagctgatgaggacagaccagctgaaattgggtggaggaccgttctctgtccccaggtcctgtctctgcacagaaacttgaactccaggatggaattcttcctcctctgctgggactcctttgcatggcagggcctcatctcacctctcgcaagagggtctctttgttcaattttttttaatctaaaatgattgtgcctctgcccaagcagcctggagacttcctatgtgtgcattggggtggggcttggggcaccatgagaaggttggcgtgccctggaggctgacacagaggctggcactgagcctgcttgttgggaaaagcccacaggcctgttcccttgtggcttgggacatggcacaggcccgccctctgcctcctcagccatgggaacctcatatgcaatttgggatttactagtagccaaaaggaatgaaagagagctctaaccagatggaacactggaacattccagtggaccctggaccattccaggaaaactgggacataggatcgtcccgctatgatggaagtgttcagacagtttataatagtaagcccctgtgaccctctcacttaccccgagacctcactttattacaagatctttccaaatacccaaatgtccctgcaagcccgttaaataattccctatgctacccttaataacatacaatgaccacatagtgtgagaacttccaacaagcctcaaagtcccttgagactccccaatacctaataaggcatgcgaaatgttctcatgaactaccccacaacacgcctaaaactcaaaacacccaaaaatatctcctccaatgtcctgagacatgaacccaaaaagagacccacaataaactcgtgacttgtcccctcaaaaaaaaaa

SEQ ID NO: 389647 - DNA, 1532 bp, Homo sapiens
ctgctgatcctgaaattgtaccagcggcaagatgtggcctggaaggggactttaagttctccacaactgccagcaatccttccaccaggcaaaacacatcatctaaggaaaagaagtgaggtttgcttagggcgtggcagcttcggataaacgcaggactccgcctggcagcccgatttctcccggaacctctgctcagcctggtgaaccacacaggcccgagtttcacccagtccccactccacggtgcagctgcggcttatctctcagcccagcgagatgccagccttcctgtcccgggccagcgctctgacatgcagaaggtgaccctgggcctgcttgtgttcctggcaggctttcctgtcctggacgccaatgacctagaagataaaaacagtcctttctactatgactggcacagcctccaggttggcgggctcatctgcgctggggttctgtgcgccatgggcatcatcatcgtcatgagtgagtggaggagctcgggggagcaggcgggccggggctggggctcccctcccctgaccactcagctctccccaacaggtgcaaaatgcaaatgcaagtttggccagaagtccggtcaccatccaggggagactccacctctcatcaccccaggctcagcccaaagctgatgaggacagaccagctgaaattgggtggaggaccgttctctgtccccaggtcctgtctctgcacagaaacttgaactccaggatggaattcttcctcctctgctgggactcctttgcatggcagggcctcatctcacctctcgcaagagggtctctttgttcaattttttttaatctaaaatgattgtgcctctgcccaagcagcctggagacttcctatgtgtgcattggggtggggcttggggcaccatgagaaggttggcgtgccctggaggctgacacagaggctggcactgagcctgcttgttgggaaaagcccacaggcctgttcccttgtggcttgggacatggcacaggcccgccctctgcctcctcagccatgggaacctcatatgcaatttgggatttactagtagccaaaaggaatgaaagagagctctaaccagatggaacactggaacattccagtggaccctggaccattccaggaaaactgggacataggatcgtcccgctatgatggaagtgttcagacagtttataatagtaagcccctgtgaccctctcacttaccccgagacctcactttattacaagatctttccaaatacccaaatgtccctgcaagcccgttaaataattccctatgctacccttaataacatacaatgaccacatagtgtgagaacttccaacaagcctcaaagtcccttgagactccccaatacctaataaggcatgcgaaatgttctcatgaactaccccacaacacgcctaaaactcaaaacacccaaaaatatctcctccaatgtcctgagacatgaacccaaaaagagacccacaataaactcgtgacttgtcccctcaaaaaaaaaa

SEQ ID NO: 389648 - DNA, 590 bp, Homo sapiens
gctatgtaccatccgaatgtctggcgagcctagtaagtcagtgaagatggtcactatgtgttgcctaagatatcctggtcacgactagtgttcgtgtcctcatcacctagataaaaggcccggggtgaactgaacgttctgaacaagatcctagatagtagtgtatggggtcattccttgaagtcttatcaagcgagtcattccgacagcctgagccgttccgatgattcagaacattagggccacttcgattccatggtcatgaagtgcaacaatgcacaatgcaaagtttggccacgaagttccggtcaccactccagtggagactccacactctcattcacccaggctcagcccaaagctgatgaggacagaccagctgaaattgggtggaggaccgttctctgtccccaggtcctgtctctgcacagaaacttgaactccaggatggaattcttcctcctctgctgggactcctttgcatggcagggcctcatctcacctctcgcaagagggtctctttgttcaattttttttaatctaaaatgattgtgcctctgccctaaaaaaaacaaaatccacaaacaatc

SEQ ID NO: 389649 - DNA, 1674 bp, Homo sapiens
  misc_feature (171)..(171): n is a, c, g, or t
ctgctgatcctgaaattgtaccagcggcaagatgtggcctggaaggggactttaagttctccacaactgccagcaatccttccaccaggcaaaacacatcatctaaggaaaagaagtgaggtcggaacaccaacgcatcatctcactgcatggccctggaggctctgcgtnttaaagaccccagaaccttccccattcaaggtcctctcctgggcacaggagattggagaaagctcctcccttaattccagggaccgagttccagcccatccaattctccgtctcacctgaggctgctgtggtcctggtgaccccagggagcaacctgccgcccatggctggggagggggtgaagctgtctctttaagagcaggaatggagcccctgggcctcagggcatctgacttgttttctacctgcccaggtttgcttagggcgtggcagcttcggataaacgcaggactccgcctggcagcccgatttctcccggaacctctgctcagcctggtgaaccacacaggccagcgctctgacatgcagaaggtgaccctgggcctgcttgtgttcctggcaggctttcctgtcctggacgccaatgacctagaagataaaaacagtcctttctactatgactggcacagcctccaggttggcgggctcatctgcgctggggttctgtgcgccatgggcatcatcatcgtcatgagtgcaaaatgcaaatgcaagtttggccagaagtccggtcaccatccaggggagactccacctctcatcaccccaggctcagcccaaagctgatgaggacagaccagctgaaattgggtggaggaccgttctctgtccccaggtcctgtctctgcacagaaacttgaactccaggatggaattcttcctcctctgctgggactcctttgcatggcagggcctcatctcacctctcgcaagagggtctctttgttcaattttttttaatctaaaatgattgtgcctctgcccaagcagcctggagacttcctatgtgtgcattggggtggggcttggggcaccatgagaaggttggcgtgccctggaggctgacacagaggctggcactgagcctgcttgttgggaaaagcccacaggcctgttcccttgtggcttgggacatggcacaggcccgccctctgcctcctcagccatgggaacctcatatgcaatttgggatttactagtagccaaaaggaatgaaagagagctctaaccagatggaacactggaacattccagtggaccctggaccattccaggaaaactgggacataggatcgtcccgctatgatggaagtgttcagacagtttataatagtaagcccctgtgaccctctcacttaccccgagacctcactttattacaagatctttccaaatacccaaatgtccctgcaagcccgttaaataattccctatgctacccttaataacatacaatgaccacatagtgtgagaacttccaacaagcctcaaagtcccttgagactccccaatacctaataaggcatgcgaaatgttctcatgaactaccccacaacacgcctaaaactcaaaacacccaaaaatatctcctccaatgtcctgagacatgaacccaaaaagagacccacaataaactcgtgacttgtcccctcaaaaaaaaaa

SEQ ID NO: 389650 - DNA, 1273 bp, Homo sapiens
  misc_feature (97)..(97): n is a, c, g, or t
aaagaaatgagacaaaggacttagagccccgaattaataccaataaagtccttctttattgcttattttcctatatttttttctcccggaacctctnctcagcctggtgaaccacacaggccagcgctctgacatgcagaaggtgaccctgggcctgcttgtgttcctggcaggctttcctgtcctggacgccaatgacctagaagataaaaacagtcctttctactatgactggcacagcctccaggttggcgggctcatctgcgctggggttctgtgcgccatgggcatcatcatcgtcatgagtgcaaaatgcaaatgcaagtttggccagaagtccggtcaccatccaggggagactccacctctcatcaccccaggctcagcccaaagctgatgaggacagaccagctgaaattgggtggaggaccgttctctgtccccaggtcctgtctctgcacagaaacttgaactccaggatggaattcttcctcctctgctgggactcctttgcatggcagggcctcatctcacctctcgcaagagggtctctttgttcaattttttttaatctaaaatgattgtgcctctgcccaagcagcctggagacttcctatgtgtgcattggggtggggcttggggcaccatgagaaggttggcgtgccctggaggctgacacagaggctggcactgagcctgcttgttgggaaaagcccacaggcctgttcccttgtggcttgggacatggcacaggcccgccctctgcctcctcagccatgggaacctcatatgcaatttgggatttactagtagccaaaaggaatgaaagagagctctaaccagatggaacactggaacattccagtggaccctggaccattccaggaaaactgggacataggatcgtcccgctatgatggaagtgttcagacagtttataatagtaagcccctgtgaccctctcacttaccccgagacctcactttattacaagatctttccaaatacccaaatgtccctgcaagcccgttaaataattccctatgctacccttaataacatacaatgaccacatagtgtgagaacttccaacaagcctcaaagtcccttgagactccccaatacctaataaggcatgcgaaatgttctcatgaactaccccacaacacgcctaaaactcaaaacacccaaaaatatctcctccaatgtcctgagacatgaacccaaaaagagacccacaataaactcgtgacttgtcccctcaaaaaaaaaa

SEQ ID NO: 389651 - DNA, 1224 bp, Homo sapiens
cttatgctgagcaggtctacctgggaaagagaaagtgtttgctgtcaccaggaactctgctgggcctagggccagcgctctgacatgcagaaggtgaccctgggcctgcttgtgttcctggcaggctttcctgtcctggacgccaatgacctagaagataaaaacagtcctttctactatgactggcacagcctccaggttggcgggctcatctgcgctggggttctgtgcgccatgggcatcatcatcgtcatgagtgcaaaatgcaaatgcaagtttggccagaagtccggtcaccatccaggggagactccacctctcatcaccccaggctcagcccaaagctgatgaggacagaccagctgaaattgggtggaggaccgttctctgtccccaggtcctgtctctgcacagaaacttgaactccaggatggaattcttcctcctctgctgggactcctttgcatggcagggcctcatctcacctctcgcaagagggtctctttgttcaattttttttaatctaaaatgattgtgcctctgcccaagcagcctggagacttcctatgtgtgcattggggtggggcttggggcaccatgagaaggttggcgtgccctggaggctgacacagaggctggcactgagcctgcttgttgggaaaagcccacaggcctgttcccttgtggcttgggacatggcacaggcccgccctctgcctcctcagccatgggaacctcatatgcaatttgggatttactagtagccaaaaggaatgaaagagagctctaaccagatggaacactggaacattccagtggaccctggaccattccaggaaaactgggacataggatcgtcccgctatgatggaagtgttcagacagtttataatagtaagcccctgtgaccctctcacttaccccgagacctcactttattacaagatctttccaaatacccaaatgtccctgcaagcccgttaaataattccctatgctacccttaataacatacaatgaccacatagtgtgagaacttccaacaagcctcaaagtcccttgagactccccaatacctaataaggcatgcgaaatgttctcatgaactaccccacaacacgcctaaaactcaaaacacccaaaaatatctcctccaatgtcctgagacatgaacccaaaaagagacccacaataaactcgtgacttgtcccctcaaaaaaaaaa

SEQ ID NO: 389652 - DNA, 973 bp, Homo sapiens
  misc_feature (722)..(722): n is a, c, g, or t
  misc_feature (732)..(732): n is a, c, g, or t
  misc_feature (740)..(740): n is a, c, g, or t
  misc_feature (744)..(744): n is a, c, g, or t
  misc_feature (755)..(755): n is a, c, g, or t
  misc_feature (757)..(757): n is a, c, g, or t
  misc_feature (765)..(765): n is a, c, g, or t
ctgctgatcctgaaattgtaccagcggcaagatgtggcctggaaggggactttaagttctccacaactgccagcaatccttccaccaggcaaaacacatcatctaaggaaaagaagtgaggtttgcttagggcgtggcagcttcggataaacgcaggactccgcctggcagcccgatttctcccggaacctctgctcagcctggtgaaccacacaggccagcgctctgacatgcagaaggtgaccctgggcctgcttgtgttcctggcaggctttcctgtcctggacgccaatgacctagaagataaaaacagtcctttctactatgactggcacagcctccaggttggcgggctcatctgcgctggggttctgtgcgccatgggcatcatcatcgtcatgagtgcaaaatgcaaatgcaagtttggccagaagtccggtcaccatccaggggagactccacctctcatcaccccaggctcagcccaaagctgatgaggacagaccagctgaaattgggtggaggaccgttctctgtccccaggtcctgtctctgcacagaaacttgaactccaggatggaattcttcctcctctgctgggactcctttgcatggcagggcctcatctcacctctcgcaagagggtctctttgttcaattttttttaatctaaaatgattgtgcctctgcccaaaaaaaaaaaaaaaaaaaaaacaaaaaanaaaaaaaaanaaaaaaanaaanaaaaaaaaaananaaaaaaanggggggggcgccgacaaagcatcccccgcgggggcggacacaggagtgagtgggagcgacaccgatctgttggaagaagaggggcgcccagaaagcgcgggccgatgtagaagcagagagcaggggcggacgcagataagacgcgccgggagcgggacaaacgacggcacgcggcgactctgaggaggacgaccctcggcgcggggaa

SEQ ID NO: 389653 - DNA, 895 bp, Homo sapiens
ctgctgatcctgaaattgtaccagcggcaagatgtggcctggaaggggactttaagttctccacaactgccagcaatccttccaccaggcaaaacacatcatctaaggaaaagaagtgaggtttgcttagggcgtggcagcttcggataaacgcaggactccgcctggcagcccgatttctcccggaacctctgctcagcctggtgaaccacacaggccagcgctctgacatgcagaaggtgaccctgggcctgcttgtgttcctggcaggctttcctgtcctggacgccaatgacctagaagataaaaacagtcctttctactatgactggcacagcctccaggttggcgggctcatctgcgctggggttctgtgcgccatgggcatcatcatcgtcatgagtgcaaaatgcaaatgcaagtttggccagaagtccggtcaccatccaggggagactccacctctcatcaccccaggctcagcccaaagctgatgaggacagaccagctgaaattgggtggaggaccgttctctgtccccaggtcctgtctctgcacagaaacttgaactccaggatggaattcttcctcctctgctgggactcctttgcatggcagggcctcatctcacctctcgcaagagggtctctttgttcaattttttttaatctaaaatgattgtgcctctgcccaaaaaaaaaaaaaaaaaaaaaacctttttgggggcgcatgtggggccttgagaaaaggttttttaaacacattgggtttggggccggggggccccagttgtggttatgtgtgacactgtggccacagggggtccacaagggaacccccgggcacagagaaatggggcttgggttctctcacccaaataaaaaaaagccgcgag

SEQ ID NO: 389654 - DNA, 1616 bp, Homo sapiens
tccctgcagggtagtgatctaaaattacattttcaataaagtctatttaagtgtataatagtgagtcattttcaatgatgtgcaaacaccagaccaggtgggtgtggacatggtggaagcgggaggatgggctttgagcatgattggacttggggaaacaggaatctgggaactgaaaccatctgtcgtcttgaccagaaaagtcccccgctgctgcaggaggcatggattaaccacgtgtctggaaacatgagaccaaatagtggctaaaaacctcctagattagaacccatttcaggtggcagaatgctggcgtgactcggaggtgtggggctgagtgggcgagtccacatttcctacgttgggatatgaggggatgaggtggctgctcagtgacaggacccctgtcccgcaggagaccctttcccaaggcccctgaaactccccaggccctgcccaaaggcttggctgaggccggcatcaccatctcccctccttcccctcttctcccactaggctttcctgtcctggacgccaatgacctagaagataaaaacagtcctttctactatgactggcacagcctccaggttggcgggctcatctgcgctggggttctgtgcgccatgggcatcatcatcgtcatgagtgcaaaatgcaaatgcaagtttggccagaagtccggtcaccatccaggggagactccacctctcatcaccccaggctcagcccaaagctgatgaggacagaccagctgaaattgggtggaggaccgttctctgtccccaggtcctgtctctgcacagaaacttgaactccaggatggaattcttcctcctctgctgggactcctttgcatggcagggcctcatctcacctctcgcaagagggtctctttgttcaattttttttaatctaaaatgattgtgcctctgcccaagcagcctggagacttcctatgtgtgcattggggtggggcttggggcaccatgagaaggttggcgtgccctggaggctgacacagaggctggcactgagcctgcttgttgggaaaagcccacaggcctgttcccttgtggcttgggacatggcacaggcccgccctctgcctcctcagccatgggaacctcatatgcaatttgggatttactagtagccaaaaggaatgaaagagagctctaaccagatggaacactggaacattccagtggaccctggaccattccaggaaaactgggacataggatcgtcccgctatgatggaagtgttcagacagtttataatagtaagcccctgtgaccctctcacttaccccgagacctcactttattacaagatctttccaaatacccaaatgtccctgcaagcccgttaaataattccctatgctacccttaataacatacaatgaccacatagtgtgagaacttccaacaagcctcaaagtcccttgagactccccaatacctaataaggcatgcgaaatgttctcatgaactaccccacaacacgcctaaaactcaaaacacccaaaaatatctcctccaatgtcctgagacatgaacccaaaaagagacccacaataaactcgtgacttgtcccctcaaaaaaaaaa

SEQ ID NO: 389655 - DNA, 1189 bp, Homo sapiens
aatggctgctcctgcttcgcgcttcctgcttctgctgcttcctgcttctgcccctcaccgtgaccctgggcctgcttgtgttcctgcaggctttcctgtcctggacgccaatgacctagaagataaaaacagtcctttctactatgactggcacagcctccaggttggcgggctcatctgcgctggggttctgtgcgccatgggcatcatcatcgtcatgagtgcaaaatgcaaatgcaagtttggccagaagtccggtcaccatccaggggagactccacctctcatcaccccaggctcagcccaaagctgatgaggacagaccagctgaaattgggtggaggaccgttctctgtccccaggtcctgtctctgcacagaaacttgaactccaggatggaattcttcctcctctgctgggactcctttgcatggcagggcctcatctcacctctcgcaagagggtctctttgttcaattttttttaatctaaaatgattgtgcctctgcccaagcagcctggagacttcctatgtgtgcattggggtggggcttggggcaccatgagaaggttggcgtgccctggaggctgacacagaggctggcactgagcctgcttgttgggaaaagcccacaggcctgttcccttgtggcttgggacatggcacaggcccgccctctgcctcctcagccatgggaacctcatatgcaatttgggatttactagtagccaaaaggaatgaaagagagctctaaccagatggaacactggaacattccagtggaccctggaccattccaggaaaactgggacataggatcgtcccgctatgatggaagtgttcagacagtttataatagtaagcccctgtgaccctctcacttaccccgagacctcactttattacaagatctttccaaatacccaaatgtccctgcaagcccgttaaataattccctatgctacccttaataacatacaatgaccacatagtgtgagaacttccaacaagcctcaaagtcccttgagactccccaatacctaataaggcatgcgaaatgttctcatgaactaccccacaacacgcctaaaactcaaaacacccaaaaatatctcctccaatgtcctgagacatgaacccaaaaagagacccacaataaactcgtgacttgtcccctcaaaaaaaaaa

SEQ ID NO: 389656 - DNA, 1045 bp, Homo sapiens
catgcggtggggttctgtgcgccatgggctcatctgcgctggggttctgtgcgccatgggcatcatcatcgtcatgagtgcaaaatgcaaatgcaagtttggccagaagtccggtcaccatccaggggagactccacctctcatcaccccaggctcagcccaaagctgatgaggacagaccagctgaaattgggtggaggaccgttctctgtccccaggtcctgtctctgcacagaaacttgaactccaggatggaattcttcctcctctgctgggactcctttgcatggcagggcctcatctcacctctcgcaagagggtctctttgttcaattttttttaatctaaaatgattgtgcctctgcccaagcagcctggagacttcctatgtgtgcattggggtggggcttggggcaccatgagaaggttggcgtgccctggaggctgacacagaggctggcactgagcctgcttgttgggaaaagcccacaggcctgttcccttgtggcttgggacatggcacaggcccgccctctgcctcctcagccatgggaacctcatatgcaatttgggatttactagtagccaaaaggaatgaaagagagctctaaccagatggaacactggaacattccagtggaccctggaccattccaggaaaactgggacataggatcgtcccgctatgatggaagtgttcagacagtttataatagtaagcccctgtgaccctctcacttaccccgagacctcactttattacaagatctttccaaatacccaaatgtccctgcaagcccgttaaataattccctatgctacccttaataacatacaatgaccacatagtgtgagaacttccaacaagcctcaaagtcccttgagactccccaatacctaataaggcatgcgaaatgttctcatgaactaccccacaacacgcctaaaactcaaaacacccaaaaatatctcctccaatgtcctgagacatgaacccaaaaagagacccacaataaactcgtgacttgtcccctcaaaaaaaaaa

SEQ ID NO: 389657 - DNA, 1010 bp, Homo sapiens
ggatttgctggtgcagtacaactaggcttaatagggacatgagtgcaaaatgcaaatgcaagtttggccagaagtccggtcaccatccaggggagactccacctctcatcaccccaggctcagcccaaagctgatgaggacagaccagctgaaattgggtggaggaccgttctctgtccccaggtcctgtctctgcacagaaacttgaactccaggatggaattcttcctcctctgctgggactcctttgcatggcagggcctcatctcacctctcgcaagagggtctctttgttcaattttttttaatctaaaatgattgtgcctctgcccaagcagcctggagacttcctatgtgtgcattggggtggggcttggggcaccatgagaaggttggcgtgccctggaggctgacacagaggctggcactgagcctgcttgttgggaaaagcccacaggcctgttcccttgtggcttgggacatggcacaggcccgccctctgcctcctcagccatgggaacctcatatgcaatttgggatttactagtagccaaaaggaatgaaagagagctctaaccagatggaacactggaacattccagtggaccctggaccattccaggaaaactgggacataggatcgtcccgctatgatggaagtgttcagacagtttataatagtaagcccctgtgaccctctcacttaccccgagacctcactttattacaagatctttccaaatacccaaatgtccctgcaagcccgttaaataattccctatgctacccttaataacatacaatgaccacatagtgtgagaacttccaacaagcctcaaagtcccttgagactccccaatacctaataaggcatgcgaaatgttctcatgaactaccccacaacacgcctaaaactcaaaacacccaaaaatatctcctccaatgtcctgagacatgaacccaaaaagagacccacaataaactcgtgacttgtcccctcaaaaaaaaaa

SEQ ID NO: 389658 - DNA, 1000 bp, Homo sapiens
gaattcactagtaatcactagtaatgtcatgagtgcaaaatgcaaatgcaagtttggccagaagtccggtcaccatccaggggagactccacctctcatcaccccaggctcagcccaaagctgatgaggacagaccagctgaaattgggtggaggaccgttctctgtccccaggtcctgtctctgcacagaaacttgaactccaggatggaattcttcctcctctgctgggactcctttgcatggcagggcctcatctcacctctcgcaagagggtctctttgttcaattttttttaatctaaaatgattgtgcctctgcccaagcagcctggagacttcctatgtgtgcattggggtggggcttggggcaccatgagaaggttggcgtgccctggaggctgacacagaggctggcactgagcctgcttgttgggaaaagcccacaggcctgttcccttgtggcttgggacatggcacaggcccgccctctgcctcctcagccatgggaacctcatatgcaatttgggatttactagtagccaaaaggaatgaaagagagctctaaccagatggaacactggaacattccagtggaccctggaccattccaggaaaactgggacataggatcgtcccgctatgatggaagtgttcagacagtttataatagtaagcccctgtgaccctctcacttaccccgagacctcactttattacaagatctttccaaatacccaaatgtccctgcaagcccgttaaataattccctatgctacccttaataacatacaatgaccacatagtgtgagaacttccaacaagcctcaaagtcccttgagactccccaatacctaataaggcatgcgaaatgttctcatgaactaccccacaacacgcctaaaactcaaaacacccaaaaatatctcctccaatgtcctgagacatgaacccaaaaagagacccacaataaactcgtgacttgtcccctcaaaaaaaaaa

SEQ ID NO: 389659 - DNA, 1029 bp, Homo sapiens
tggtcttcaaagcatcatgggaaagatgaagtctgtacttgtcaaagtacctatcctcactatggctaattcccatgctgcaagatcttgaacgcaatgtaatcccattcagggagaatcagctctcatatcccaggctcagcccaaagctgatgaggacagaccagctgaaattgggtggaggaccgttctctgtccccaggtcctgtctctgcacagaaacttgaactccaggatggaattcttcctcctctgctgggactcctttgcatggcagggcctcatctcacctctcgcaagagggtctctttgttcaattttttttaatctaaaatgattgtgcctctgcccaagcagcctggagacttcctatgtgtgcattggggtggggcttggggcaccatgagaaggttggcgtgccctggaggctgacacagaggctggcactgagcctgcttgttgggaaaagcccacaggcctgttcccttgtggcttgggacatggcacaggcccgccctctgcctcctcagccatgggaacctcatatgcaatttgggatttactagtagccaaaaggaatgaaagagagctctaaccagatggaacactggaacattccagtggaccctggaccattccaggaaaactgggacataggatcgtcccgctatgatggaagtgttcagacagtttataatagtaagcccctgtgaccctctcacttaccccgagacctcactttattacaagatctttccaaatacccaaatgtccctgcaagcccgttaaataattccctatgctacccttaataacatacaatgaccacatagtgtgagaacttccaacaagcctcaaagtcccttgagactccccaatacctaataaggcatgcgaaatgttctcatgaactaccccacaacacgcctaaaactcaaaacacccaaaaatatctcctccaatgtcctgagacatgaacccaaaaagagacccacaataaactcgtgacttgtcccctcaaaaaaaaaa

SEQ ID NO: 389660 - DNA, 921 bp, Homo sapiens
ctgctgatcctgaaattgtaccagcggcaagatgtggcctggaaggggactttaagttctccacaactgccagcaatccttccaccaggcaaaacacatcatctaaggaaaagaagtgaggtttgcttagggcgtggcagcttcggataaacgcaggactccgcctggcagcccgatttctcccggaacctctgctcagcctggtgaaccacacaggccagcgctctgacatgcagaaggtgaccctgggcctgcttgtgttcctggcaggctttcctgtcctggacgccaatgacctagaagataaaaacagtcctttctactatgactggcacagcctccaggttggcgggctcatctgcgctggggttctgtgcgccatgggcatcatcatcgtcatgagtgcaaaatgcaaatgcaagtttggccagaagtccggtcaccatccaggggagactccacctctcatcaccccaggctcagcccaaagctgatgaggacagaccagctgaaattgggtggaggaccgttctctgtccccaggtcctgtctctgcacagaaacttgaactccaggatggaattcttcctcctctgctggatcttgctcccatcagtagtgacctgcgggacctttcgaaaatctccccagtaaagacattcttgctttcatacaacctggctgctggagcacctggctgaattttatcttattattcacctttgagttcgtggcaaatacttagcagtatttaatttttgctttctgatttaagtgtaatacgaaaaaaaatcatgcaaatcaattaccagtatctggtgtttgaaattgtaagatgctgaaaagaactgttaattatactctgtatctgccgggggcaatgtaaactgactttaggattcgaagagagccttgctgatg

SEQ ID NO: 389661 - DNA, 310 bp, Homo sapiens
cgcttttcagggtgaaagggctaactctcccagcaggagaggcctcggggctctgccctttagagttcctgccgctaagatttccaggtttattgtttctagctggtaatccccagggggccccaaatcctgaaatgctttggcccctgggattgcacaaccccccaaatggaaaggcagccaggaagacatgtctgggcaggctaagaaccctctatccggagggagagggcaaatgggggcggacaccaatctcaccacttttgtctccttagtcaccatccaggggagactccacctctcatcaccc

SEQ ID NO: 389662 - DNA, 477 bp, Homo sapiens
ctgctgatcctgaaattgtaccagcggcaagatgtggcctggaaggggactttaagttctccacaactgccagcaatccttccaccaggcaaaacacatcatctaaggaaaagaagtgaggtttgcttagggcgtggcagcttcggataaacgcaggactccgcctggcagcccgatttctcccggaacctctgctcagcctggtgaaccacacaggcccgagtttcacccagtccccactccacggtgcagctgcggcttatctctcagcccagcgagatgccagccttcctgtcccgggccagcgctctgacatgcagaaggtgaccctgggcctgcttgtgttcctggcaggctttcctgtcctggacgccaatgacctagaagataaaaacagtcctttctactatggtgctccatatatatttgtcaagagaatggggggacagatggagaggacacaggctggcactgagg

SEQ ID NO: 389663 - DNA, 1880 bp, Homo sapiens
  misc_feature (171)..(171): n is a, c, g, or t
ctgctgatcctgaaattgtaccagcggcaagatgtggcctggaaggggactttaagttctccacaactgccagcaatccttccaccaggcaaaacacatcatctaaggaaaagaagtgaggtcggaacaccaacgcatcatctcactgcatggccctggaggctctgcgtnttaaagaccccagaaccttccccattcaaggtcctctcctgggcacaggagattggagaaagctcctcccttaattccagggaccgagttccagcccatccaattctccgtctcacctgaggctgctgtggtcctggtgaccccagggagcaacctgccgcccatggctggggagggggtgaagctgtctctttaagagcaggaatggagcccctgggcctcagggcatctgacttgttttctacctgcccaggtttgcttagggcgtggcagcttcggataaacgcaggactccgcctggcagcccgatttctcccggaacctctgctcagcctggtgaaccacacagaggctggggcgaggaggataccatctgtcagtcttggctggatgacatcatgggaagggggtatagtggggccttgcaggccagaggtggcttggaggagcccctggaaagaggcttaagaggcccgagtttcacccagtccccactccacggtgcagctgcggcttatctctcagcccagcgagatgccagccttcctgtcccgggccagcgctctgacatgcagaaggtgaccctgggcctgcttgtgttcctggcaggctttcctgtcctggacgccaatgacctagaagataaaaacagtcctttctactatgactggcacagcctccaggttggcgggctcatctgcgctggggttctgtgcgccatgggcatcatcatcgtcatgagtgcaaaatgcaaatgcaagtttggccagaagtccggtcaccatccaggggagactccacctctcatcaccccaggctcagcccaaagctgatgaggacagaccagctgaaattgggtggaggaccgttctctgtccccaggtcctgtctctgcacagaaacttgaactccaggatggaattcttcctcctctgctgggactcctttgcatggcagggcctcatctcacctctcgcaagagggtctctttgttcaattttttttaatctaaaatgattgtgcctctgcccaagcagcctggagacttcctatgtgtgcattggggtggggcttggggcaccatgagaaggttggcgtgccctggaggctgacacagaggctggcactgagcctgcttgttgggaaaagcccacaggcctgttcccttgtggcttgggacatggcacaggcccgccctctgcctcctcagccatgggaacctcatatgcaatttgggatttactagtagccaaaaggaatgaaagagagctctaaccagatggaacactggaacattccagtggaccctggaccattccaggaaaactgggacataggatcgtcccgctatgatggaagtgttcagacagtttataatagtaagcccctgtgaccctctcacttaccccgagacctcactttattacaagatctttccaaatacccaaatgtccctgcaagcccgttaaataattccctatgctacccttaataacatacaatgaccacatagtgtgagaacttccaacaagcctcaaagtcccttgagactccccaatacctaataaggcatgcgaaatgttctcatgaactaccccacaacacgcctaaaactcaaaacacccaaaaatatctcctccaatgtcctgagacatgaacccaaaaagagacccacaataaactcgtgacttgtcccctcaaaaaaaaaa

SEQ ID NO: 389664 - DNA, 1200 bp, Homo sapiens
tcgcaccaaggcttgttcaacccggggaaacaaaccaggcccacggcttcttgaactggcagaaaggggaacccctggggcctggcttgggttcctgcaggctttcctgtcctggacgccaatgacctagaagataaaaacagtcctttctactatgactggcacagcctccaggttggcgggctcatctgcgctggggttctgtgcgccatgggcatcatcatcgtcatgagtgcaaaatgcaaatgcaagtttggccagaagtccggtcaccatccaggggagactccacctctcatcaccccaggctcagcccaaagctgatgaggacagaccagctgaaattgggtggaggaccgttctctgtccccaggtcctgtctctgcacagaaacttgaactccaggatggaattcttcctcctctgctgggactcctttgcatggcagggcctcatctcacctctcgcaagagggtctctttgttcaattttttttaatctaaaatgattgtgcctctgcccaagcagcctggagacttcctatgtgtgcattggggtggggcttggggcaccatgagaaggttggcgtgccctggaggctgacacagaggctggcactgagcctgcttgttgggaaaagcccacaggcctgttcccttgtggcttgggacatggcacaggcccgccctctgcctcctcagccatgggaacctcatatgcaatttgggatttactagtagccaaaaggaatgaaagagagctctaaccagatggaacactggaacattccagtggaccctggaccattccaggaaaactgggacataggatcgtcccgctatgatggaagtgttcagacagtttataatagtaagcccctgtgaccctctcacttaccccgagacctcactttattacaagatctttccaaatacccaaatgtccctgcaagcccgttaaataattccctatgctacccttaataacatacaatgaccacatagtgtgagaacttccaacaagcctcaaagtcccttgagactccccaatacctaataaggcatgcgaaatgttctcatgaactaccccacaacacgcctaaaactcaaaacacccaaaaatatctcctccaatgtcctgagacatgaacccaaaaagagacccacaataaactcgtgacttgtcccctcaaaaaaaaaa

SEQ ID NO: 389665 - DNA, 1242 bp, Homo sapiens
ccgacgttctgaactactgtcagacatgtgcatccttcgcgtcgtgtgatgatagttcctgcaggctttcctgtcctggacgccaatgacctagaagataaaaacagtcctttctactatgactggcacagcctccaggttggcgggctcatctgcgctggggttctgtgcgccatgggcatcatcatcgtcatgagtgagtggaggagctcgggggagcaggcgggccggggctggggctcccctcccctgaccactcagctctccccaacaggtgcaaaatgcaaatgcaagtttggccagaagtccggtcaccatccaggggagactccacctctcatcaccccaggctcagcccaaagctgatgaggacagaccagctgaaattgggtggaggaccgttctctgtccccaggtcctgtctctgcacagaaacttgaactccaggatggaattcttcctcctctgctgggactcctttgcatggcagggcctcatctcacctctcgcaagagggtctctttgttcaattttttttaatctaaaatgattgtgcctctgcccaagcagcctggagacttcctatgtgtgcattggggtggggcttggggcaccatgagaaggttggcgtgccctggaggctgacacagaggctggcactgagcctgcttgttgggaaaagcccacaggcctgttcccttgtggcttgggacatggcacaggcccgccctctgcctcctcagccatgggaacctcatatgcaatttgggatttactagtagccaaaaggaatgaaagagagctctaaccagatggaacactggaacattccagtggaccctggaccattccaggaaaactgggacataggatcgtcccgctatgatggaagtgttcagacagtttataatagtaagcccctgtgaccctctcacttaccccgagacctcactttattacaagatctttccaaatacccaaatgtccctgcaagcccgttaaataattccctatgctacccttaataacatacaatgaccacatagtgtgagaacttccaacaagcctcaaagtcccttgagactccccaatacctaataaggcatgcgaaatgttctcatgaactaccccacaacacgcctaaaactcaaaacacccaaaaatatctcctccaatgtcctgagacatgaacccaaaaagagacccacaataaactcgtgacttgtcccctcaaaaaaaaaa

SEQ ID NO: 389666 - DNA, 1878 bp, Homo sapiens
  misc_feature (171)..(171): n is a, c, g, or t
ctgctgatcctgaaattgtaccagcggcaagatgtggcctggaaggggactttaagttctccacaactgccagcaatccttccaccaggcaaaacacatcatctaaggaaaagaagtgaggtcggaacaccaacgcatcatctcactgcatggccctggaggctctgcgtnttaaagaccccagaaccttccccattcaaggtcctctcctgggcacaggagattggagaaagctcctcccttaattccagggaccgagttccagcccatccaattctccgtctcacctgaggctgctgtggtcctggtgaccccagggagcaacctgccgcccatggctggggagggggtgaagctgtctctttaagagcaggaatggagcccctgggcctcagggcatctgacttgttttctacctgcccaggtttgcttagggcgtggcagcttcggataaacgcaggactccgcctggcagcccgatttctcccggaacctctgctcagcctggtgaaccacacagaggctggggcgaggaggataccatctgtcagtcttggctggatgacatcatgggaagggggtatagtggggccttgcaggccagaggtggcttggaggagcccctggaaagaggcttaagaggcccgagtttcacccagtccccactccacggtgcagctgcggcttatctctcagcccagcgagatgccagccttcctgtcccgggccagcgctctgacatgcagaaggtgaccctgggcctgcttgtgttcctggcaggctttcctgtcctggacgccaatgacctagaagataaaaacagtcctttctactatgactggcacagcctccaggttggcgggctcatctgcgctggggttctgtgcgccatgggcatcatcatcgtcatgagtgcaaaatgcaaatgcaagtttggccagaagtccggtcaccacccagggagactcacctctcattaccccaggctcagcccaaagctgatgaggacagaccagctgaaattgggtggaggaccgttctctgtccccaggtcctgtctctgcacagaaacttgaactccaggatggaattcttcctcctctgctgggactcctttgcatggcagggcctcatctcacctctcgcaagagggtctctttgttcaattttttttaatctaaaatgattgtgcctctgcccaagcagcctggagacttcctatgtgtgcattggggtggggcttggggcaccatgagaaggttggcgtgccctggaggctgacacagaggctggcactgagcctgcttgttgggaaaagcccacaggcctgttcccttgtggcttgggacatggcacaggcccgccctctgcctcctcagccatgggaacctcatatgcaatttgggatttactagtagccaaaaggaatgaaagagagctctaaccagatggaacactggaacattccagtggaccctggaccattccaggaaaactgggacataggatcgtcccgctatgatggaagtgttcagacagtttataatagtaagcccctgtgaccctctcacttaccccgagacctcactttattacaagatctttccaaatacccaaatgtccctgcaagcccgttaaataattccctatgctacccttaataacatacaatgaccacatagtgtgagaacttccaacaagcctcaaagtcccttgagactccccaatacctaataaggcatgcgaaatgttctcatgaactaccccacaacacgcctaaaactcaaaacacccaaaaatatctcctccaatgtcctgagacatgaacccaaaaagagacccacaataaactcgtgacttgtcccctcaaaaaaaaaa

SEQ ID NO: 389667 - DNA, 287 bp, Homo sapiens
gggctggtaaccaggacagtggtaaatgtagtaggaccacaggtggctcctagcctaactctgggagaaaaggagttggacccagaggaggcacgccagaggaagtgatggttatcagagactgagggctaaagggattggccaggagatgagggtgtagaggggcccgagtagttgcagacaaaagtcccgcaacgagggaggcaaagtgtagagctcttggccgcctgcagtaccatggaacttgggtgctagtagagacaaatgtgttggagagggtaaaccag

SEQ ID NO: 389668 - DNA, 579 bp, Homo sapiens
  misc_feature (14)..(15): n is a, c, g, or t
  misc_feature (17)..(17): n is a, c, g, or t
atacgactcgagcnngnacccgtatgcgtgtaccaacactaaattcaagctgtcattaatgaataacaacatgaaattcaaactgtcattattgaataacaacagaggagattaaaactgttcccaacttgcagttattacaaatgtgctaacaaacacaatttgtgttccttgccccttctaccgtcttggaaaaaaaagcaggttttttttttttgggtttctgttgggtaacaaagaatttatgctcaccaagttatatgatcttttctctgcctaactcttaagtgtcctacctaccatccttgtgcaggcttcctgggtgatctccccatcttcaggacattctctgagcctactccccaggtctttctacaactcgggtttttcttctgggcaccagccctgaagacctagccacttagagggcctctttttctgtctgttctcttggcctcgtaagtccatcatgtcatgacacctctttatctctaacctctgaacacccaagccaaaacctaagccatcccctactctcagtctccccttgtacacgcatagggtacgagctcgagtcga

SEQ ID NO: 389669 - DNA, 590 bp, Homo sapiens
  misc_feature (14)..(15): n is a, c, g, or t
  misc_feature (17)..(17): n is a, c, g, or t
atacgactcgagcnngnacccgtatgcgtgtaccaacactaaattcaagctgtcattaatgaataacaacatgaaattcaaactgtcattattgaataacaacagaggagattaaaactgttcccaacttgcagttattacaaatgtgctaacaaacacaatttgtgttccttgccccttctaccgtcttggaaaaaaaagcaggttttttttttttgggtttctgttgggtaacaaagaatttatgctcaccaagttatatgatcttttctctgcctaactcttaagtgtcctacctaccatccttgtgcaggcttcctgggtgatctccccatcttcaggacattctctgagcctactccccaggtctttctacaactcgggtttttcttctgggcaccagccctgaagacctagccacttagagggcctctttttctgtctgttctcttggcctcgtaagtccatcatgtcatgacacctctttatctctaacctctgaacacccaagccaaaacctaagccatcccctactctcagtctccccttgtacacgcataagaggatcctgtagagtcaccgcagcaaga

SEQ ID NO: 389670 - DNA, 572 bp, Homo sapiens
  misc_feature (14)..(15): n is a, c, g, or t
  misc_feature (17)..(17): n is a, c, g, or t
atacgactcgagcnngnacccgtatgcgtgtaccaacactaaattcaagctgtcattaatgaataacaacatgaaattcaaactgtcattattgaataacaacagaggagattaaaactgttcccaacttgcagttattacaaatgtgctaacaaacacaatttgtgttccttgccccttctaccgtcttggaaaaaaaagcaggttttttttttttgggtttctgttgggtaacaaagaatttatgctcaccaagttatatgatcttttctctgcctaactcttaagtgtcctacctaccatccttgtgcaggcttcctgggtgatctccccatcttcaggacattctctgagcctactccccaggtctttctacaactcgggtttttcttctgggcaccagccctgaagacctagccacttagagggcctctttttctgtctgttctcttggcctcgtaagtccatcatgtcatgacacctctttatctctaacctctgaacacccaagccaaaacctaagccatcccctactctcagtctccccttggacacgagtgcctgctactttg

SEQ ID NO: 389671 - DNA, 405 bp, Homo sapiens
aaactcttattctttgatgcctatgacacagcttttctctgtgttgaattaattattaaattagtaatgactagttaatacagtctccacattgacatgaaatgtggttataattgagcaggcaaacttgagtctccaatagacattgctgtggaaaacaaagttgagatctagctaaaaccattggaactaacaggttgagattataacagtaaaatattcacttagctgctgttatttcaagtcttaaacactgaaattatgcgtgtaccaacactaaattcaagctgtcattaatgaataacaacatgaaattcaaactgtcattattgaataacaacagaggagattaaaactgttcccaacttgcagttattacaaatgtgctaacaaacacaatttgtg

SEQ ID NO: 389672 - DNA, 497 bp, Homo sapiens
gccaacgtccactcccacagccctcaatcaatgctgatagacatggaatcattatcgccaacgtccactcccacagcccctcaatcaatgctggtagacatggaatcattatcaccagtgtccagtcccacagcccctcaatcaatgctgatagacatggaatcacactcaccaatgttcatctcccaaagcccctcaatcaatgttgatagacatggaatcattatcaccaatgtccactcccacagcccctcaatcaatgctgatagacatggaatcatcttcaccaatgttaatctccttttgagtttcctacatcgtttagtcctccaagctagaaacctccatcagaagccatattgcacccctcccttcccacttcaaacaccagatcagttctcagagatgtcctgctaacccagaccgtcctgcacccaccctgctgtctctgccttgctgagctacctcatctgccctggatggtggcatggcctcct

SEQ ID NO: 389673 - DNA, 235 bp, Homo sapiens
ctgaagtaatatggaggaatttaatggttactcttagagatgtaatatttctttatttttcattctagcagccatcagaaaaaaaaatcacaaaaaatctattgcttgtacagtcctgtcatttgtgacctgggatattgtgctcttgggctgtcagaattccagtttatgaggcaatctgtgtcattctggtttagccaggtgagtagtcctctggctctgtagaaaagaacaa

SEQ ID NO: 389674 - DNA, 350 bp, Homo sapiens
agattagacatatgacccagcctggccaattagggattacagttccttggctatagtgattggttcaggattgagggcaagactcaatccattgagaggcagaacttttgtttgtactgtagaaaaatcaaaagctctcttatttctgctagcttggatgaatttaaaggatacatgctgaatggccatgcacagtggctcacatctgtaatcccagcactttgggaggcccaggtggatcacctgaggtcaagagttcgggaccagcctggccaacatggtaaaacttcatctctactaaaaatacaaaaaattagctgggcacggtggcgcatgcctgtagtcacagc

SEQ ID NO: 389675 - DNA, 182 bp, Homo sapiens
ccttggaagccgctgtgtcagagagaagatggagggcaacaggacccagtgggccgctgaggggtacctgcaacttggggagagggagacattgtatagcacctatagttttgcttaaaagccagtagagttgtaccttagaaaccaaccaaaagagaatctaactggagctgaggtggagc

SEQ ID NO: 389676 - DNA, 1264 bp, Homo sapiens
tgaacatcccgaaccagatttttaaatcccatttttgtttaatagggtaaaaataccatcaaaatgacttctcataccaaagaataagccatcatattttttcggtgttgaaacaacattgaaagtcagaattggatttgtttttaattctttatacggtttacataagcaatatctgtctctttaattattatgattaatgtcgtccttcagcatgagttctgtttcacaagttttgggccacctatttcaataaaaaataaaatataaattaaaaaagttgccgggggtggtggctcatgcctgtaatcccagcactttgggaggctgagggaggtagatcacctgaggtcagaagttcgagaccagccttaccaatatggtgaagccccatctctactaaaaatacaaaaattagccctgcatggtggcaggtgcctgtagtcccaggtactcgggaggctgagacaggagaatcgcttgaacctgggaggcggaggttgcagtgagccaagatctcgccactgcactccagcttgggcaatagcaagactccatctcaaaataaaataaaataaaacttagagcaaagtttaaaactgagtattcatattaagtgttttattttccatattagagatgggaagggaaccttatgtgtattttattttgttttcaaccatcaataaagttttctctagaatattgttttgaacatccttgtaaaagatttgcgagttaaactattttatttactgtctgtgagagcattgggagtaggaaacgatggactccaaagtacaagggagaatacccattttcattcagctatctggagtaaaatatcaagtacttccttcaactaatcttgtctcattcactcaccttttgatatcgaaggcagaaattgcgtttacaacactgaagaccaaagctttttaattagtaaacaagcggaacatagataatggacaatgctggccactgccattctgtgttcagaaagactatgagacctgaacatatggccaagaggaaagaagagtgacgttgtctaagatgtaatgagtgctctctgagagaatcactcaattcctattggagtgcaatccttacttgagaactttattactcttgttctgtgtagttttttttttttgtcacttccccatcagaaaagcatattctttttgatagagggtcagtgttataaataattgtcttttgaaataaaatcaaatattcatgcattgaaaatcttaaa

SEQ ID NO: 389677 - DNA, 475 bp, Homo sapiens
tggctccggctccgcacatcccgcttccgagtcctgacctgggacccacctcgtcctgactccaagctgcacacttgtctttctgccaaccccctctcccctcaccgccctcctgcgctcttccgtgtcacctccccagcttccctttctcttccctttttctctcaggggcctttctggtcttcctccacccacgcttaaagcagccaccctcccgctcctcgaatagcagcaccccgcgatttgccacagatcgttgtccacctctcccttcgtctctcctgcctcgcttcccctccgcccgcaccggttctgccagtctctgggttatcaccctcagggtccttgccctggactgcgctctcgatccctggccccttgcagttcccccagctttttctaccctgcttcttcgttttccaaattgtgctctccctcttgcttgcaacccaccagctccaccctcatcaccttt

SEQ ID NO: 389678 - DNA, 343 bp, Homo sapiens
tggctccggctccgcacatcccgcttccgagtcctgacctgggacccacctcgtcctgactccaagctgcacacttgtctttctgccaaccccctctcccctcaccgccctcctgcgctcttccgtgtcacctccccagcttccctttctcttccctttttctctcaggggcctttctggtcttcctccacccacgcttaaagcagccaccctcccgctcctcgaatagcagcaccccgcgatttgccacagatcgttgtccacctctcccttcgtctctcctgcctcgcttcccctccgcccacctctcatgtctctaccgtgccagcaaaagcgacggaca

SEQ ID NO: 389679 - DNA, 335 bp, Homo sapiens
cggtcgctctagacggatcccctcgctggggcctttctggtcttcctccacccacgcttaaagcagccaccctcccgctcctcgaatagcagcaccccgcgatttgccacagatcgttgtccacctctcccttcgtctctcctgcctcgcttcccctccgcccgcaccggttctgccagtctctgggttatcaccctcagggtccttgccctggactgcgctctcgatccctggccccttgcagttcccccagctttttctaccctgcttcttcgttttccaaattgtgctctccctcttgcttgcaacccaccagctccaccctcatcaccttt

SEQ ID NO: 389680 - DNA, 348 bp, Homo sapiens
gtatcctgggaaatggggccccttgagtcttatcaaaagaagtgagaggggccgggcgcggtggctcacgcctgtaatcccagcactttgggaggccgaggcgggtggatcatgaggtccggagatcgagaccatcctggctaacaaggtgaaaccccgtctctactaaaaatacaaaaaattagccgggcgcggtggcgggcgcctgtagtcccagctactggggaggctgaggcaggagaatggcgtgaacccgggaagcggagcttgcagtgagccgagattgcgccactgcagtccgcagtccggtctgggcgacagagcgagactccgtctcaaaaaaaaaaa

SEQ ID NO: 389681 - DNA, 393 bp, Homo sapiens
gactactactactactaaaaaagcggccgcgtcgacaagaaacggctggacccaactattatgctgaattattgctagctctgagtggtttaaaggattaattatgttattaattacataacgtaaaagtgagtggtgaggttgggcatggtggctcacgcctgtaatcccagcactttggaaggccaaggcaggcggatcacttgaggtcaggaattcatgaccagcctaaccaacgtggcgaaaccctgtctctactaaaaatacattagccaggcatgttggcacgtgcctgtaatcccaggcactcaggaggttgaggcaggagaatcgctctgggagacggaggttgcagtaagctgagatcatgccactgcactccagcctgggtga

SEQ ID NO: 389682 - DNA, 383 bp, Homo sapiens
gttgggagcagcgcccgagtgccctgagagcaggaagaaggctcaggggctcagtgtgctcactggccgggccgagtgggactggaaggaaatcagtgcgagaactcaggcaggaagcggagagccccgctgcatggccctgccaggccaccagtgcactgagtactcagcagatggttcctaggccttgtgtgacctagggtcagacgccttggtgtctctcttggagggctgcacagggtgcggagagaagcttgacagctgcagtatcgggtgatctatgatgtgactaagggcaggccgtaaaattaggtggcatgtagggaaggcttcctataggagggcacaccaggatgggtgtcgtagtttagctggattccatc

SEQ ID NO: 389683 - DNA, 695 bp, Homo sapiens
caagggattcttcccatgctctgccatggctgcctctggtaccctccccctgccttgagatgtcacctctgatgtgtctgggtccccagctggcttacaagctcttgtgacatcagtggcacattttgtggcactgcatttagaaaactgtaaagctggtatatgcactagagatctgtccttcattttcttcattttgtatttaatgctgtcctaactccacaaaatagagacctggaaatgtcaacaattggatatagtataagaattttaaaagtagattttaaaagcacaaaggcaaatttaagttcaatattatggataatgcagtattctgtatttagtagcaatgagatctttcagacctttctttattttgaaatatattatcttctaaggagtgtaagaaagatagcctctgtctaaaccaggggcatgaaaattacatcctctaggaatttgaggaaacattgcagagggcatttgactgcctggagtctgtcggaaagataaggctttatatgcttcagtaatatcctagagcaaaataacagccactgttgagcactgatttatgtaacaccccagtgtaccgggcactattgtatatgataccccagcgaaatagatattattaccatcttcgttcccaggattataaagttgagaacaagaacagtggggtaactcgtcca

SEQ ID NO: 389684 - DNA, 286 bp, Homo sapiens
agatgattgagattgtaccacgtagaagttgtattttgctgttcatgatgacccattgcagcagtaacttaggagggtcagaactgatatttattgttggtgtttataaatcagtggcttctcaaatgactttccttttatagctactatgtagaatctatgtacagagctgagcaatagccaacgcaaagagatggggaggtggcttaagtatgataagttctggtgagtcatactaaggacatttttggccagtgcagtggcttatgcctgtaatcccaatact

SEQ ID NO: 389685 - DNA, 675 bp, Homo sapiens
actaccccccaaccccacccaccaggagcgcctgaccagggaggggctgaggaaggagggggggcagcctcaggatccaggctgccccagggacaatcccgccaagtctaccccgtggatctccttgtccaaacagtccccaatgtagcgactcttcctttaggacctgaggtgggaggatcactcgagcctgggaggttgaggctgcagtgagccaagacggcaccactgcacccttgacctcccaggctcaaggttctcagattctcaggccccaccctggggaaggatggaggatgaggacaagcttcccaggtccacatgacagagggactcaggattggcaatttggcctgtgtccagctttgttgctcagagagctcagatccccaccctcaattcactcccttgtgtggaagggagtgacccttactttctagcacacacagggaagagggcttggctaagagcacccaggaggtcagggcaggactggggattagatcacacccaaatgcaagctctgtggcactcctggtatagccctgctgtccccctgtagcctggccctgggaggggggctcccagacttcacaccccctcacctctttatccaggggaccggctctctcttcctccttcatccccagcctctgccagggcagggtagttcct

SEQ ID NO: 389686 - DNA, 322 bp, Homo sapiens
cacagccagtagtgtgggacgcccttttggtggtgcccaggctgaacttcaagtgacacctggtccctgaaaccccagtagcagggtgagtccctggtcctttcagttctgaacacaacgaggagaaaggctcacctgggtgctgtttggtttccacacctccctagacttgccagtatctctcagacagggagggcaggtcaacagcctgtacctcgttcagtttttgcaagactgttttgagttcattgtatttattgttacaattcccttattacaaggtagcaagtgaatcatgttagctcagggtggggcaatgact

SEQ ID NO: 389687 - DNA, 1082 bp, Homo sapiens
ctttcttttgagttactatatatctttcaagataaacctcttggttaacctttcttttcatctcctgtggtgttctttcaaggttaaatttgagaaaatggagtagcgtagaacatagtatgcagcagttctctactacaagttttaggggccatgctagtcaggatgttgttggttcctttgttttctggtattagtttttagaagcccctcattaatccatactatctttaaggatgttagtaacctcatcgtatagaatttctgcattctaaaggaaacataagcttgtttcagtacactcacgctgtagattaattctgatattacatatctccatcagactttgtaccctctctcttccatcccttacccttaccgattaggttggtattacctaaaaatccatagaaaatgtccaggtgaattgccttatgctttctaccccataaggtataattctagaccagatcggttatgagaggctctattccagtctgcacctgctaagaatttgaatctattttagtaccaatcttggagttcttgtttggctctactcttagccaaccccacagagtctaaaattggatctgaatccagtatttgccagccagtgacagacataaactaggttctttataaatgtttcatgaattgacctgcatccctgcattgattcaggatcttattgtccattgggaaggaagatttacttagctaggagtaacaattcccaaatttgccctagttgcaatatttttttaccaagggtacatacaagtcaggttcacttctgaaagtaaggaaacacaggatagcattcacttgatgatcataacacagtctgggtatacatatgtgtttgtgtgtatacatttaaaaaaaaggtcgtttatatttggttttggaatcaacttttgaatttgtctaaacttgttaagaatttacaagttctatttaaagatatctgggccagaaaccagaaccacttgtgtttaaatactattgctattctgtacacagctcaaggttctggtattttctcttaagcattcctcttctccccttccaccaaaaaa

SEQ ID NO: 389688 - DNA, 883 bp, Homo sapiens
ctttcttttgagttactatatatctttcaagataaacctcttggttaacctttcttttcatctcctgtggtgttctttcaaggttaaatttgagaaaatggagtagcgtagaacatagtatgcagcagttctctactacaagttttaggggccatgctagtcaggatgttgttggttcctttgttttctggtattagtttttagaagcccctcattaatccatactatctttaaggatgttagtaacctcatcgtatagaatttctgcattctaaaggaaacataagcttgtttcagtacactcacgctgtagattaattctgatattacatatctccatcagactttgtaccctctctcttccatcccttacccttaccgattaggttggtattacctaaaaatccatagaaaatgtccaggtgaattgccttatgctttctaccccataaggtataattctagaccagatcggttatgagaggctctattccagtctgcacctgctaagaatttgaatctattttagtaccaatcttggagttcttgtttggctctactcttagccaaccccacagagtctaaaattggatctgaatccagtatttgccagccagtgacagacataaactaggttctttataaatgtttcatgaattgacctgcatccctgcattgattcaggatcttattgtccattgggaaggaagatttacttagctaggagtaacaattcccaaatttgccctagttgcaatatttttttaccaagggtacatacaagtcaggttcacttctgaaagtaaggaaacacaggagtgaacctgacttgtatgtacccttggtaaaaaaatattgcaactagggcaaatttgggaattgt

SEQ ID NO: 389689 - DNA, 310 bp, Homo sapiens
catcatttgggagggcctggaaggacagccttattttaggaatggacctgagttaagaatgaaatagaaggtgaggaagtggagatagcaagtttgaacaagtcattcaagagatttagctacaaacagtaggcagaatataatgcagcaactaaagtagcctgcgttaagagagggtttttgtttctttgtttatgatggacatgacacactcatgtctaataggagggtctgcaatttccagttcagggccttttggctcatgccagcacccttgacaaagtactagcacagttgatatgccaggaac

SEQ ID NO: 389690 - DNA, 3722 bp, Homo sapiens
ctcgtccgatcctgcgagggccgctaggagcgagtcacggcgcggggccgctctggtcgcccgcgagtgtcggtggccccgccccgcccgcagccgcgggtggagaccgaggacggcgccggcgcgtgcgcgctccctcggtgcggcgggctgcgtgcgcgagtgggaggtggcaggcctgcgactccggccttgtccgcgcccgctctcggcgcgacgtctccagccatgaaccggtttggtacccggttggtgggagccacggcgacttcttcgccgccgccgaaggcccgcagcaatgaaaacctcgacaaaatagatatgtctttggatgatatcatcaagttgaatcgaaaggaagggaagaagcagaattttccaagactaaatagaagactcctccagcaaagtggtgcccagcaattcaggatgagagtgcgatggggaatccaacagaattctggttttggtaagactagtctgaatcatagaggaagagtaatgcctggaaagagacgtcctaatggagttatcactggccttgcagctaggaaaacgactggaattcgaaaaggaattagtcctatgaatcgtccacctctaagtgacaagaatatagaacaatattttccagtgttaaaaaggaaggcaaaccttctgagacaaaatgaagggcagaggaaaccagtagcagttctcaagagacctagccagctaagcagaaaaaataacattccagctaattttaccaggagtggaaataaattaaatcatcagaaagatactcgtcaggcaacttttcttttcagaagaggcctgaaggtgcaggcccagttgaatacagaacaactgctagacgatgtagtagcaaagagaactcgtcaatggcggacttccaccacaaatggagggattttgactgtatctattgacaatcctggagcagtgcaatgcccagtaactcagaaaccacgattaactcgtactgctgtaccttcatttttaacaaagcgggagcaaagtgacgtcaagaaagttcctaaaggtgttcccctgcagtttgacataaacagtgtcggaaaacagacagggatgacgttgaatgagcggtttgggatcctgaaggaacaaagagccactctcacatacaacaaagggggaagccgctttgtcaccgtgggataggtcccatgtcaaaggaacttttgagtgatgactctgagaagttgaattgcttgaagagttcatcacggaaattcaagaaactttacttcaaaatattcacaaggctaaataactcttatttttatttttgaaggtttttttttttaaaaaaaaaaacgtataaaataatgccctgaaagaataatagggattatacctgtctgttcttaaagatttcatggttggctcagacagaacaatcatctgtttgacttctttggttcctcatgcagcagaaggaagacagaaagatagaaattgattatttttatgatagcggtattcaggatctcatcacctttgcccgtgttttagactttgtcatggtaaatcctggtcttcataaacatgagtaggtcccttggttgctgtcacttgccctttaatagtgttgatgtagtcagtgccgttgccttttcttcattagagacacagaacaatgtattagaatttccagctgtgggtttgaagacttagggggacatccagaacgtgcttcctctttcagacggtgtaaagtcccctggaattacacagctttagtgctgagcttttaacaggaaatgtggccctaggtattagtcttagtttaaaatgttggtgtttagagactgtaaatgcatattcacaaagttatctgatagggccttggaggagaaggtccagttttaaaaaatgacagtttgtgtttaataaatgaaggcatgagaggaagtaagtagcaagttgaaggacaggtagttgagatgaaacacttcaaaaccctggttatagatgtactgtttggatgtagcatagtcttgagtctagcgtccacaaagaattattcaaatgatatttagaagaattataactattacattgaatggagtcccttggatattttgatagtaaaattaatagccataaagtcctagacttcttatttgaagttaaaatttcttatttgaaaagttgaaatttatgagctttgaagattgctaaattaaataatttatagctccaaaaacaaaaatatacttgtatatgtcacagagaaaaaaaatgcaaaatttataatagagttacattaaccttgttgtttacctttcactgatttcttatatggtataaattaaagttcaggcatttatggggagaaaaggccctccccaccgacccgccacctgccacctctgacggagtgggagaagttagtctgtgctaagatagtactgagtccccagatgttgtatactgtaaattacagtataatgccaaatgcagcaaaatcttccagctgtacgttacaagtttggtcattttgaagcttgacattttagtttgccattatgttaaaaacatctaaataggtgttagtttctcaggagtagattgttagtgttgacttttcctgtaaagcagacatcgttcttggcctgccctgcattgtatactagatttcattgttgtctctcatgcttcttgagttgcttcatggtttatgctcgccatggaaagctatcagtaacagtttcatgcttataccaaagaattaaatctgatctttaatatctgatattttcctggtactcgtactgataagggattattggaagtcagtcacagaatttggaaataaattctagtctctccttagctatttgatgcttttcatataggccaagaactcattgcaaaacatttttgcaaggatgaatgcctgtatttggtctaggaacagtacattttagtctgatttagaattactggtagcttattttaaagcaaggaaaagcagctgagctcaagtttgctgtctttagaatggtttgtgaaaatatggtataaaggtgttttcattttcctgttcttacctattattgtatagagctattcatgccattttttgggaaaactttaaaaattgccccaaatactgacattgagtgcattaaataacaaattatctttgatacattaaacttttattcttcatgcatctgtaatttaattttaagtataatgttttgcctttggtacaactaaattaaaactcttggtggtcacatattgtatataaacaaaacaatatgctttgttgaaggaaaattttctttattggaatgtggttgtaatccttgttcagttcttaagtttcggttttttttaaaaacaggatgcaacttaaacttttctttgcatcaaggtatatgcaaaacattggtgccgtgcatcaccaaatgaaagtttgtatttaacgaggaggtgctttacactgtactttttggtgttttttggaaaagttacatttagatctattctgaagctgttcatttttaacaaataaaatgttacaggtttcacatgatttattctcagctctaaagattgagttgtggtttttagattgttctatgttacgaagaactttgtagtggttatctatatttgtagtttttagggtgtgaaaccttatctactagcaaaattggtaaatcactgtagactcttctatt

SEQ ID NO: 389691 - DNA, 3574 bp, Homo sapiens
ctcgtccgatcctgcgagggccgctaggagcgagtcacggcgcggggccgctctggtcgcccgcgagtgtcggtggccccgccccgcccgcagccgcgggtggagaccgaggacggcgccggcgcgtgcgcgctccctcggtgcggcgggctgcgtgcgcgagtgggaggtggcaggcctgcgactccggccttgtccgcgcccgctctcggcgcgacgtctccagccatgaaccggtttggtacccggttggtgggagccacggcgacttcttcgccgccgccgaaggcccgcagcaatgaaaacctcgacaaaatagatatgtctttggatgatatcatcaagttgaatcgaaaggaagggaagaagcagaattttccaagactaaatagaagactcctccagcaaagtggtgcccagcaattcaggatgagagtgcgatggggaatccaacagaattctggttttggtaagactagtctgaatcatagaggaagagtaatgcctggaaagagacgtcctaatggagttatcactggccttgcagctaggaaaacgactggaattcgaaaaggaattagtcctatgaatcgtccacctctaagtgacaagaatatagaacaatattttccagtgttaaaaaggaaggcaaaccttctgagacaaaatgaagggcagaggaaaccagtagcagttctcaagagacctagccagctaagcagaaaaaataacattccagctaattttaccaggagtggaaataaattaaatcatcagaaagatactcgtcaggcaacttttcttttcagaagaggcctgaaggtgcaggcccagttgaatacagaacaactgctagacgatgtagtagcaaagagaactcgtcaatggcggacttccaccacaaatggagggattttgactgtatctattgacaatcctggagcagtgcaatgcccagtaactcagaaaccacgattaactcgtactgctgtaccttcatttttaacaaagcgggagcaaagtgacgtcaagaaagttcctaaaggtgttcccctgcagtttgacataaacagtgtcggaaaacagacagggatgacgttgaatgagcggtttgggatcctgaaggaacaaagagccactctcacatacaacaaagggggaagccgctttgtcaccgtgggataggtcccatgtcaaaggaacttttgagtgatgactctgagaagttgaattgcttgaagagttcatcacggaaattcaagaaactttacttcaaaatattcacaaggctaaataactcttatttttatttttgaaggtttttttttttaaaaaaaaaaacgtataaaataatgccctgaaagaataatagggattatacctgtctgttcttaaagatttcatggttggctcagacagaacaatcatctgtttgacttctttggttcctcatgcagcagaaggaagacagaaagatagaaattgattatttttatgatagcggtattcaggatctcatcacctttgcccgtgttttagactttgtcatggtaaatcctggtcttcataaacatgagtaggtcccttggttgctgtcacttgccctttaatagtgttgatgtagtcagtgccgttgccttttcttcattagagacacagaacaatgtattagaatttccagctgtgggtttgaagacttagggggacatccagaacgtgcttcctctttcagacggtgtaaagtcccctggaattacacagctttagtgctgagcttttaacaggaaatgtggccctaggtattagtcttagtttaaaatgttggtgtttagagactgtaaatgcatattcacaaagttatctgatagggccttggaggagaaggtccagttttaaaaaatgacagtttgtgtttaataaatgaaggcatgagaggaagtaagtagcaagttgaaggacaggtagttgagatgaaacacttcaaaaccctggttatagatgtactgtttggatgtagcatagtcttgagtctagcgtccacaaagaattattcaaatgatatttagaagaattataactattacattgaatggagtcccttggatattttgatagtaaaattaatagccataaagtcctagacttcttatttgaagttaaaatttcttatttgaaaagttgaaatttatgagctttgaagattgctaaattaaataatttatagctccaaaaacaaaaatatacttgtatatgtcacagagaaaaaaaatgcaaaatttataatagagttacattaaccttgttgtttacctttcactgatttcttatatggtataaattaaagttcaggcatttatggggagaaaaggccctccccaccgacccgccacctgccacctctgacggagtgggagaagttagtctgtgctaagatagtactgagtccccagatgttgtatactgtaaattacagtataatgccaaatgcagcaaaatcttccagctgtacgttacaagtttggtcattttgaagcttgacattttagtttgccattatgttaaaaacatctaaataggtgttagtttctcaggagtagattgttagtgttgacttttcctgtaaagcagacatcgttcttggcctgccctgcattgtatactagatttcattgttgtctctcatgcttcttgagttgcttcatggtttatgctcgccatggaaagctatcagtaacagtttcatgcttataccaaagaattaaatctgatctttaatatctgatattttcctggtactcgtactgataagggattattggaagtcagtcacagaatttggaaataaattctagtctctccttagctatttgatgcttttcatataggccaagaactcattgcaaaacatttttgcaaggatgaatgcctgtatttggtctaggaacagtacattttagtctgatttagaattactggtagcttattttaaagcaaggaaaagcagctgagctcaagtttgctgtctttagaatggtttgtgaaaatatggtataaaggtgttttcattttcctgttcttacctattattgtatagagctattcatgccattttttgggaaaactttaaaaattgccccaaatactgacattgagtgcattaaataacaaattatctttgatacattaaacttttattcttcatgcatctgtaatttaattttaagtataatgttttgcctttggtacaactaaattaaaactcttggtggtcacatattgtatataaacaaaacaatatgctttgttgaaggaaaattttctttattggaatgtggttgtaatccttgttcagttcttaagtttcggttttttttaaaaacaggatgcaacttaaacttttctttgcatcaaggtatatgcaaaacattggtgccgtgcatcaccaaatgaaagtttgtatttaacgaggaggtgctttacactgtactttttggtgttttttggaaaagttacatttagatctattctgaagctgttcatttttaacaaataaaatgttacaggtttcacatga

SEQ ID NO: 389692 - DNA, 611 bp, Homo sapiens
ctcgtccgatcctgcgagggccgctaggagcgagtcacggcgcggggccgctctggtcgcccgcgagtgtcggtggccccgccccgcccgcagccgcgggtggagaccgaggacggcgccggcgcgtgcgcgctccctcggtgcggcgggctgcgtgcgcgagtgggaggtggcaggcctgcgactccggccttgtccgcgcccgctctcggcgcgacgtctccagccatgaaccggtttggtacccggttggtgggagccacggcgacttcttcgccgccgccgaaggcccgcagcaatgaaaacctcgacaaaatagatatgtctttggatgatatcatcaagttgaatcgaaaggaagggaagaagcagaattttccaagactaaatagaagactcctccagcaaagtggtgcccagcaattcaggatgagagtgcgatggggaatccaacagaattctgacacaaaaactttggagtcctcaattgttaagcatatgaagaggttcgtgcttgtaatcccagcactttgggaggtgagagcaagaggattgcttaagccaaggacttcaggaccagcgtgggcaacatagggagaccccgtctctac

SEQ ID NO: 389693 - DNA, 3334 bp, Homo sapiens
ggcgtatccttattcacccccgtgacattacacgctggggaccgaactcagtccgagatgtagactaggcaataacgctaatctaatcccgatgatatcatcaagttgaatcgaaaggaagggaagaagcagaattttccaagactaaatagaagactcctccagcaaagtggtgcccagcaattcaggatgagagtgcgatggggaatccaacagaattctggttttggtaagactagtctgaatcatagaggaagagtaatgcctggaaagagacgtcctaatggagttatcactggccttgcagctaggaaaacgactggaattcgaaaaggaattagtcctatgaatcgtccacctctaagtgacaagaatatagaacaatattttccagtgttaaaaaggaaggcaaaccttctgagacaaaatgaagggcagaggaaaccagtagcagttctcaagagacctagccagctaagcagaaaaaataacattccagctaattttaccaggagtggaaataaattaaatcatcagaaagatactcgtcaggcaacttttcttttcagaagaggcctgaaggtgcaggcccagttgaatacagaacaactgctagacgatgtagtagcaaagagaactcgtcaatggcggacttccaccacaaatggagggattttgactgtatctattgacaatcctggagcagtgcaatgcccagtaactcagaaaccacgattaactcgtactgctgtaccttcatttttaacaaagcgggagcaaagtgacgtcaagaaagttcctaaaggtgttcccctgcagtttgacataaacagtgtcggaaaacagacagggatgacgttgaatgagcggtttgggatcctgaaggaacaaagagccactctcacatacaacaaagggggaagccgctttgtcaccgtgggataggtcccatgtcaaaggaacttttgagtgatgactctgagaagttgaattgcttgaagagttcatcacggaaattcaagaaactttacttcaaaatattcacaaggctaaataactcttatttttatttttgaaggtttttttttttaaaaaaaaaaacgtataaaataatgccctgaaagaataatagggattatacctgtctgttcttaaagatttcatggttggctcagacagaacaatcatctgtttgacttctttggttcctcatgcagcagaaggaagacagaaagatagaaattgattatttttatgatagcggtattcaggatctcatcacctttgcccgtgttttagactttgtcatggtaaatcctggtcttcataaacatgagtaggtcccttggttgctgtcacttgccctttaatagtgttgatgtagtcagtgccgttgccttttcttcattagagacacagaacaatgtattagaatttccagctgtgggtttgaagacttagggggacatccagaacgtgcttcctctttcagacggtgtaaagtcccctggaattacacagctttagtgctgagcttttaacaggaaatgtggccctaggtattagtcttagtttaaaatgttggtgtttagagactgtaaatgcatattcacaaagttatctgatagggccttggaggagaaggtccagttttaaaaaatgacagtttgtgtttaataaatgaaggcatgagaggaagtaagtagcaagttgaaggacaggtagttgagatgaaacacttcaaaaccctggttatagatgtactgtttggatgtagcatagtcttgagtctagcgtccacaaagaattattcaaatgatatttagaagaattataactattacattgaatggagtcccttggatattttgatagtaaaattaatagccataaagtcctagacttcttatttgaagttaaaatttcttatttgaaaagttgaaatttatgagctttgaagattgctaaattaaataatttatagctccaaaaacaaaaatatacttgtatatgtcacagagaaaaaaaatgcaaaatttataatagagttacattaaccttgttgtttacctttcactgatttcttatatggtataaattaaagttcaggcatttatggggagaaaaggccctccccaccgacccgccacctgccacctctgacggagtgggagaagttagtctgtgctaagatagtactgagtccccagatgttgtatactgtaaattacagtataatgccaaatgcagcaaaatcttccagctgtacgttacaagtttggtcattttgaagcttgacattttagtttgccattatgttaaaaacatctaaataggtgttagtttctcaggagtagattgttagtgttgacttttcctgtaaagcagacatcgttcttggcctgccctgcattgtatactagatttcattgttgtctctcatgcttcttgagttgcttcatggtttatgctcgccatggaaagctatcagtaacagtttcatgcttataccaaagaattaaatctgatctttaatatctgatattttcctggtactcgtactgataagggattattggaagtcagtcacagaatttggaaataaattctagtctctccttagctatttgatgcttttcatataggccaagaactcattgcaaaacatttttgcaaggatgaatgcctgtatttggtctaggaacagtacattttagtctgatttagaattactggtagcttattttaaagcaaggaaaagcagctgagctcaagtttgctgtctttagaatggtttgtgaaaatatggtataaaggtgttttcattttcctgttcttacctattattgtatagagctattcatgccattttttgggaaaactttaaaaattgccccaaatactgacattgagtgcattaaataacaaattatctttgatacattaaacttttattcttcatgcatctgtaatttaattttaagtataatgttttgcctttggtacaactaaattaaaactcttggtggtcacatattgtatataaacaaaacaatatgctttgttgaaggaaaattttctttattggaatgtggttgtaatccttgttcagttcttaagtttcggttttttttaaaaacaggatgcaacttaaacttttctttgcatcaaggtatatgcaaaacattggtgccgtgcatcaccaaatgaaagtttgtatttaacgaggaggtgctttacactgtactttttggtgttttttggaaaagttacatttagatctattctgaagctgttcatttttaacaaataaaatgttacaggtttcacatga

SEQ ID NO: 389694 - DNA, 2178 bp, Homo sapiens
tctagaggatcccggtcattttcaacaatcatctgtttgacttctttggttcctcatgcagcagaaggaagacagaaagatagaaattgattatttttatgatagcggtattcaggatctcatcacctttgcccgtgttttagactttgtcatggtaaatcctggtcttcataaacatgagtaggtcccttggttgctgtcacttgccctttaatagtgttgatgtagtcagtgccgttgccttttcttcattagagacacagaacaatgtattagaatttccagctgtgggtttgaagacttagggggacatccagaacgtgcttcctctttcagacggtgtaaagtcccctggaattacacagctttagtgctgagcttttaacaggaaatgtggccctaggtattagtcttagtttaaaatgttggtgtttagagactgtaaatgcatattcacaaagttatctgatagggccttggaggagaaggtccagttttaaaaaatgacagtttgtgtttaataaatgaaggcatgagaggaagtaagtagcaagttgaaggacaggtagttgagatgaaacacttcaaaaccctggttatagatgtactgtttggatgtagcatagtcttgagtctagcgtccacaaagaattattcaaatgatatttagaagaattataactattacattgaatggagtcccttggatattttgatagtaaaattaatagccataaagtcctagacttcttatttgaagttaaaatttcttatttgaaaagttgaaatttatgagctttgaagattgctaaattaaataatttatagctccaaaaacaaaaatatacttgtatatgtcacagagaaaaaaaatgcaaaatttataatagagttacattaaccttgttgtttacctttcactgatttcttatatggtataaattaaagttcaggcatttatggggagaaaaggccctccccaccgacccgccacctgccacctctgacggagtgggagaagttagtctgtgctaagatagtactgagtccccagatgttgtatactgtaaattacagtataatgccaaatgcagcaaaatcttccagctgtacgttacaagtttggtcattttgaagcttgacattttagtttgccattatgttaaaaacatctaaataggtgttagtttctcaggagtagattgttagtgttgacttttcctgtaaagcagacatcgttcttggcctgccctgcattgtatactagatttcattgttgtctctcatgcttcttgagttgcttcatggtttatgctcgccatggaaagctatcagtaacagtttcatgcttataccaaagaattaaatctgatctttaatatctgatattttcctggtactcgtactgataagggattattggaagtcagtcacagaatttggaaataaattctagtctctccttagctatttgatgcttttcatataggccaagaactcattgcaaaacatttttgcaaggatgaatgcctgtatttggtctaggaacagtacattttagtctgatttagaattactggtagcttattttaaagcaaggaaaagcagctgagctcaagtttgctgtctttagaatggtttgtgaaaatatggtataaaggtgttttcattttcctgttcttacctattattgtatagagctattcatgccattttttgggaaaactttaaaaattgccccaaatactgacattgagtgcattaaataacaaattatctttgatacattaaacttttattcttcatgcatctgtaatttaattttaagtataatgttttgcctttggtacaactaaattaaaactcttggtggtcacatattgtatataaacaaaacaatatgctttgttgaaggaaaattttctttattggaatgtggttgtaatccttgttcagttcttaagtttcggttttttttaaaaacaggatgcaacttaaacttttctttgcatcaaggtatatgcaaaacattggtgccgtgcatcaccaaatgaaagtttgtatttaacgaggaggtgctttacactgtactttttggtgttttttggaaaagttacatttagatctattctgaagctgttcatttttaacaaataaaatgttacaggtttcacatga

SEQ ID NO: 389695 - DNA, 3205 bp, Homo sapiens
ctcgtccgatcctgcgagggccgctaggagcgagtcacggcgcggggccgctctggtcgcccgcgagtgtcggtggccccgccccgcccgcagccgcgggtggagaccgaggacggcgccggcgcgtgcgcgctccctcggtgcggcgggctgcgtgcgcgagtgggaggtggcaggcctgcgactccggccttgtccgcgcccgctctcggcgcgacgtctccagccatgaaccggtttggtacccggttggtgggagccacggcgacttcttcgccgccgccgaaggcccgcagcaatgaaaacctcgacaaaatagatatgtctttggatgatatcatcaagttgaatcgaaaggaagggaagaagcagaattttccaagactaaatagaagactcctccagcaaagtggtgcccagcaattcaggatgagagtgcgatggggaatccaacagaattctggttttggtaagactagtctgaatcatagaggaagagtaatgcctggaaagagacgtcctaatggagttatcactggccttgcagctaggaaaacgactggaattcgaaaaggaattagtcctatgaatcgtccacctctaagtgacaagaatatagaacaatattttccagtgttaaaaaggaaggcaaaccttctgagacaaaatgaagggcagaggaaaccagtagcagttctcaagagacctagccagctaagcagaaaaaataacattccagctaattttaccaggagtggaaataaattaaatcatcagaaagatactcgtcaggcaacttttcttttcagaagaggcctgaaggtgcaggcccagttgaatacagaacaactgctagacgatgtagtagcaaagagaactcgtcaatggcggacttccaccacaaatggagggattttgactgtatctattgacaatcctggagcagtgcaatgcccagtaactcagaaaccacgattaactcgtactgctgtaccttcatttttaacaaagcgggagcaaagtgacgtcaagaaagttcctaaaggtgttcccctgcagtttgacataaacagtgtcggaaaacagacagggatgacgttgaatgagcggtttgggatcctgaaggaacaaagagccactctcacatacaacaaagggggaagccgctttgtcaccgtgggataggtcccatgtcaaaggaacttttgagtgatgactctgagaagttgaattgcttgaagagttcatcacggaaattcaagaaactttacttcaaaatattcacaaggctaaataactcttatttttatttttgaaggtttttttttttaaaaaaaaaaacgtataaaataatgccctgaaagaataatagggattatacctgtctgttcttaaagatttcatggttggctcagacagaacaatcatctgtttgacttctttggttcctcatgcagcagaaggaagacagaaagatagaaattgattatttttatgatagcggtattcaggatctcatcacctttgcccgtgttttagactttgtcatggtaaatcctggtcttcataaacatgagtaggtcccttggttgctgtcacttgccctttaatagtgttgatgtagtcagtgccgttgccttttcttcattagagacacagaacaatgtattagaatttccagctgtgggtttgaagacttagggggacatccagaacgtgcttcctctttcagacggtgtaaagtcccctggaattacacagctttagtgctgagcttttaacaggaaatgtggccctaggtattagtcttagtttaaaatgttggtgtttagagactgtaaatgcatattcacaaagttatctgatagggccttggaggagaaggtccagttttaaaaaatgacagtttgtgtttaataaatgaaggcatgagaggaagtaagtagcaagttgaaggacaggtagttgagatgaaacacttcaaaaccctggttatagatgtactgtttggatgtagcatagtcttgagtctagcgtccacaaagaattattcaaatgatatttagaagaattataactattacattgaatggagtcccttggatattttgatagtaaaattaatagccataaagtcctagacttcttatttgaagttaaaatttcttatttgaaaagttgaaatttatgagctttgaagattgctaaattaaataatttatagctccaaaaacaaaaatatacttgtatatgtcacagagaaaaaaaatgcaaaatttataatagagttacattaaccttgttgtttacctttcactgatttcttatatggtataaattaaagttcaggcatttatggggagaaaaggccctccccaccgacccgccacctgccacctctgacggagtgggagaagttagtctgtgctaagatagtactgagtccccagatgttgtatactgtaaattacagtataatgccaaatgcagcaaaatcttccagctgtacgttacaagtttggtcattttgaagcttgacattttagtttgccattatgttaaaaacatctaaataggtgttagtttctcaggagtagattgttagtgttgacttttcctgtaaagcagacatcgttcttggcctgccctgcattgtatactagatttcattgttgtctctcatgcttcttgagttgcttcatggtttatgctcgccatggaaagctatcagtaacagtttcatgcttataccaaagaattaaatctgatctttaatatctgatattttcctggtactcgtactgataagggattattggaagtcagtcacagaatttggaaataaattctagtctctccttagctatttgatgcttttcatataggccaagaactcattgcaaaacatttttgcaaggatgaatgcctgtatttggtctaggaacagtacattttagtctgatttagaattactggtagcttattttaaagcaaggaaaagcagctgagctcaagtttgctgtctttagaatggtttgtgaaaatatggtataaaggtgttttcattttcctgttcttacctattattgtatagagctattcatgccattttttgggaaaactttaaaaattgccccaaatactgacattgagtgcattaaataacaaattatctttgatacattaaacttttattcttcatgca

SEQ ID NO: 389696 - DNA, 2011 bp, Homo sapiens
cagcgtacactgatggcagtgaatggtagtgtcgatttgccctttaatagtgttgatgtagtcagtgccgttgccttttcttcattagagacacagaacaatgtattagaatttccagctgtgggtttgaagacttagggggacatccagaacgtgcttcctctttcagacggtgtaaagtcccctggaattacacagctttagtgctgagcttttaacaggaaatgtggccctaggtattagtcttagtttaaaatgttggtgtttagagactgtaaatgcatattcacaaagttatctgatagggccttggaggagaaggtccagttttaaaaaatgacagtttgtgtttaataaatgaaggcatgagaggaagtaagtagcaagttgaaggacaggtagttgagatgaaacacttcaaaaccctggttatagatgtactgtttggatgtagcatagtcttgagtctagcgtccacaaagaattattcaaatgatatttagaagaattataactattacattgaatggagtcccttggatattttgatagtaaaattaatagccataaagtcctagacttcttatttgaagttaaaatttcttatttgaaaagttgaaatttatgagctttgaagattgctaaattaaataatttatagctccaaaaacaaaaatatacttgtatatgtcacagagaaaaaaaatgcaaaatttataatagagttacattaaccttgttgtttacctttcactgatttcttatatggtataaattaaagttcaggcatttatggggagaaaaggccctccccaccgacccgccacctgccacctctgacggagtgggagaagttagtctgtgctaagatagtactgagtccccagatgttgtatactgtaaattacagtataatgccaaatgcagcaaaatcttccagctgtacgttacaagtttggtcattttgaagcttgacattttagtttgccattatgttaaaaacatctaaataggtgttagtttctcaggagtagattgttagtgttgacttttcctgtaaagcagacatcgttcttggcctgccctgcattgtatactagatttcattgttgtctctcatgcttcttgagttgcttcatggtttatgctcgccatggaaagctatcagtaacagtttcatgcttataccaaagaattaaatctgatctttaatatctgatattttcctggtactcgtactgataagggattattggaagtcagtcacagaatttggaaataaattctagtctctccttagctatttgatgcttttcatataggccaagaactcattgcaaaacatttttgcaaggatgaatgcctgtatttggtctaggaacagtacattttagtctgatttagaattactggtagcttattttaaagcaaggaaaagcagctgagctcaagtttgctgtctttagaatggtttgtgaaaatatggtataaaggtgttttcattttcctgttcttacctattattgtatagagctattcatgccattttttgggaaaactttaaaaattgccccaaatactgacattgagtgcattaaataacaaattatctttgatacattaaacttttattcttcatgcatctgtaatttaattttaagtataatgttttgcctttggtacaactaaattaaaactcttggtggtcacatattgtatataaacaaaacaatatgctttgttgaaggaaaattttctttattggaatgtggttgtaatccttgttcagttcttaagtttcggttttttttaaaaacaggatgcaacttaaacttttctttgcatcaaggtatatgcaaaacattggtgccgtgcatcaccaaatgaaagtttgtatttaacgaggaggtgctttacactgtactttttggtgttttttggaaaagttacatttagatctattctgaagctgttcatttttaacaaataaaatgttacaggtttcacatga

SEQ ID NO: 389697 - DNA, 1417 bp, Homo sapiens
aagcagtggtatcaacgcatagtgcccattacggccggggaagattgctaaattaaataatttatagctccaaaaacaaaaatatacttgtatatgtcacagagaaaaaaaatgcaaaatttataatagagttacattaaccttgttgtttacctttcactgatttcttatatggtataaattaaagttcaggcatttatggggagaaaaggccctccccaccgacccgccacctgccacctctgacggagtgggagaagttagtctgtgctaagatagtactgagtccccagatgttgtatactgtaaattacagtataatgccaaatgcagcaaaatcttccagctgtacgttacaagtttggtcattttgaagcttgacattttagtttgccattatgttaaaaacatctaaataggtgttagtttctcaggagtagattgttagtgttgacttttcctgtaaagcagacatcgttcttggcctgccctgcattgtatactagatttcattgttgtctctcatgcttcttgagttgcttcatggtttatgctcgccatggaaagctatcagtaacagtttcatgcttataccaaagaattaaatctgatctttaatatctgatattttcctggtactcgtactgataagggattattggaagtcagtcacagaatttggaaataaattctagtctctccttagctatttgatgcttttcatataggccaagaactcattgcaaaacatttttgcaaggatgaatgcctgtatttggtctaggaacagtacattttagtctgatttagaattactggtagcttattttaaagcaaggaaaagcagctgagctcaagtttgctgtctttagaatggtttgtgaaaatatggtataaaggtgttttcattttcctgttcttacctattattgtatagagctattcatgccattttttgggaaaactttaaaaattgccccaaatactgacattgagtgcattaaataacaaattatctttgatacattaaacttttattcttcatgcatctgtaatttaattttaagtataatgttttgcctttggtacaactaaattaaaactcttggtggtcacatattgtatataaacaaaacaatatgctttgttgaaggaaaattttctttattggaatgtggttgtaatccttgttcagttcttaagtttcggttttttttaaaaacaggatgcaacttaaacttttctttgcatcaaggtatatgcaaaacattggtgccgtgcatcaccaaatgaaagtttgtatttaacgaggaggtgctttacactgtactttttggtgttttttggaaaagttacatttagatctattctgaagctgttcatttttaacaaataaaatgttacaggtttcacatga

SEQ ID NO: 389698 - DNA, 2894 bp, Homo sapiens
ctcgtccgatcctgcgagggccgctaggagcgagtcacggcgcggggccgctctggtcgcccgcgagtgtcggtggccccgccccgcccgcagccgcgggtggagaccgaggacggcgccggcgcgtgcgcgctccctcggtgcggcgggctgcgtgcgcgagtgggaggtggcaggcctgcgactccggccttgtccgcgcccgctctcggcgcgacgtctccagccatgaaccggtttggtacccggttggtgggagccacggcgacttcttcgccgccgccgaaggcccgcagcaatgaaaacctcgacaaaatagatatgtctttggatgatatcatcaagttgaatcgaaaggaagggaagaagcagaattttccaagactaaatagaagactcctccagcaaagtggtgcccagcaattcaggatgagagtgcgatggggaatccaacagaattctggttttggtaagactagtctgaatcatagaggaagagtaatgcctggaaagagacgtcctaatggagttatcactggccttgcagctaggaaaacgactggaattcgaaaaggaattagtcctatgaatcgtccacctctaagtgacaagaatatagaacaatattttccagtgttaaaaaggaaggcaaaccttctgagacaaaatgaagggcagaggaaaccagtagcagttctcaagagacctagccagctaagcagaaaaaataacattccagctaattttaccaggagtggaaataaattaaatcatcagaaagatactcgtcaggcaacttttcttttcagaagaggcctgaaggtgcaggcccagttgaatacagaacaactgctagacgatgtagtagcaaagagaactcgtcaatggcggacttccaccacaaatggagggattttgactgtatctattgacaatcctggagcagtgcaatgcccagtaactcagaaaccacgattaactcgtactgctgtaccttcatttttaacaaagcgggagcaaagtgacgtcaagaaagttcctaaaggtgttcccctgcagtttgacataaacagtgtcggaaaacagacagggatgacgttgaatgagcggtttgggatcctgaaggaacaaagagccactctcacatacaacaaagggggaagccgctttgtcaccgtgggataggtcccatgtcaaaggaacttttgagtgatgactctgagaagttgaattgcttgaagagttcatcacggaaattcaagaaactttacttcaaaatattcacaaggctaaataactcttatttttatttttgaaggtttttttttttaaaaaaaaaaacgtataaaataatgccctgaaagaataatagggattatacctgtctgttcttaaagatttcatggttggctcagacagaacaatcatctgtttgacttctttggttcctcatgcagcagaaggaagacagaaagatagaaattgattatttttatgatagcggtattcaggatctcatcacctttgcccgtgttttagactttgtcatggtaaatcctggtcttcataaacatgagtaggtcccttggttgctgtcacttgccctttaatagtgttgatgtagtcagtgccgttgccttttcttcattagagacacagaacaatgtattagaatttccagctgtgggtttgaagacttagggggacatccagaacgtgcttcctctttcagacggtgtaaagtcccctggaattacacagctttagtgctgagcttttaacaggaaatgtggccctaggtattagtcttagtttaaaatgttggtgtttagagactgtaaatgcatattcacaaagttatctgatagggccttggaggagaaggtccagttttaaaaaatgacagtttgtgtttaataaatgaaggcatgagaggaagtaagtagcaagttgaaggacaggtagttgagatgaaacacttcaaaaccctggttatagatgtactgtttggatgtagcatagtcttgagtctagcgtccacaaagaattattcaaatgatatttagaagaattataactattacattgaatggagtcccttggatattttgatagtaaaattaatagccataaagtcctagacttcttatttgaagttaaaatttcttatttgaaaagttgaaatttatgagctttgaagattgctaaattaaataatttatagctccaaaaacaaaaatatacttgtatatgtcacagagaaaaaaaatgcaaaatttataatagagttacattaaccttgttgtttacctttcactgatttcttatatggtataaattaaagttcaggcatttatggggagaaaaggccctccccaccgacccgccacctgttcttacctattattgtatagagctattcatgccattttttgggaaaactttaaaaattgccccaaatactgacattgagtgcattaaataacaaattatctttgatacattaaacttttattcttcatgcatctgtaatttaattttaagtataatgttttgcctttggtacaactaaattaaaactcttggtggtcacatattgtatataaacaaaacaatatgctttgttgaaggaaaattttctttattggaatgtggttgtaatccttgttcagttcttaagtttcggttttttttaaaaacaggatgcaacttaaacttttctttgcatcaaggtatatgcaaaacattggtgccgtgcatcaccaaatgaaagtttgtatttaacgaggaggtgctttacactgtactttttggtgttttttggaaaagttacatttagatctattctgaagctgttcatttttaacaaataaaatgttacaggtttcacatga

SEQ ID NO: 389699 - DNA, 1158 bp, Homo sapiens
ttctagctcggtaccccaccacctgagtccccagatgttgtatactgtaaattacagtataatgccaaatgcagcaaaatcttccagctgtacgttacaagtttggtcattttgaagcttgacattttagtttgccattatgttaaaaacatctaaataggtgttagtttctcaggagtagattgttagtgttgacttttcctgtaaagcagacatcgttcttggcctgccctgcattgtatactagatttcattgttgtctctcatgcttcttgagttgcttcatggtttatgctcgccatggaaagctatcagtaacagtttcatgcttataccaaagaattaaatctgatctttaatatctgatattttcctggtactcgtactgataagggattattggaagtcagtcacagaatttggaaataaattctagtctctccttagctatttgatgcttttcatataggccaagaactcattgcaaaacatttttgcaaggatgaatgcctgtatttggtctaggaacagtacattttagtctgatttagaattactggtagcttattttaaagcaaggaaaagcagctgagctcaagtttgctgtctttagaatggtttgtgaaaatatggtataaaggtgttttcattttcctgttcttacctattattgtatagagctattcatgccattttttgggaaaactttaaaaattgccccaaatactgacattgagtgcattaaataacaaattatctttgatacattaaacttttattcttcatgcatctgtaatttaattttaagtataatgttttgcctttggtacaactaaattaaaactcttggtggtcacatattgtatataaacaaaacaatatgctttgttgaaggaaaattttctttattggaatgtggttgtaatccttgttcagttcttaagtttcggttttttttaaaaacaggatgcaacttaaacttttctttgcatcaaggtatatgcaaaacattggtgccgtgcatcaccaaatgaaagtttgtatttaacgaggaggtgctttacactgtactttttggtgttttttggaaaagttacatttagatctattctgaagctgttcatttttaacaaataaaatgttacaggtttcacatga

SEQ ID NO: 389700 - DNA, 1004 bp, Homo sapiens
tcagtaagcggagcacgcctgctgggggtatgttgtgttgacttttcctgtaaagcagacatcgttcttggcctgccctgcattgtatactagatttcattgttgtctctcatgcttcttgagttgcttcatggtttatgctcgccatggaaagctatcagtaacagtttcatgcttataccaaagaattaaatctgatctttaatatctgatattttcctggtactcgtactgataagggattattggaagtcagtcacagaatttggaaataaattctagtctctccttagctatttgatgcttttcatataggccaagaactcattgcaaaacatttttgcaaggatgaatgcctgtatttggtctaggaacagtacattttagtctgatttagaattactggtagcttattttaaagcaaggaaaagcagctgagctcaagtttgctgtctttagaatggtttgtgaaaatatggtataaaggtgttttcattttcctgttcttacctattattgtatagagctattcatgccattttttgggaaaactttaaaaattgccccaaatactgacattgagtgcattaaataacaaattatctttgatacattaaacttttattcttcatgcatctgtaatttaattttaagtataatgttttgcctttggtacaactaaattaaaactcttggtggtcacatattgtatataaacaaaacaatatgctttgttgaaggaaaattttctttattggaatgtggttgtaatccttgttcagttcttaagtttcggttttttttaaaaacaggatgcaacttaaacttttctttgcatcaaggtatatgcaaaacattggtgccgtgcatcaccaaatgaaagtttgtatttaacgaggaggtgctttacactgtactttttggtgttttttggaaaagttacatttagatctattctgaagctgttcatttttaacaaataaaatgttacaggtttcacatga

SEQ ID NO: 389701 - DNA, 3360 bp, Homo sapiens
ctcgtccgatcctgcgagggccgctaggagcgagtcacggcgcggggccgctctggtcgcccgcgagtgtcggtggccccgccccgcccgcagccgcgggtggagaccgaggacggcgccggcgcgtgcgcgctccctcggtgcggcgggctgcgtgcgcgagtgggaggtggcaggcctgcgactccggccttgtccgcgcccgctctcggcgcgacgtctccagccatgaaccggtttggtacccggttggtgggagccacggcgacttcttcgccgccgccgaaggcccgcagcaatgaaaacctcgacaaaatagatatgtctttggagctaggaaaacgactggaattcgaaaaggaattagtcctatgaatcgtccacctctaagtgacaagaatatagaacaatattttccagtgttaaaaaggaaggcaaaccttctgagacaaaatgaagggcagaggaaaccagtagcagttctcaagagacctagccagctaagcagaaaaaataacattccagctaattttaccaggagtggaaataaattaaatcatcagaaagatactcgtcaggcaacttttcttttcagaagaggcctgaaggtgcaggcccagttgaatacagaacaactgctagacgatgtagtagcaaagagaactcgtcaatggcggacttccaccacaaatggagggattttgactgtatctattgacaatcctggagcagtgcaatgcccagtaactcagaaaccacgattaactcgtactgctgtaccttcatttttaacaaagcgggagcaaagtgacgtcaagaaagttcctaaaggtgttcccctgcagtttgacataaacagtgtcggaaaacagacagggatgacgttgaatgagcggtttgggatcctgaaggaacaaagagccactctcacatacaacaaagggggaagccgctttgtcaccgtgggataggtcccatgtcaaaggaacttttgagtgatgactctgagaagttgaattgcttgaagagttcatcacggaaattcaagaaactttacttcaaaatattcacaaggctaaataactcttatttttatttttgaaggtttttttttttaaaaaaaaaaacgtataaaataatgccctgaaagaataatagggattatacctgtctgttcttaaagatttcatggttggctcagacagaacaatcatctgtttgacttctttggttcctcatgcagcagaaggaagacagaaagatagaaattgattatttttatgatagcggtattcaggatctcatcacctttgcccgtgttttagactttgtcatggtaaatcctggtcttcataaacatgagtaggtcccttggttgctgtcacttgccctttaatagtgttgatgtagtcagtgccgttgccttttcttcattagagacacagaacaatgtattagaatttccagctgtgggtttgaagacttagggggacatccagaacgtgcttcctctttcagacggtgtaaagtcccctggaattacacagctttagtgctgagcttttaacaggaaatgtggccctaggtattagtcttagtttaaaatgttggtgtttagagactgtaaatgcatattcacaaagttatctgatagggccttggaggagaaggtccagttttaaaaaatgacagtttgtgtttaataaatgaaggcatgagaggaagtaagtagcaagttgaaggacaggtagttgagatgaaacacttcaaaaccctggttatagatgtactgtttggatgtagcatagtcttgagtctagcgtccacaaagaattattcaaatgatatttagaagaattataactattacattgaatggagtcccttggatattttgatagtaaaattaatagccataaagtcctagacttcttatttgaagttaaaatttcttatttgaaaagttgaaatttatgagctttgaagattgctaaattaaataatttatagctccaaaaacaaaaatatacttgtatatgtcacagagaaaaaaaatgcaaaatttataatagagttacattaaccttgttgtttacctttcactgatttcttatatggtataaattaaagttcaggcatttatggggagaaaaggccctccccaccgacccgccacctgccacctctgacggagtgggagaagttagtctgtgctaagatagtactgagtccccagatgttgtatactgtaaattacagtataatgccaaatgcagcaaaatcttccagctgtacgttacaagtttggtcattttgaagcttgacattttagtttgccattatgttaaaaacatctaaataggtgttagtttctcaggagtagattgttagtgttgacttttcctgtaaagcagacatcgttcttggcctgccctgcattgtatactagatttcattgttgtctctcatgcttcttgagttgcttcatggtttatgctcgccatggaaagctatcagtaacagtttcatgcttataccaaagaattaaatctgatctttaatatctgatattttcctggtactcgtactgataagggattattggaagtcagtcacagaatttggaaataaattctagtctctccttagctatttgatgcttttcatataggccaagaactcattgcaaaacatttttgcaaggatgaatgcctgtatttggtctaggaacagtacattttagtctgatttagaattactggtagcttattttaaagcaaggaaaagcagctgagctcaagtttgctgtctttagaatggtttgtgaaaatatggtataaaggtgttttcattttcctgttcttacctattattgtatagagctattcatgccattttttgggaaaactttaaaaattgccccaaatactgacattgagtgcattaaataacaaattatctttgatacattaaacttttattcttcatgcatctgtaatttaattttaagtataatgttttgcctttggtacaactaaattaaaactcttggtggtcacatattgtatataaacaaaacaatatgctttgttgaaggaaaattttctttattggaatgtggttgtaatccttgttcagttcttaagtttcggttttttttaaaaacaggatgcaacttaaacttttctttgcatcaaggtatatgcaaaacattggtgccgtgcatcaccaaatgaaagtttgtatttaacgaggaggtgctttacactgtactttttggtgttttttggaaaagttacatttagatctattctgaagctgttcatttttaacaaataaaatgttacaggtttcacatga

SEQ ID NO: 389702 - DNA, 3077 bp, Homo sapiens
gagagagagaactagtctagaggttttggtaagactagtctgaatcatagaggaagagtaatgcctggaaagagacgtcctaatggagttatcactggccttgcagctaggaaaacgactggaattcgaaaaggaattagtcctatgaatcgtccacctctaagtgacaagaatatagaacaatattttccagtgttaaaaaggaaggcaaaccttctgagacaaaatgaagggcagaggaaaccagtagcagttctcaagagacctagccagctaagcagaagatactcgtcaggcaacttttcttttcagaagaggcctgaaggtgcaggcccagttgaatacagaacaactgctagacgatgtagtagcaaagagaactcgtcaatggcggacttccaccacaaatggagggattttgactgtatctattgacaatcctggagcagtgcaatgcccagtaactcagaaaccacgattaactcgtactgctgtaccttcatttttaacaaagcgggagcaaagtgacgtcaagaaagttcctaaaggtgttcccctgcagtttgacataaacagtgtcggaaaacagacagggatgacgttgaatgagcggtttgggatcctgaaggaacaaagagccactctcacatacaacaaagggggaagccgctttgtcaccgtgggataggtcccatgtcaaaggaacttttgagtgatgactctgagaagttgaattgcttgaagagttcatcacggaaattcaagaaactttacttcaaaatattcacaaggctaaataactcttatttttatttttgaaggtttttttttttaaaaaaaaaaacgtataaaataatgccctgaaagaataatagggattatacctgtctgttcttaaagatttcatggttggctcagacagaacaatcatctgtttgacttctttggttcctcatgcagcagaaggaagacagaaagatagaaattgattatttttatgatagcggtattcaggatctcatcacctttgcccgtgttttagactttgtcatggtaaatcctggtcttcataaacatgagtaggtcccttggttgctgtcacttgccctttaatagtgttgatgtagtcagtgccgttgccttttcttcattagagacacagaacaatgtattagaatttccagctgtgggtttgaagacttagggggacatccagaacgtgcttcctctttcagacggtgtaaagtcccctggaattacacagctttagtgctgagcttttaacaggaaatgtggccctaggtattagtcttagtttaaaatgttggtgtttagagactgtaaatgcatattcacaaagttatctgatagggccttggaggagaaggtccagttttaaaaaatgacagtttgtgtttaataaatgaaggcatgagaggaagtaagtagcaagttgaaggacaggtagttgagatgaaacacttcaaaaccctggttatagatgtactgtttggatgtagcatagtcttgagtctagcgtccacaaagaattattcaaatgatatttagaagaattataactattacattgaatggagtcccttggatattttgatagtaaaattaatagccataaagtcctagacttcttatttgaagttaaaatttcttatttgaaaagttgaaatttatgagctttgaagattgctaaattaaataatttatagctccaaaaacaaaaatatacttgtatatgtcacagagaaaaaaaatgcaaaatttataatagagttacattaaccttgttgtttacctttcactgatttcttatatggtataaattaaagttcaggcatttatggggagaaaaggccctccccaccgacccgccacctgccacctctgacggagtgggagaagttagtctgtgctaagatagtactgagtccccagatgttgtatactgtaaattacagtataatgccaaatgcagcaaaatcttccagctgtacgttacaagtttggtcattttgaagcttgacattttagtttgccattatgttaaaaacatctaaataggtgttagtttctcaggagtagattgttagtgttgacttttcctgtaaagcagacatcgttcttggcctgccctgcattgtatactagatttcattgttgtctctcatgcttcttgagttgcttcatggtttatgctcgccatggaaagctatcagtaacagtttcatgcttataccaaagaattaaatctgatctttaatatctgatattttcctggtactcgtactgataagggattattggaagtcagtcacagaatttggaaataaattctagtctctccttagctatttgatgcttttcatataggccaagaactcattgcaaaacatttttgcaaggatgaatgcctgtatttggtctaggaacagtacattttagtctgatttagaattactggtagcttattttaaagcaaggaaaagcagctgagctcaagtttgctgtctttagaatggtttgtgaaaatatggtataaaggtgttttcattttcctgttcttacctattattgtatagagctattcatgccattttttgggaaaactttaaaaattgccccaaatactgacattgagtgcattaaataacaaattatctttgatacattaaacttttattcttcatgcatctgtaatttaattttaagtataatgttttgcctttggtacaactaaattaaaactcttggtggtcacatattgtatataaacaaaacaatatgctttgttgaaggaaaattttctttattggaatgtggttgtaatccttgttcagttcttaagtttcggttttttttaaaaacaggatgcaacttaaacttttctttgcatcaaggtatatgcaaaacattggtgccgtgcatcaccaaatgaaagtttgtatttaacgaggaggtgctttacactgtactttttggtgttttttggaaaagttacatttagatctattctgaagctgttcatttttaacaaataaaatgttacaggtttcacatga

SEQ ID NO: 389703 - DNA, 3589 bp, Homo sapiens
ctcgtccgatcctgcgagggccgctaggagcgagtcacggcgcggggccgctctggtcgcccgcgagtgtcggtggccccgccccgcccgcagccgcgggtggagaccgaggacggcgccggcgcgtgcgcgctccctcggtgcggcgggctgcgtgcgcgagtgggaggtggcaggcctgcgactccggccttgtccgcgcccgctctcggcgcgacgtctccagccatgaaccggtttggtacccggttggtgggagccacggcgacttcttcgccgccgccgaaggcccgcagcaatgaaaacctcgacaaaatagatatgtctttggatgatatcatcaagttgaatcgaaaggaagggaagaagcagaattttccaagactaaatagaagactcctccagcaaagtggtgcccagcaattcaggatgagagtgcgatggggaatccaacagaattctggttttggtaagactagtctgaatcatagaggaagagtaatgcctggaaagagacgtcctaatggagttatcactggccttgcagctaggaaaacgactggaattcgaaaaggaattagtcctatgaatcgtccacctctaagtgacaagaatatagaacaatattttccagtgttaaaaaggaaggcaaaccttctgagacaaaatgaagggcagaggaaaccagtagcagttctcaagagacctagccagctaagcagaaaaaataacattccagctaattttaccaggagtggaaataaattaaatcatcagaaagatactcgtcaggcaacttttcttttcagaagaggcctgaaggtgcaggcccagttgaatacagaacaactgctagacgatgtagtagcaaagagaactcgtcaatggcggacttccaccacaaatggagggattttgactgtatctattgacaatcctggagcagtgcaatgcccagtaactcagaaaccacgattaactcgtactgctgtaccttcatttttaacaaagcgggagcaaagtgacgtcaagaaagttcctaaaggtgttcccctgcagtttgacataaacagtgtcggaaaacagacagggatgacgttgaatgagcggtttgggatcctgaaggaacaaagagccactctcacatacaacaaagggggaagccgctttgtcaccgtgggataggtcccatgtcaaaggaacttttgagtgatgactctgagaagttgaattgcttgaagagttcatcacggaaattcaagaaactttacttcaaaatattcacaaggctaaataactcttatttttatttttgaaggtttttttttttaaaaaaaaaaacgtataaaataatgccctgaaagaataatagggattatacctgtctgttcttaaagatttcatggttggctcagacagaacaatcatctgtttgacttctttggttcctcatgcagcagaaggaagacagaaagatagaaattgattatttttatgatagcggtattcaggatctcatcacctttgcccgtgttttagactttgtcatggtaaatcctggtcttcataaacatgagtaggtcccttggttgctgtcacttgccctttaatagtgttgatgtagtcagtgccgttgccttttcttcattagagacacagaacaatgtattagaatttccagctgtgggtttgaagacttagggggacatccagaacgtgcttcctctttcagacggtgtaaagtcccctggaattacacagctttagtgctgagcttttaacaggaaatgtggccctaggtattagtcttagtttaaaatgttggtgtttagagactgtaaatgcatattcacaaagttatctgatagggccttggaggagaaggtccagttttaaaaaatgacagtttgtgtttaataaatgaaggcatgagaggaagtaagtagcaagttgaaggacaggtagttgagatgaaacacttcaaaaccctggttatagatgtactgtttggatgtagcatagtcttgagtctagcgtccacaaagaattattcaaatgatatttagaagaattataactattacattgaatggagtcccttggatattttgatagtaaaattaatagccataaagtcctagacttcttatttgaagttaaaatttcttatttgaaaagttgaaatttatgagctttgaagattgctaaattaaataatttatagctccaaaaacaaaaatatacttgtatatgtcacagagaaaaaaaatgcaaaatttataatagagttacattaaccttgttgtttacctttcactgatttcttatatggtataaattaaagttcaggcatttatggggagaaaaggccctccccaccgacccgccacctgccacctctgacggagtgggagaagttagtctgtgctaagatagtactgagtccccagatgttgtatactgtaaattacagtataatgccaaatgcagcaaaatcttccagctgtacgttacaagtttggtcattttgaagcttgacattttagtttgccattatgttaaaaacatctaaataggtgttagtttctcaggagtagattgttagtgttgacttttcctgtaaagcagacatcgttcttggcctgccctgcattgtatactagatttcattgttgtctctcatgcttcttgagttgcttcatggtttatgctcgccatggaaagctatcagtaacagtttcatgcttataccaaagaattaaatctgatctttaatatctgatattttcctggtactcgtactgataagggattattggaagtcagtcacagaatttggaaataaattctagtctctccttagctatttgatgcttttcatataggccaagaactcattgcaaaacatttttgcaaggatgaatgcctgtatttggtctaggaacagtacattttagtctgatttagaattactggtagcttattttaaagcaaggaaaagcagctgagctcaagtttgctgtctttagaatggtttgtgaaaatatggtataaaggtgttttcattttcctgttcttacctattattgtatagagctattcatgccattttttgggaaaactttaaaaattgccccaaatactgacattgagtgcattaaataacaaattatctttgatacattaaacttttattcttcatgcatctgtaatttaattttaagtataatgttttgcctttggtacaactaaattaaaactcttggtggtcacatattgtatataaacaaaacaatatgctttgttgaaggaaaattttctttattggaatgtggttgtaatccttgttcagttcttaagtttcggttttttttaaaaacaggatgcaacttaaacttttctttgcatcaaggtatatgcaaaacattggtgccgtgcatcaccaaatgaaagtttgtatttaacgaggaggtgctttacactgtactttttggtgttccttgtccccctttctcttcctctcccccaaccccgttcttttttccgggttttctttttacaggtttcacaaaaataattaaaagatata

SEQ ID NO: 389704 - DNA, 178 bp, Homo sapiens
tcgcacctgatcggtcgcgaactggccctttccccacccggcagaatctgatttgtaggtcttatactcttcgattgtggcatcaatctaatcttgtttaagttctccctttgccgttgcttcttgggccgtgcttttccgttttgtcttcctcccaccaaatccaaccccagtgttt

SEQ ID NO: 389705 - DNA, 543 bp, Homo sapiens
cctcaagcgatcctcctgcccggacctcccaaactgctgggattataggcatggaccaccgtacttggcctcatttgtcctcttgaaatgaacacttagcattcttctacttccttactaccacaaaatgcatacatgcgtcttcatggtgctgtgtacaaatttctgtggtggtgcgtgtccaggaatggaattgctgtgtcttaaggtatatgggtacctttcattaaagcatacttttcattaaatactgccaaattagtgtctaaaatgatcatatcagtttatacatttatattggccagtatttgaaagtctacttctaatttttgccagtctggcaggtataatcttatctttgttaacatgttcacttctaggattatacaaaatagtaaatgaaaactcgagaataacgccttaggttatccttctcttagaaatgtcactgtttacttgacaagtttggtgtatccgtgtttaagctggagtagttgtctactaagggcaagatctttgtaggacccatgatagagccatact

SEQ ID NO: 389706 - DNA, 944 bp, Homo sapiens
gctcgcagccggacacagactgccttcagctgcgggcggatcgggctggagccgccacggctgctgcggaagaggaaaaacggccaacagcagccccgcggccggcccggcagcgcccggcccccggctcagcccccggagtgcggagccgaccagatactttctgagtgcctactatgtgccatgctgtgctagtgcactgaggacacaggtggacaagcccgaattgctccctgactctcctggcgctcatcacacccggagagtatatgtcatgacccaggccagcagggggctccatgaggattcatagaagatgcaccgcgtactcggacgcctttgtgtgctgcttaccttgcgttggctcgtgatggtctgcctgcagacccgaaatccttgaggatcgctgctatcattggacgagcccatggacgtgcacaccagacggcggacgcggcctctccaatccacctggccaacgaaccgcaatcaacccgatcgactcctgacaaggctggcgcacaccgctcaacgggtcgacgctggaccatctactgacgcctatcatcagaagacacggaggacgtaaccgaggacttgtcacgaatacgcactggtgtacaggactccgtccccacacagcgggggctcggcccgcactgaacgcaccgggaacccaaatcagatcacagtccgcatcacatccaggacgtcccgtgcaatcaagcccacccagcatcctgctgctgaggaaggacagcggacgcggtcccgcaccagcacttgcaccaagactggccccgccctgtacgggacggtccacgtaaaacggactacctcgtgcctccccacgagaaatccgcaaaagccccctagctcgactccagacgccaacgtgcaacacctggaccattccagctgtgtgcatctatagccccgatgag

SEQ ID NO: 389707 - DNA, 529 bp, Homo sapiens
gtctagcttgatctgatggcctagcccctggcccagcccctgcagaggcatcagcgctcgggcccatccagggacggaagcctggccagtgtggtcccccacatgcaggaaggtagtgctgagatgctggctttcctatcacacaggccatggagggcgaagtcaatgtgtgctacaaggagctgtgtggcccttggcccagccaccagctgttgaccaaccagctgcagcggctgtgtgtgctgctggatgtttacctggagaccgagagccatgacgacagtgtggaggggcccaaggaatttccccaggagaagatgtgtctgcggctcttcaggggtcctagcaggatgaagccatttaaatacaaccatcctcagggattcttcagccatcgctgatctcccgcgcagaccgttgtttcccccaaggcctcaccctgagcactgggcttctgctttctgctctggcccacatgtgactcttgatattctccaaagacaccagccaattaaaaagcgtcacctga

SEQ ID NO: 389708 - DNA, 1904 bp, Homo sapiens
  misc_feature (437)..(437): n is a, c, g, or t
  misc_feature (483)..(483): n is a, c, g, or t
  misc_feature (516)..(516): n is a, c, g, or t
  misc_feature (541)..(541): n is a, c, g, or t
  misc_feature (545)..(545): n is a, c, g, or t
  misc_feature (555)..(555): n is a, c, g, or t
  misc_feature (582)..(582): n is a, c, g, or t
  misc_feature (588)..(589): n is a, c, g, or t
  misc_feature (636)..(636): n is a, c, g, or t
  misc_feature (650)..(652): n is a, c, g, or t
  misc_feature (1009)..(1009): n is a, c, g, or t
  misc_feature (1027)..(1027): n is a, c, g, or t
  misc_feature (1033)..(1033): n is a, c, g, or t
  misc_feature (1071)..(1071): n is a, c, g, or t
  misc_feature (1073)..(1073): n is a, c, g, or t
  misc_feature (1076)..(1076): n is a, c, g, or t
gatcaaggatcccgttggtcgatcactgtacttcacagagagtaattctaagtcttacaggatttcatggagatggcgagagtggtgttggagaatcaatcacatacagagatacaggacagtgagagcaggtagcatttcgaggagcatattcttattcattggcgacggggtctcgctcctgttgtccagcctgggaaacaatgcgagtccctatctctaaaaaattttaaaaaaagaaatctgcatataatagacccacagagtccaaactattgttcagagatcaactgtacttcacagagagtaattctaagtcttacaggatttcatggagatggcgagagtggtgttggagaatcaatcacatacagagatacagtacagtgatcgaccaaggtaacatttgaggagaatattttttttttattgagacngggtcttgctctgttgtccaggctggagtgcagtggcacgaacacngctcactgccgcctcaacctctcctgggttcangtgatcctcctgcctcagcctcccnagtngctgggaccncaggtgtgtgccaccatttctggctantttttnnattttttgtagaggcgggatcccactatttttcccaggctggtctcnaactcctgggctcnnntgatcctcccacctcggcctcccaaagtgctaggattataggcatgagccaccacacccggcctgagtagagtctttaaggtaatgacaaaagtgcctcaaaatataattatttgattaagagaagtcttgggaagataggtaacaacctttaaaatgttcataaaattacatcctttgtaatactcctgcaagtcaaagtaaaggatggcatagactattcttggacagttttgtcaaaaagtgtatcttgaccccaccatcagtactccattcttcattttaaaaaataagatgggctgggcacagtggcttacgcctttaatatcagtactttgggaggctggtgggcggatcncctgagatcaggagttcnagaccngcctggccaacatggtgaaaccccgtctctactaaaantncanaaattagctgggcatggtggtgcgcgcctgtgatcccagccgctcgggaggctgaggcaggagaattgcttgaatccccgaggcggaggttgcactgagccgagatggtgccactgcaccatctggacaacagagcaagactccgtcttggaaaaaaaaaaaaagatgtagaaatgtaaaaatatttgagaattattacatagttgcagatatagtttgctaactccaagaggaaacacattttattttttgtgattgtcctgatgaaactttatccccccacaacatgctgttaagcttggttcccatcataagcatattccccctaagtggacttttactgattttccatggataatgcagacctccagtataaaagctattcctccaggtctctctgccgaccactgagtatcccagggataaggattttaagagtaagagctaagtaataaattcctgcccctagcagggccgttcattttacggatgaaaacctgatccttgctgggcgtggtggctcatgcctataatccaagccattcagaaggctgaggcaggaggattgcttgagcccaggagttcaagaccagcctgtgtaatatagtgagtccccattcagaaaaagaaaagaaacctgagcctagcaaggagaagagaatggtacctttggtggctgttaaatcaccaccgctaccctcagtccacatcagtcctttgaattccaaaggcaggtactctctagctcagaggtcctcgaacttcagcctgtgtgggagtcacccatcctggcacctgattagaaacacagacacccaagtcccattc

SEQ ID NO: 389709 - DNA, 2623 bp, Homo sapiens
agaccacttgaagagaggttcctaatactagacagatggagagtggcttggctgtttccccctgcatattggggttgaaaacttaaatgtgtagttccagtccttctatgcagagtctctcctgccctccctccttcctgcagtctcaccacgccaccacctccctcgggggcctccgcgctgagcttccggcctctacgcctcgcttccggtcggccgccccttccttacttccggttctctatggtgcgcgggcaagctttgctccgcctccggcagtggcttactcccggtgccaggttcttggagctgtgaggtgttcagcattatttaagatcacctatgcatcatctgaagccacagtcccaggtcatcttcatcaccttccccagtggaatgcctcctgtgttaaagcccacaacaacccctgtggaggaacaaccatgtcatcagaatcgagcaaaaaacggaagcccaaagtgatccgaagcgatggagccccagctgaaggaaagcggaatcgatctgacaccgagcaggaaggtaaatactacagtgaggaggccgaggtggatctgcgggaccctggcagagactatgagttatacaagtacacctgccaggagctacagaggctgatggctgagatccaagacctgaagagcaggggtggcaaggatgtggcaatagaaatagaagaacggaggatccagagctgtgtgcatttcatgactctaaagaagcttaaccgattagcccacatcaggttgaagaaaggaagagatcagacccacgaggctaagcagaaagtagatgcctatcatctgcagctccagaacctgttgtatgaggtgatgcacctacagaaggagatcaccaaatgtttggagtttaagtcaaagcatgaagaaattgatctggtcagtttagaggagttttataaggaggctccaccagatatcagcaaggccgaagtcaccatgggagaccctcaccagcaaacactggcacgtctggactgggagctggagcagcggaaaaggctggcagagaagtaccgagagtgcctatctaacaaggagaagattctcaaggagattgaggtgaagaaggagtacctgagcagcctccagccccgcctcaacagcatcatgcaggcttcccttccggtgcaggagtacctgtttatgccattcgaccaggctcacaagcagtatgagacagccagacacctgccgcctcccctctatgtcctctttgttcaggccactgcgtatgggcaggcctgtgataagacgttatctgtggcaatcgaaggcagtgtggatgaagccaaggctctgttcaaacctccagaggactcccaagatgacgagagtgactcagatgccgaggaggagcagactacgaagcgccggagacccacactgggggttcagttggacgacaaacgcaaggagatgctgaagaggcacccactgtctgtcatgctcgacctgaagtgcaaagatgacagtgtgcttcacctgactttctactacctcatgaacctcaacatcatgacagtaaaagccaaagtgacaactgccatggagctgatcacccccatcagtgcaggtgacttgctgtctcctgactcagtcctgagttgcttgtatcctggggatcatggaaagaaaactccgaatccagccaatcagtatcagtttgataaagttggcatcctgactttgagcgactatgtacttgagctaggtcacccctatttgtgggtgcagaagctgggtggcctccacttccccaaagagcagccccagcaaacagtgattgctgaccactcgctgagcgccagccacatggagaccaccatgaaacttctgaagaccagggtgcagtcccgcctggccctccacaaacagtttgcatccctagaacatggcattgtgccagttaccagtgattgccagtacctcttccctgccaaggttgtctctcgcctggtgaaatgggtgacaattgcccatgaggattacatggagctgcacttcaccaaagacattgtggatgcgggactggctggggacaccaatctctactacatggcgctcatcgaaaggggcacagccaaactgcaggccgctgtggtgttgaaccctggctactcctccatcccacctgttttccagctctgtttgaactggaaaggggagaaaaccaacagcaacgatgacaacattcgggccatggagggcgaagtcaatgtgtgctacaaggagctgtgtggcccttggcccagccaccagctgttgaccaaccagctgcagcggctgtgtgtgctgctggatgtttacctggagaccgagagccatgacgacagtgtggaggggcccaaggaatttccccaggagaagatgtgtctgcggctcttcaggggtcctagcaggatgaagccatttaaatacaaccatcctcagggattcttcagccatcgctgatctcccgcgcagaccgttgtttcccccaaggcctcaccctgagcactgggcttctgctttctgctctggcccacatgtgactcttgatattctccaaagacaccagccaattaaaaagcgtcacctga

SEQ ID NO: 389710 - DNA, 2569 bp, Homo sapiens
  misc_feature (2508)..(2508): n is a, c, g, or t
agaccacttgaagagaggttcctaatactagacagatggagagtggcttggctgtttccccctgcatattggggttgaaaacttaaatgtgtagttccagtccttctatgcagagtctctcctgccctccctccttcctgcagtctcaccacgccaccacctccctcgggggcctccgcgctgagcttccggcctctacgcctcgcttccggtcggccgccccttccttacttccggttctctatggtgcgcgggcaagctttgctccgcctccggcagtggcttactcccggtgccaggttcttggagctgtgaggaggaacaaccatgtcatcagaatcgagcaaaaaacggaagcccaaagtgatccgaagcgatggagccccagctgaaggaaagcggaatcgatctgacaccgagcaggaaggtaaatactacagtgaggaggccgaggtggatctgcgggaccctggcagagactatgagttatacaagtacacctgccaggagctacagaggctgatggctgagatccaagacctgaagagcaggggtggcaaggatgtggcaatagaaatagaagaacggaggatccagagctgtgtgcatttcatgactctaaagaagcttaaccgattagcccacatcaggttgaagaaaggaagagatcagacccacgaggctaagcagaaagtagatgcctatcatctgcagctccagaacctgttgtatgaggtgatgcacctacagaaggagatcaccaaatgtttggagtttaagtcaaagcatgaagaaattgatctggtcagtttagaggagttttataaggaggctccaccagatatcagcaaggccgaagtcaccatgggagaccctcaccagcaaacactggcacgtctggactgggagctggagcagcggaaaaggctggcagagaagtaccgagagtgcctatctaacaaggagaagattctcaaggagattgaggtgaagaaggagtacctgagcagcctccagccccgcctcaacagcatcatgcaggcttcccttccggtgcaggagtacctgtttatgccattcgaccaggctcacaagcagtatgagacagccagacacctgccgcctcccctctatgtcctctttgttcaggccactgcgtatgggcaggcctgtgataagacgttatctgtggcaatcgaaggcagtgtggatgaagccaaggctctgttcaaacctccagaggactcccaagatgacgagagtgactcagatgccgaggaggagcagactacgaagcgccggagacccacactgggggttcagttggacgacaaacgcaaggagatgctgaagaggcacccactgtctgtcatgctcgacctgaagtgcaaagatgacagtgtgcttcacctgactttctactacctcatgaacctcaacatcatgacagtaaaagccaaagtgacaactgccatggagctgatcacccccatcagtgcaggtgacttgctgtctcctgactcagtcctgagttgcttgtatcctggggatcatggaaagaaaactccgaatccagccaatcagtatcagtttgataaagttggcatcctgactttgagcgactatgtacttgagctaggtcacccctatttgtgggtgcagaagctgggtggcctccacttccccaaagagcagccccagcaaacagtgattgctgaccactcgctgagcgccagccacatggagaccaccatgaaacttctgaagaccagggtgcagtcccgcctggccctccacaaacagtttgcatccctagaacatggcattgtgccagttaccagtgattgccagtacctcttccctgccaaggttgtctctcgcctggtgaaatgggtgacaattgcccatgaggattacatggagctgcacttcaccaaagacattgtggatgcgggactggctggggacaccaatctctactacatggcgctcatcgaaaggggcacagccaaactgcaggccgctgtggtgttgaaccctggctactcctccatcccacctgttttccagctctgtttgaactggaaaggggagaaaaccaacagcaacgatgacaacattcgggccatggagggcgaagtcaatgtgtgctacaaggagctgtgtggcccttggcccagccaccagctgttgaccaaccagctgcagcggctgtgtgtgctgctggatgtttacctggagaccgagagccatgacgacagtgtggaggggcccaaggaatttccccaggagaagatgtgtctgcggctcttcaggggtcctagcaggatgaagccatttaaatacaaccatcctcagggattcttcagccatcgctgatctcccgcgcagaccgttgtttcccccaaggcctcaccctgagcactgggcttctgctttctgctctggcccacatgtgactcttgatattctccaaagacaccagccaattaaaaagcgtcacctgangatttaaaaaaagaggcaaattgtgtttaaaaaccctaatcctcgagggggggcccggtac

SEQ ID NO: 389711 - DNA, 2563 bp, Homo sapiens
agaccacttgaagagaggttcctaatactagacagatggagagtggcttggctgtttccccctgcatattggggttgaaaacttaaatgtgtagttccagtccttctatgcagagtctctcctgccctccctccttcctgcagtctcaccacgccaccacctccctcgggggcctccgcgctgagcttccggcctctacgcctcgcttccggtcggccgccccttccttacttccggttctctatggtgcgcgggcaagctttgctccgcctccggcagtggcttactcccggtgccaggttcttggagctgtgaggtgttcagcattatttaagatcacctatgcatcatctgaagccacagtcccaggtcatcttcatcaccttccccagtggaatgcctcctgtgttaaagcccacaacaacccctgtggaggaacaaccatgtcatcagaatcgagcaaaaaacggaagcccaaagaaggtaaatactacagtgaggaggccgaggtggatctgcgggaccctggcagagactatgagttatacaagtacacctgccaggagctacagaggctgatggctgagatccaagacctgaagagcaggggtggcaaggatgtggcaatagaaatagaagaacggaggatccagagctgtgtgcatttcatgactctaaagaagcttaaccgattagcccacatcaggttgaagaaaggaagagatcagacccacgaggctaagcagaaagtagatgcctatcatctgcagctccagaacctgttgtatgaggtgatgcacctacagaaggagatcaccaaatgtttggagtttaagtcaaagcatgaagaaattgatctggtcagtttagaggagttttataaggaggctccaccagatatcagcaaggccgaagtcaccatgggagaccctcaccagcaaacactggcacgtctggactgggagctggagcagcggaaaaggctggcagagaagtaccgagagtgcctatctaacaaggagaagattctcaaggagattgaggtgaagaaggagtacctgagcagcctccagccccgcctcaacagcatcatgcaggcttcccttccggtgcaggagtacctgtttatgccattcgaccaggctcacaagcagtatgagacagccagacacctgccgcctcccctctatgtcctctttgttcaggccactgcgtatgggcaggcctgtgataagacgttatctgtggcaatcgaaggcagtgtggatgaagccaaggctctgttcaaacctccagaggactcccaagatgacgagagtgactcagatgccgaggaggagcagactacgaagcgccggagacccacactgggggttcagttggacgacaaacgcaaggagatgctgaagaggcacccactgtctgtcatgctcgacctgaagtgcaaagatgacagtgtgcttcacctgactttctactacctcatgaacctcaacatcatgacagtaaaagccaaagtgacaactgccatggagctgatcacccccatcagtgcaggtgacttgctgtctcctgactcagtcctgagttgcttgtatcctggggatcatggaaagaaaactccgaatccagccaatcagtatcagtttgataaagttggcatcctgactttgagcgactatgtacttgagctaggtcacccctatttgtgggtgcagaagctgggtggcctccacttccccaaagagcagccccagcaaacagtgattgctgaccactcgctgagcgccagccacatggagaccaccatgaaacttctgaagaccagggtgcagtcccgcctggccctccacaaacagtttgcatccctagaacatggcattgtgccagttaccagtgattgccagtacctcttccctgccaaggttgtctctcgcctggtgaaatgggtgacaattgcccatgaggattacatggagctgcacttcaccaaagacattgtggatgcgggactggctggggacaccaatctctactacatggcgctcatcgaaaggggcacagccaaactgcaggccgctgtggtgttgaaccctggctactcctccatcccacctgttttccagctctgtttgaactggaaaggggagaaaaccaacagcaacgatgacaacattcgggccatggagggcgaagtcaatgtgtgctacaaggagctgtgtggcccttggcccagccaccagctgttgaccaaccagctgcagcggctgtgtgtgctgctggatgtttacctggagaccgagagccatgacgacagtgtggaggggcccaaggaatttccccaggagaagatgtgtctgcggctcttcaggggtcctagcaggatgaagccatttaaatacaaccatcctcagggattcttcagccatcgctgatctcccgcgcagaccgttgtttcccccaaggcctcaccctgagcactgggcttctgctttctgctctggcccacatgtgactcttgatattctccaaagacaccagccaattaaaaagcgtcacctga

SEQ ID NO: 389712 - DNA, 1313 bp, Homo sapiens
tgcttgttcgcaggtgccgtcctccctagaagcagaagaggtgtgaaagaaggtgctgctgggaggggagtctgacaacccagctagctgaagcagcagaagcgccggagacccacactgggggttcagttggacgacaaacgcaaggagatgctgaagaggcacccactgtctgtcatgctcgacctgaagtgcaaagatgacagtgtgcttcacctgactttctactacctcatgaacctcaacatcatgacagtaaaagccaaagtgacaactgccatggagctgatcacccccatcagtgcaggtgacttgctgtctcctgactcagtcctgagttgcttgtatcctggggatcatggaaagaaaactccgaatccagccaatcagtatcagtttgataaagttggcatcctgactttgagcgactatgtacttgagctaggtcacccctatttgtgggtgcagaagctgggtggcctccacttccccaaagagcagccccagcaaacagtgattgctgaccactcgctgagcgccagccacatggagaccaccatgaaacttctgaagaccagggtgcagtcccgcctggccctccacaaacagtttgcatccctagaacatggcattgtgccagttaccagtgattgccagtacctcttccctgccaaggttgtctctcgcctggtgaaatgggtgacaattgcccatgaggattacatggagctgcacttcaccaaagacattgtggatgcgggactggctggggacaccaatctctactacatggcgctcatcgaaaggggcacagccaaactgcaggccgctgtggtgttgaaccctggctactcctccatcccacctgttttccagctctgtttgaactggaaaggggagaaaaccaacagcaacgatgacaacattcgggccatggagggcgaagtcaatgtgtgctacaaggagctgtgtggcccttggcccagccaccagctgttgaccaaccagctgcagcggctgtgtgtgctgctggatgtttacctggagaccgagagccatgacgacagtgtggaggggcccaaggaatttccccaggagaagatgtgtctgcggctcttcaggggtcctagcaggatgaagccatttaaatacaaccatcctcagggattcttcagccatcgctgatctcccgcgcagaccgttgtttcccccaaggcctcaccctgagcactgggcttctgctttctgctctggcccacatgtgactcttgatattctccaaagacaccagccaattaaaaagcgtcacctga

SEQ ID NO: 389713 - DNA, 646 bp, Homo sapiens
tcgcagacctctgccgtgaccatgagtacgggatgactgacgcccatgagaaatacatggagctgcacttcaccaaagacattgtggatgcgggactggctggggacaccaatctctactacatggcgctcatcgaaaggggcacagccaaactgcaggccgctgtggtgttgaaccctggctactcctccatcccacctgttttccagctctgtttgaactggaaaggggagaaaaccaacagcaacgatgacaacattcgggccatggagggcgaagtcaatgtgtgctacaaggagctgtgtggcccttggcccagccaccagctgttgaccaaccagctgcagcggctgtgtgtgctgctggatgtttacctggagaccgagagccatgacgacagtgtggaggggcccaaggaatttccccaggagaagatgtgtctgcggctcttcaggggtcctagcaggatgaagccatttaaatacaaccatcctcagggattcttcagccatcgctgatctcccgcgcagaccgttgtttcccccaaggcctcaccctgagcactgggcttctgctttctgctctggcccacatgtgactcttgatattctccaaagacaccagccaattaaaaagcgtcacctga

SEQ ID NO: 389714 - DNA, 1104 bp, Homo sapiens
agaccacttgaagagaggttcctaatactagacagatggagagtggcttggctgtttccccctgcatattggggttgaaaacttaaatgtgtagttccagtccttctatgcagagtctctcctgccctccctccttcctgcagtctcaccacgccaccacctccctcgggggcctccgcgctgagcttccggcctctacgcctcgcttccggtcggccgccccttccttacttccggttctctatggtgcgcgggcaagctttgctccgcctccggcagtggcttactcccggtgccaggttcttggagctgtgaggaggaacaaccatgtcatcagaatcgagcaaaaaacggaagcccaaagtgatccgaagcgatggagccccagctgaaggaaagcggaatcgatctgacaccgagcaggaaggtaaatactacagtgaggaggccgaggtggatctgcgggaccctggcagagactatgagttatacaagtacacctgccaggagctacagaggctgatggctgagatccaagacctgaagagcaggggtggcaaggatgtggcaatagaaatagaagaacggaggatccagagctgtgtgcatttcatgactctaaagaagcttaaccgattagcccacatcaggttgaagaaaggaagagatcagacccacgaggctaagcagaaagtagatgcctatcatctgcagctccagaacctgttgtatgaggtgatgcacctacagaaggagatcaccaaatgtttggagtttaagtcaaagcatgaagaaattgatctggtcagtttagaggagttttataaggaggctccaccagatatcagcaaggccgaagtcaccatgggagaccctcaccagcaaacactggcacgtctggactgggagctggagcagcggaaaaggctggcagagaagtaccgagagtgcctatctaacaaggagaagattctcaaggagattgaggtgaagaaggagtacctgagcagcctccagccccgcctcaacagcatcatgcaggtggggccctctggccttttgctttgccttcaccactgaccaggcgctgccagaagtcatgtc

SEQ ID NO: 389715 - DNA, 715 bp, Homo sapiens
ctggagtcggagtttgcagtgagcggggattgcgccactgcacttcagcctgggtgagagagcaaaactctgtctcaaataaaaataaaaataaaaaagagccagtattttcctccttgctcctgggaaggagaaggaactggccccgtacaaccagggattcaggacacgtgttactagctccagatgaggatttacacgaaaaaatcctgggccttgtttgtacagttcatgccaggggtaggaaatacctgaagctttcaaatactgcgttagagttgtgactctgtcctgggcaagtcaggcctaaaatggagaaactggtgatgcactcctcaaaaagccaagtgtaaaatgaggttaatgccctccctgacttgttgccttcactggcgtggcatattatggtaaaaataataattaagaagtaaggttatgcaggcaaatcctctagcgccgaaatcttccccgccgcgctaccaggttctttcgtgttatcttggacataacacaacattaattcaactactcggtggagcgcccactagctgctggacactctcttaggccctgggcacagtgaacgagaagcatgtgtctttgtttttacagtctcaccacgccaccacctccctcgggggcctccgcgctgagcttccggcctctacgcctcgcttccggtcggccgccccttccttacttccggttctctatg

SEQ ID NO: 389716 - DNA, 2507 bp, Homo sapiens
agaccacttgaagagaggttcctaatactagacagatggagagtggcttggctgtttccccctgcatattggggttgaaaacttaaatgtgtagttccagtccttctatgcagagtctctcctgccctccctccttcctgcagtctcaccacgccaccacctccctcgggggcctccgcgctgagcttccggcctctacgcctcgcttccggtcggccgccccttccttacttccggttctctatggtgcgcgggcaagctttgctccgcctccggcagtggcttactcccggtgccaggttcttggagctgtgaggaggaacaaccatgtcatcagaatcgagcaaaaaacggaagcccaaagtgatccgaagcgatggagccccagctgaaggaaagcggaatcgatctgacaccgagcaggaaggtaaatactacagtgaggaggccgaggtggatctgcgggaccctggcagagactatgagttatacaagtacacctgccaggagctacagaggctgatggctgagatccaagacctgaagagcaggggtggcaaggatgtggcaatagaaatagaagaacggaggatccagagctgtgtgcatttcatgactctaaagaagcttaaccgattagcccacatcaggttgaagaaaggaagagatcagacccacgaggctaagcagaaagtagatgcctatcatctgcagctccagaacctgttgtatgaggtgatgcacctacagaaggagatcaccaaatgtttggagtttaagtcaaagcatgaagaaattgatctggtcagtttagaggagttttataaggaggctccaccagatatcagcaaggccgaagtcaccatgggagaccctcaccagcaaacactggcacgtctggactgggagctggagcagcggaaaaggctggcagagaagtaccgagagtgcctatctaacaaggagaagattctcaaggagattgaggtgaagaaggagtacctgagcagcctccagccccgcctcaacagcatcatgcaggcttcccttccggtgcaggagtacctgtttatgccattcgaccaggctcacaagcagtatgagacagccagacacctgccgcctcccctctatgtcctctttgttcaggccactgcgtatgggcaggcctgtgataagacgttatctgtggcaatcgaaggcagtgtggatgaagccaaggctctgttcaaacctccagaggactcccaagatgacgagagtgactcagatgccgaggaggagcagactacgaagcgccggagacccacactgggggttcagttggacgacaaacgcaaggagatgctgaagaggcacccactgtctgtcatgctcgacctgaagtgcaaagatgacagtgtgcttcacctgactttctactacctcatgaacctcaacatcatgacagtaaaagccaaagtgacaactgccatggagctgatcacccccatcagtgcaggtgacttgctgtctcctgactcagtcctgagttgcttgtatcctggggatcatggaaagaaaactccgaatccagccaatcagtatcagtttgataaagttggcatcctgactttgagcgactatgtacttgagctaggtcacccctatttgtgggtgcagaagctgggtggcctccacttccccaaagagcagccccagcaaacagtgattgctgaccactcgctgagcgccagccacatggagaccaccatgaaacttctgaagaccagggtgcagtcccgcctggccctccacaaacagtttgcatccctagaacatggcattgtgccagttaccagtgattgccagtacctcttccctgccaaggttgtctctcgcctggtgaaatgggtgacaattgcccatgaggattacatggagctgcacttcaccaaagacattgtggatgcgggactggctggggacaccaatctctactacatggcgctcatcgaaaggggcacagccaaactgcaggccgctgtggtgttgaaccctggctactcctccatcccacctgttttccagctctgtttgaactggaaaggggagaaaaccaacagcaacgatgacaacattcgggccatggagggcgaagtcaatgtgtgctacaaggagctgtgtggcccttggcccagccaccagctgttgaccaaccagctgcagcggctgtgtgtgctgctggatgtttacctggagaccgagagccatgacgacagtgtggaggggcccaaggaatttccccaggagaagatgtgtctgcggctcttcaggggtcctagcaggatgaagccatttaaatacaaccatcctcagggattcttcagccatcgctgatctcccgcgcagaccgttgtttcccccaaggcctcaccctgagcactgggcttctgctttctgctctggcccacatgtgactcttgatattctccaaagacaccagccaattaaaaagcgtcacctga

SEQ ID NO: 389717 - DNA, 5637 bp, Homo sapiens
  misc_feature (3339)..(3339): n is a, c, g, or t
  misc_feature (3345)..(3345): n is a, c, g, or t
  misc_feature (3372)..(3372): n is a, c, g, or t
  misc_feature (3389)..(3389): n is a, c, g, or t
  misc_feature (3401)..(3401): n is a, c, g, or t
  misc_feature (3710)..(3710): n is a, c, g, or t
  misc_feature (3746)..(3746): n is a, c, g, or t
  misc_feature (4170)..(4170): n is a, c, g, or t
  misc_feature (4216)..(4216): n is a, c, g, or t
  misc_feature (4249)..(4249): n is a, c, g, or t
  misc_feature (4274)..(4274): n is a, c, g, or t
  misc_feature (4278)..(4278): n is a, c, g, or t
  misc_feature (4288)..(4288): n is a, c, g, or t
  misc_feature (4315)..(4315): n is a, c, g, or t
  misc_feature (4321)..(4322): n is a, c, g, or t
  misc_feature (4369)..(4369): n is a, c, g, or t
  misc_feature (4383)..(4385): n is a, c, g, or t
  misc_feature (4742)..(4742): n is a, c, g, or t
  misc_feature (4760)..(4760): n is a, c, g, or t
  misc_feature (4766)..(4766): n is a, c, g, or t
  misc_feature (4804)..(4804): n is a, c, g, or t
  misc_feature (4806)..(4806): n is a, c, g, or t
  misc_feature (4809)..(4809): n is a, c, g, or t
agaccacttgaagagaggttcctaatactagacagatggagagtggcttggctgtttccccctgcatattggggttgaaaacttaaatgtgtagttccagtccttctatgcagagtctctcctgccctccctccttcctgcagtctcaccacgccaccacctccctcgggggcctccgcgctgagcttccggcctctacgcctcgcttccggtcggccgccccttccttacttccggttctctatggtgcgcgggcaagctttgctccgcctccggcagtggcttactcccggtgccaggttcttggagctgtgaggaggaacaaccatgtcatcagaatcgagcaaaaaacggaagcccaaagtgatccgaagcgatggagccccagctgaaggaaagcggaatcgatctgacaccgagcaggaaggtaaatactacagtgaggaggccgaggtggatctgcgggaccctggcagagactatgagttatacaagtacacctgccaggagctacagaggctgatggctgagatccaagacctgaagagcaggggtggcaaggatgtggcaatagaaatagaagaacggaggatccagagctgtgtgcatttcatgactctaaagaagcttaaccgattagcccacatcaggttgaagaaaggaagagatcagacccacgaggctaagcagaaagtagatgcctatcatctgcagctccagaacctgttgtatgaggtgatgcacctacagaaggagatcaccaaatgtttggagtttaagtcaaagcatgaagaaattgatctggtcagtttagaggagttttataaggaggctccaccagatatcagcaaggccgaagtcaccatgggagaccctcaccagcaaacactggcacgtctggactgggagctggagcagcggaaaaggctggcagagaagtaccgagagtgcctatctaacaaggagaagattctcaaggagattgaggtgaagaaggagtacctgagcagcctccagccccgcctcaacagcatcatgcaggcttcccttccggtgcaggagtacctgtttatgccattcgaccaggctcacaagcagtatgagacagccagacacctgccgcctcccctctatgtcctctttgttcaggccactgcgtatgggcaggcctgtgataagacgttatctgtggcaatcgaaggcagtgtggatgaagccaaggctctgttcaaacctccagaggactcccaagatgacgagagtgactcagatgccgaggaggagcagactacgaagcgccggagacccacactgggggttcagttggacgacaaacgcaaggagatgctgaagaggcacccactgtctgtcatgctcgacctgaagtgcaaagatgacagtgtgcttcacctgactttctactacctcatgaacctcaacatcatgacagtaaaagccaaagtgacaactgccatggagctgatcacccccatcagtgcaggtgacttgctgtctcctgactcagtcctgagttgcttgtatcctggggatcatggaaagaaaactccgaatccagccaatcagtatcagtttgataaagttggcatcctgactttgagcgactatgtacttgagctaggtcacccctatttgtgggtgcagaagctgggtggcctccacttccccaaagagcagccccagcaaacagtgattgctgaccactcgctgagcgccagccacatggagaccaccatgaaacttctgaagaccagggtgcagtcccgcctggccctccacaaacagtttgcatccctagaacatggcattgtgccagttaccagtgattgccagtacctcttccctgccaaggttgtctctcgcctggtgaaatgggtgacaattgcccatgaggattacatggagctgcacttcaccaaagacattgtggatgcgggactggctggggacaccaatctctactacatggcgctcatcgaaaggggcacagccaaactgcaggccgctgtggtgttgaaccctggctactcctccatcccacctgttttccagctctgtttgaactggaaaggggagaaaaccaacagcaacgatgacaacattcgggccatggagggcgaagtcaatgtgtgctacaaggagctgtgtggcccttggcccagccaccagctgttgaccaaccagctgcagcggctgtgtgtgctgctggatgtttacctggagaccgagagccatgacgacagtgtggaggggcccaaggaatttccccaggagaagatgtgtctgcggctcttcaggggtcctagcaggatgaagccatttaaatacaaccatcctcagggattcttcagccatcgctgatctcccgcgcagaccgttgtttcccccaaggcctcaccctgagcactgggcttctgctttctgctctggcccacatgtgactcttgatattctccaaagacaccagccaattaaaaagcgtcacctgaccagtggcctttgtctgtggttcctggcaaggtggctttgcagtctggaagggcaggtgggagctgtgacacagtgtgaaaaagcatttgtagagagactttttctcagcagccaataaaagcagagtggaaaaagattccaattctgcagagagatgctcacctcttgtctacgcacaccctatttgtgctttgcggggtgaggtcctcatgatcttgtatttattatcccaagttcctgctgttaagaggtggtaggagaagccaaaggcagcagagcacaaaaagcaaaactcttccctccccacccgctcttcccattagtcctgtcagggttgccgatggacaaattgtctctgatcgttggatgttataaatgtctgacagtgcagtgcaaacagaagacaaactcagttgatccttgaacaactcaggggttaggggcaccaacaccccctgccctgcacagttgaaaaatccgtgtataacttttgactccctaaaaacttaactaatagcctgctgttgaccagtagtatgctattagtagttacttactgctaacatagtcagtacatattttcagtatatattttgtatcttatacactgtattcttacaatacagtaaactagagaaaagaaaatgttataaggaaagtcacaagggggcctgagtgcagtggctcacgtctgtaatcccagcactttgggaggccaaggcgggtggatcacttgaggtcaggagtttgagaccagcctggccgacatggtgaaaccctgtctctactaaaaacatggaaattagccaagcgtggtggcgcatgcctgtngtcccngttactcaggaggctgaggcagaattncttgaacccatgaggcngaggttgcagtnagccgagatcacgctcctgcgctccggcttgggcgagagtgagactccgtctcaaaaataaataaataagaaagccataaggaagaaaatatatatctactattaagtagaagtggatcaccataaaggtcttcacatactgtctcagggttgaatagtctaaggaagaggaggggttggtcttggtgtctcagggatggcagaggcagaaaaagtgggggaggtggagggggaggcaggcaccactgttatttttattgaacaaaatctgtgcagggactcatgactgtaatcctagtactttggaangctaaggcgggaggatcccttgaggccaggagttcnggtccagcctgggcaacgtagtgagagaccctgtatctacaaaaaatttaaaaatcagccaggtgtggtggtatgcaccaatggtcccagttactcagaaggctgaggtgggcggatgactggagtccaggagttcaaggtagcagtgagctattcatcgtgcctgtactgtactccagcctgggaaacaatgcgagtccctatctctaaaaaattttaaaaaaagaaatctgcatataatagacccacagagtccaaactattgttcagagatcaactgtacttcacagagagtaattctaagtcttacaggatttcatggagatggcgagagtggtgttggagaatcaatcacatacagagatacagtacagtgatcgaccaaggtaacatttgaggagaatattttttttttattgagacngggtcttgctctgttgtccaggctggagtgcagtggcacgaacacngctcactgccgcctcaacctctcctgggttcangtgatcctcctgcctcagcctcccnagtngctgggaccncaggtgtgtgccaccatttctggctantttttnnattttttgtagaggcgggatcccactatttttcccaggctggtctcnaactcctgggctcnnntgatcctcccacctcggcctcccaaagtgctaggattataggcatgagccaccacacccggcctgagtagagtctttaaggtaatgacaaaagtgcctcaaaatataattatttgattaagagaagtcttgggaagataggtaacaacctttaaaatgttcataaaattacatcctttgtaatactcctgcaagtcaaagtaaaggatggcatagactattcttggacagttttgtcaaaaagtgtatcttgaccccaccatcagtactccattcttcattttaaaaaataagatgggctgggcacagtggcttacgcctttaatatcagtactttgggaggctggtgggcggatcncctgagatcaggagttcnagaccngcctggccaacatggtgaaaccccgtctctactaaaantncanaaattagctgggcatggtggtgcgcgcctgtgatcccagccgctcgggaggctgaggcaggagaattgcttgaatccccgaggcggaggttgcactgagccgagatggtgccactgcaccatctggacaacagagcaagactccgtcttggaaaaaaaaaaaaagatgtagaaatgtaaaaatatttgagaattattacatagttgcagatatagtttgctaactccaagaggaaacacattttattttttgtgattgtcctgatgaaactttatccccccacaacatgctgttaagcttggttcccatcataagcatattccccctaagtggacttttactgattttccatggataatgcagacctccagtataaaagctattcctccaggtctctctgccgaccactgagtatcccagggataaggattttaagagtaagagctaagtaataaattcctgcccctagcagggccgttcattttacggatgaaaacctgatccttgctgggcgtggtggctcatgcctataatccaagccattcagaaggctgaggcaggaggattgcttgagcccaggagttcaagaccagcctgtgtaatatagtgagtccccattcagaaaaagaaaagaaacctgagcctagcaaggagaagagaatggtacctttggtggctgttaaatcaccaccgctaccctcagtccacatcagtcctttgaattccaaaggcaggtactctctagctcagaggtcctcgaacttcagcctgtgtgggagtcacccatcctggcacctgattagaaacacagacacccaagtcccattc

SEQ ID NO: 389718 - DNA, 2505 bp, Homo sapiens
gctgggagatggggcggggctgggcgctccgggactgaggtgctgatcgcccaaagggcgcccctgggctggggtctgacccggcttctcctccctcactacccgcggtccccggcctctcggcgctgcgctgttacctcatccgaaaagtgttcgctgcagcatcctcaggcttcacgttggagcctcttgattgtggtgttcagcattatttaagatcacctatgcatcatctgaagccacagtcccaggtcatcttcatcaccttccccagtggaatgcctcctgtgttaaagcccacaacaacccctgtggaggaacaaccatgtcatcagaatcgagcaaaaaacggaagcccaaagtgatccgaagcgatggagccccagctgaaggaaagcggaatcgatctgacaccgagcaggaaggtaaatactacagtgaggaggccgaggtggatctgcgggaccctggcagagactatgagttatacaagtacacctgccaggagctacagaggctgatggctgagatccaagacctgaagagcaggggtggcaaggatgtggcaatagaaatagaagaacggaggatccagagctgtgtgcatttcatgactctaaagaagcttaaccgattagcccacatcaggttgaagaaaggaagagatcagacccacgaggctaagcagaaagtagatgcctatcatctgcagctccagaacctgttgtatgaggtgatgcacctacagaaggagatcaccaaatgtttggagtttaagtcaaagcatgaagaaattgatctggtcagtttagaggagttttataaggaggctccaccagatatcagcaaggccgaagtcaccatgggagaccctcaccagcaaacactggcacgtctggactgggagctggagcagcggaaaaggctggcagagaagtaccgagagtgcctatctaacaaggagaagattctcaaggagattgaggtgaagaaggagtacctgagcagcctccagccccgcctcaacagcatcatgcaggcttcccttccggtgcaggagtacctgtttatgccattcgaccaggctcacaagcagtatgagacagccagacacctgccgcctcccctctatgtcctctttgttcaggccactgcgtatgggcaggcctgtgataagacgttatctgtggcaatcgaaggcagtgtggatgaagccaaggctctgttcaaacctccagaggactcccaagatgacgagagtgactcagatgccgaggaggagcagactacgaagcgccggagacccacactgggggttcagttggacgacaaacgcaaggagatgctgaagaggcacccactgtctgtcatgctcgacctgaagtgcaaagatgacagtgtgcttcacctgactttctactacctcatgaacctcaacatcatgacagtaaaagccaaagtgacaactgccatggagctgatcacccccatcagtgcaggtgacttgctgtctcctgactcagtcctgagttgcttgtatcctggggatcatggaaagaaaactccgaatccagccaatcagtatcagtttgataaagttggcatcctgactttgagcgactatgtacttgagctaggtcacccctatttgtgggtgcagaagctgggtggcctccacttccccaaagagcagccccagcaaacagtgattgctgaccactcgctgagcgccagccacatggagaccaccatgaaacttctgaagaccagggtgcagtcccgcctggccctccacaaacagtttgcatccctagaacatggcattgtgccagttaccagtgattgccagtacctcttccctgccaaggttgtctctcgcctggtgaaatgggtgacaattgcccatgaggattacatggagctgcacttcaccaaagacattgtggatgcgggactggctggggacaccaatctctactacatggcgctcatcgaaaggggcacagccaaactgcaggccgctgtggtgttgaaccctggctactcctccatcccacctgttttccagctctgtttgaactggaaaggggagaaaaccaacagcaacgatgacaacattcgggccatggagggcgaagtcaatgtgtgctacaaggagctgtgtggcccttggcccagccaccagctgttgaccaaccagctgcagcggctgtgtgtgctgctggatgtttacctggagaccgagagccatgacgacagtgtggaggggcccaaggaatttccccaggagaagatgtgtctgcggctcttcaggggtcctagcaggatgaagccatttaaatacaaccatcctcagggattcttcagccatcgctgatctcccgcgcagaccgttgtttcccccaaggcctcaccctgagcactgggcttctgctttctgctctggcccacatgtgactcttgatattctccaaagacaccagccaattaaaaagcgtcacctga

SEQ ID NO: 389719 - DNA, 2389 bp, Homo sapiens
gctgggagatggggcggggctgggcgctccgggactgaggtgctgatcgcccaaagggcgcccctgggctggggtctgacccggcttctcctccctcactacccgcggtccccggcctctcggcgctgcgctgttacctcatccgaaaagtgttcgctgcagcatcctcaggcttcacgttggagcctcttgattgtggaggaacaaccatgtcatcagaatcgagcaaaaaacggaagcccaaagtgatccgaagcgatggagccccagctgaaggaaagcggaatcgatctgacaccgagcaggaaggtaaatactacagtgaggaggccgaggtggatctgcgggaccctggcagagactatgagttatacaagtacacctgccaggagctacagaggctgatggctgagatccaagacctgaagagcaggggtggcaaggatgtggcaatagaaatagaagaacggaggatccagagctgtgtgcatttcatgactctaaagaagcttaaccgattagcccacatcaggttgaagaaaggaagagatcagacccacgaggctaagcagaaagtagatgcctatcatctgcagctccagaacctgttgtatgaggtgatgcacctacagaaggagatcaccaaatgtttggagtttaagtcaaagcatgaagaaattgatctggtcagtttagaggagttttataaggaggctccaccagatatcagcaaggccgaagtcaccatgggagaccctcaccagcaaacactggcacgtctggactgggagctggagcagcggaaaaggctggcagagaagtaccgagagtgcctatctaacaaggagaagattctcaaggagattgaggtgaagaaggagtacctgagcagcctccagccccgcctcaacagcatcatgcaggcttcccttccggtgcaggagtacctgtttatgccattcgaccaggctcacaagcagtatgagacagccagacacctgccgcctcccctctatgtcctctttgttcaggccactgcgtatgggcaggcctgtgataagacgttatctgtggcaatcgaaggcagtgtggatgaagccaaggctctgttcaaacctccagaggactcccaagatgacgagagtgactcagatgccgaggaggagcagactacgaagcgccggagacccacactgggggttcagttggacgacaaacgcaaggagatgctgaagaggcacccactgtctgtcatgctcgacctgaagtgcaaagatgacagtgtgcttcacctgactttctactacctcatgaacctcaacatcatgacagtaaaagccaaagtgacaactgccatggagctgatcacccccatcagtgcaggtgacttgctgtctcctgactcagtcctgagttgcttgtatcctggggatcatggaaagaaaactccgaatccagccaatcagtatcagtttgataaagttggcatcctgactttgagcgactatgtacttgagctaggtcacccctatttgtgggtgcagaagctgggtggcctccacttccccaaagagcagccccagcaaacagtgattgctgaccactcgctgagcgccagccacatggagaccaccatgaaacttctgaagaccagggtgcagtcccgcctggccctccacaaacagtttgcatccctagaacatggcattgtgccagttaccagtgattgccagtacctcttccctgccaaggttgtctctcgcctggtgaaatgggtgacaattgcccatgaggattacatggagctgcacttcaccaaagacattgtggatgcgggactggctggggacaccaatctctactacatggcgctcatcgaaaggggcacagccaaactgcaggccgctgtggtgttgaaccctggctactcctccatcccacctgttttccagctctgtttgaactggaaaggggagaaaaccaacagcaacgatgacaacattcgggccatggagggcgaagtcaatgtgtgctacaaggagctgtgtggcccttggcccagccaccagctgttgaccaaccagctgcagcggctgtgtgtgctgctggatgtttacctggagaccgagagccatgacgacagtgtggaggggcccaaggaatttccccaggagaagatgtgtctgcggctcttcaggggtcctagcaggatgaagccatttaaatacaaccatcctcagggattcttcagccatcgctgatctcccgcgcagaccgttgtttcccccaaggcctcaccctgagcactgggcttctgctttctgctctggcccacatgtgactcttgatattctccaaagacaccagccaattaaaaagcgtcacctga

SEQ ID NO: 389720 - DNA, 1560 bp, Homo sapiens
gctgggagatggggcggggctgggcgctccgggactgaggtgctgatcgcccaaagggcgcccctgggctggggtctgacccggcttctcctccctcactacccgcggtccccggcctctcggcgctgcgctgttacctcatccgaaaagtgttcgctgcagcatcctcaggcttcacgttggagcctcttgattgtggaggaacaaccatgtcatcagaatcgagcaaaaaacggaagcccaaagtgatccgaagcgatggagccccagctgaaggaaagcggaatcgatctgacaccgagcagatgacgagagtgactcagatgccgaggaggagcagactacgaagcgccggagacccacactgggggttcagttggacgacaaacgcaaggagatgctgaagaggcacccactgtctgtcatgctcgacctgaagtgcaaagatgacagtgtgcttcacctgactttctactacctcatgaacctcaacatcatgacagtaaaagccaaagtgacaactgccatggagctgatcacccccatcagtgcaggtgacttgctgtctcctgactcagtcctgagttgcttgtatcctggggatcatggaaagaaaactccgaatccagccaatcagtatcagtttgataaagttggcatcctgactttgagcgactatgtacttgagctaggtcacccctatttgtgggtgcagaagctgggtggcctccacttccccaaagagcagccccagcaaacagtgattgctgaccactcgctgagcgccagccacatggagaccaccatgaaacttctgaagaccagggtgcagtcccgcctggccctccacaaacagtttgcatccctagaacatggcattgtgccagttaccagtgattgccagtacctcttccctgccaaggttgtctctcgcctggtgaaatgggtgacaattgcccatgaggattacatggagctgcacttcaccaaagacattgtggatgcgggactggctggggacaccaatctctactacatggcgctcatcgaaaggggcacagccaaactgcaggccgctgtggtgttgaaccctggctactcctccatcccacctgttttccagctctgtttgaactggaaaggggagaaaaccaacagcaacgatgacaacattcgggccatggagggcgaagtcaatgtgtgctacaaggagctgtgtggcccttggcccagccaccagctgttgaccaaccagctgcagcggctgtgtgtgctgctggatgtttacctggagaccgagagccatgacgacagtgtggaggggcccaaggaatttccccaggagaagatgtgtctgcggctcttcaggggtcctagcaggatgaagccatttaaatacaaccatcctcagggattcttcagccatcgctgatctcccgcgcagaccgttgtttcccccaaggcctcaccctgagcactgggcttctgctttctgctctggcccacatgtgactcttgatattctccaaagacaccagccaattaaaaagcgtcacctga

SEQ ID NO: 389721 - DNA, 384 bp, Homo sapiens
aggccactgcgtatgggcaggcctgtggtgagtatggggcctgggtgaggacaaggggctatgggagcagcagctgtggccgagtgaatcagttggaagcagtacctgctcaggaaatttctcagtcctgcccgaagccctcaggtgacagaagctttcttccctctgcattgcccagcatggctgctctgaccagctggcctaaggctggattaacctgatgggtatttcacaatgggtggctttgagtcattcgtgagcctggctggacagctcttgggtgcagaacccaggcagcctgtctgggctcccaggtgctcaccccatcaaggcacgcttggcagttagatcagtgcctcttgctctgcttcagggtgggggtgc

SEQ ID NO: 389722 - DNA, 140 bp, Homo sapiens
tttcaattttcaaccactttctgtgtgcaggcataaaaagcaaacagcactaacatgaaggatggggaatgcttccattaaccagtaaagactgaatatgctccccccccacaccccacacatatccacaaacctacata

SEQ ID NO: 389723 - DNA, 452 bp, Homo sapiens
aaaatgcttccttcagggccttacaatttaatggaggaaaaccacacaaacctaactattataagtctggtaagtcctatattagtatttgcacctcaaaaacagtatttagggatagagtaaaagccagtggcttctctgtgaccctagctgggtatgcacagagcttctaaatgaccctcaaatttataagtaaaatttaaaatcaggaaaattaccttgtgctttgcttttgttgcttccaatttggatttgtaaattaacaaatggaaattctaagtgacaggcaggtgtgaaagagaactcaaagaaacagctgctttaaggaataatattgaaaacatataaaagctgttaataaataaaaagatgcccatatgtgtattttagaaatccaaaacacttatttcctggcttcttcacaatccctaagtgtaaatagatgttttaaa

SEQ ID NO: 389724 - DNA, 769 bp, Homo sapiens
ctgcagacgaggactatccagccctaggggtacgggagagggaaagacgaggccgagagggaccctgactttgcagcagggtgtctgggcattggtggctccacctgcagaaccaaaagaatccaccaggtctgatgggcaaaggttcctcctcccctgctgcagctaacatggaggacttgcatggagatggtggagtcacaggatgaacacaggctaagtcactacctggaggacagctgcctggacagtcacctggatcgcagtggactgcatgaatgaaaacaaagtgagattgaagagaatgaaaacaaatttgttcccaggttcttggggcttgaaaagatccctttatggagtgaagccactttttctcaacgttctgaaactcacgctgctccagcctgaggcttccagaagtgccctacaggtgcctgagtgtgtgggcctgctgcctgcaagtgcacccggggagtgcggggttggcgtttacagatgtgaccaggggctaagagactggggcgcagcctctccccaacacggactctatttccccacacgctcacttcccctccctcaactgcagtcttctttctctataactaacacagggatcactgcctctattttcttagaggtatagttcatcgctcacccctcacgcagtaagtatgtgttcaggcacagagcaaagggctgagagaagggagctgctgtgggtgcttcaaggaacttacacagaagcagttaacagcagcaggaagatatg

SEQ ID NO: 389725 - DNA, 334 bp, Homo sapiens
cattgtcggtttaaaattgatcattattgagtcttttaggtcaattactacttttccatttgctttctactttctaacttggatgattcagattttccgagaaccaacacttaatacttgcttagggttggttagttggtttgttttttgagacggggcaacatagtgagaccctatctttacaaaaaattaaaaaaattaaccaggtgtggtgtcacatgcctgtagtcccagctacttgggaggctggcttgagcataggaggttgaggctactgtgagtcttgattgtgtcacctcactctagcctgggagacagagcaagaccctgcctc

SEQ ID NO: 389726 - DNA, 562 bp, Homo sapiens
gatgagaaatgaccatttctggagctagagaaagacaaggagggtgaataattacagaaataggttagatgcacgtgaatggaagagagatattcaggaactgtttattgctactgtagatgaaaagaagtaaggacaagtgagtgatttaggcaatcagtaagaagcttgatcttactttctatttatcactctttaggaacaggctgcacagctcagcacaacattccaagctcaaaatagaagccttctcagtgagctccagcacgcccagaggactgttaataacgatgatccatgtgttttactctaaagtgctaaatatgggagtttcctttttttactctttgtcactgatgacacaacagaaaagaaactgtagaccttgggacaatcaacatttaaataaactttataattattttttcaaactttcatatagagttataagattatgatgctggtatctggtaaaatgtacatcccagtagtccaatagtttaaatgtttattgcttcctttaagagattataaattgtataagggacattgtatcactgcc

SEQ ID NO: 389727 - DNA, 453 bp, Homo sapiens
ttgttttaaaataaagtctctctattttacaggactctttttattttaaaactttttttttccagaaacttaggcagtgctggggagtagtatgtccccaggttcagtaagcaaaatgacttcctttgcttattaaacaaacaccagaaattccagcacgcccagaggactgttaataacgatgatccatgtgttttactctaaagtgctaaatatgggagtttcctttttttactctttgtcactgatgacacaacagaaaagaaactgtagaccttgggacaatcaacatttaaataaactttataattattttttcaaactttcatatagagttataagattatgatgctggtatctggtaaaatgtacatcccagtagtccaatagtttaaatgtttattgcttcctttaagagattataaattgtataagggacattgtatcactgcc

SEQ ID NO: 389728 - DNA, 2534 bp, Homo sapiens
ctccaggctgtggaacctttgttctttcactctttgcaataaatcttgctgctgctcactctttgggtccacactgcctttatgagctgtaacactcactgggaatgtctgcagcttcactcctgaagccagcgagaccacgaacccaccaggaggaacaaacaactccagacgcgcagccttaagagctgtaacactcaccgcgaaggtctgcagcttcactcctgagccagccagaccacgaacccaccagaaggaagaaactccaaacacatccgaacatcagaaggagcaaactcctgacacgccacctttaagaaccgtgacactcaacgctagggtccgcggcttcattcttgaagtcagtgagaccaagaacccaccaattccggacacgctaattgttgtagatcatcacttcaaggtgcccatatctttctagtggaaaaattattctggcctccgctgcatacaaatcaggcaaccagaattctacatatataaggcaaagtaacatcctagacatggctttagagatccacatgtcagaccccatgtgcctcatcgagaactttaatgagcagctgaaggttaatcaggaagctttggagatcctgtctgccattacgcaacctgtagttgtggtagcgattgtgggcctctatcgcactggcaaatcctacctgatgaacaagctggctgggaagaacaagggcttctctgttgcatctacggtgcagtctcacaccaagggaatttggatatggtgtgtgcctcatcccaactggccaaatcacacattagttctgcttgacaccgagggcctgggagatgtagagaaggctgacaacaagaatgatatccagatctttgcactggcactcttactgagcagcacctttgtgtacaatactgtgaacaaaattgatcagggtgctatcgacctactgcacaatgtgacagaactgacagatctgctcaaggcaagaaactcacccgaccttgacagggttgaagatcctgctgactctgcgagcttcttcccagacttagtgtggactctgagagatttctgcttaggcctggaaatagatgggcaacttgtcacaccagatgaatacctggagaattccctaaggccaaagcaaggtagtgatcaaagagttcaaaatttcaatttgccccgtctgtgtatacagaagttctttccaaaaaagaaatgctttatctttgacttacctgctcaccaaaaaaagcttgcccaacttgaaacactgcctgatgatgagctagagcctgaatttgtgcaacaagtgacagaattctgttcctacatctttagccattctatgaccaagactcttccaggtggcatcatggtcaatggatctcgtctaaagaacctggtgctgacctatgtcaatgccatcagcagtggggatctgccttgcatagagaatgcagtcctggccttggctcagagagagaactcagctgcagtgcaaaaggccattgcccactatgaccagcaaatgggccagaaagtgcagctgcccatggaaaccctccaggagctgctggacctgcacaggaccagtgagagggaggccattgaagtcttcatgaaaaactctttcaaggatgtagaccaaagtttccagaaagaattggagactctactagatgcaaaacagaatgacatttgtaaacggaacctggaagcatcctcggattattgctcggctttacttaaggatatttttggtcctctagaagaagcagtgaagcagggaatttattctaagccaggaggccataatctcttcattcagaaaacagaagaactgaaggcaaagtactatcgggagcctcggaaaggaatacaggctgaagaagttctgcagaaatatttaaagtccaaggagtctgtgagtcatgcaatattacagactgaccaggctctcacagagacggaaaaaaagaagaaagaggcacaagtgaaagcagaagctgaaaaggctgaagcgcaaaggttggcggcgattcaaaggcagaacgagcaaatgatgcaggagagggagagactccatcaggaacaagtgagacaaatggagatagccaaacaaaattggctggcagagcaacagaaaatgcaggaacaacagatgcaggaacaggctgcacagctcagcacaacattccaagctcaaaatagaagccttctcagtgagctccagcacgcccagaggactgttaataacgatgatccatgtgttttactctaaagtgctaaatatgggagtttcctttttttactctttgtcactgatgacacaacagaaaagaaactgtagaccttgggacaatcaacatttaaataaactttataattattttttcaaactttcatatagagttataagattatgatgctggtatctggtaaaatgtacatcccagtagtccaatagtttaaatgtttattgcttcctttaagagattataaattgtataagggacattgtatcactgcc

SEQ ID NO: 389729 - DNA, 704 bp, Homo sapiens
tttgtgaaggtgcttgtgttttgtttttttaaatataccaataaaaaaaaaaaaaaaaaaaaaaaaaaaaaaaaaaaaaaaaagaatccaaggagtctgtgagtcatgcaatattacagactgaccaggctctcacagagacggaaaaaaagaagaaagaggcacaagtgaaagcagaagctgaaaaggctgaagcgcaaaggttggcggcgattcaaaggcagaacgagcaaatgatgcaggagagggagagactccatcaggaacaagtgagacaaatggagatagccaaacaaaattggctggcagagcaacagaaaatgcaggaacaacagatgcaggaacaggctgcacagctcagcacaacattccaagctcaaaatagaagccttctcagtgagctccagcacgcccagaggactgttaataacgatgatccatgtgttttactctaaagtgctaaatatgggagtttcctttttttactctttgtcactgatgacacaacagaaaagaaactgtagaccttgggacaatcaacatttaaataaactttataattattttttcaaactttcatatagagttataagattatgatgctggtatctggtaaaatgtacatcccagtagtccaatagtttaaatgtttattgcttcctttaagagattataaattgtataagggacattgtatcactgcc

SEQ ID NO: 389730 - DNA, 507 bp, Homo sapiens
ggttgaagatcctgctgactctgcgagcttcttcccagacttagtgtggactctgagagatttctgcttaggcctggaaatagatgggcaacttgtcacaccagatgaatacctggagaattccctaaggccaaagcaaggtaacagggacttcagttttagaaagatttttaaaaaagtaatctaagaaattatctcttttgtttaggtggttaaatttatggttttctatatatatatatattcacccagctctcctaaaaaataaataataaatatttttgtttataatgaacaagtagattcaatattaaattgcattttcctcattcttagaacaaattttcttttttactttccctgattagttaccattttgctttttacttagggtttatgaagatatattaatctaagtgacatcaggtggaaggacatttattcaaggtaaataaatgaaaatgagtgcaaagtctatgctaaataaatcctattttttattctcca

SEQ ID NO: 389731 - DNA, 2815 bp, Homo sapiens
ctccaggctgtggaacctttgttctttcactctttgcaataaatcttgctgctgctcactctttgggtccacactgcctttatgagctgtaacactcactgggaatgtctgcagcttcactcctgaagccagcgagaccacgaacccaccaggaggaacaaacaactccagacgcgcagccttaagagctgtaacactcaccgcgaaggtctgcagcttcactcctgagccagccagaccacgaacccaccagaaggaagaaactccaaacacatccgaacatcagaaggagcaaactcctgacacgccacctttaagaaccgtgacactcaacgctagggtccgcggcttcattcttgaagtcagtgagaccaagaacccaccaattccggacacgctaattgttgtagatcatcacttcaaggtgcccatatctttctagtggaaaaattattctggcctccgctgcatacaaatcaggcaaccagaattctacatatataaggcaaagtaacatcctagacatggctttagagatccacatgtcagaccccatgtgcctcatcgagaactttaatgagcagctgaaggttaatcaggaagctttggagatcctgtctgccattacgcaacctgtagttgtggtagcgattgtgggcctctatcgcactggcaaatcctacctgatgaacaagctggctgggaagaacaagggcttctctgttgcatctacggtgcagtctcacaccaagggaatttggatatggtgtgtgcctcatcccaactggccaaatcacacattagttctgcttgacaccgagggcctgggagatgtagagaaggctgacaacaagaatgatatccagatctttgcactggcactcttactgagcagcacctttgtgtacaatactgtgaacaaaattgatcagggtgctatcgacctactgcacaatgtgacagaactgacagatctgctcaaggcaagaaactcacccgaccttgacagggttgaagatcctgctgactctgcgagcttcttcccagacttagtgtggactctgagagatttctgcttaggcctggaaatagatgggcaacttgtcacaccagatgaatacctggagaattccctaaggccaaagcaaggtagtgatcaaagagttcaaaatttcaatttgccccgtctgtgtatacagaagttctttccaaaaaagaaatgctttatctttgacttacctgctcaccaaaaaaagcttgcccaacttgaaacactgcctgatgatgagctagagcctgaatttgtgcaacaagtgacagaattctgttcctacatctttagccattctatgaccaagactcttccaggtggcatcatggtcaatggatctcgtctaaagaacctggtgctgacctatgtcaatgccatcagcagtggggatctgccttgcatagagaatgcagtcctggccttggctcagagagagaactcagctgcagtgcaaaaggccattgcccactatgaccagcaaatgggccagaaagtgcagctgcccatggaaaccctccaggagctgctggacctgcacaggaccagtgagagggaggccattgaagtcttcatgaaaaactctttcaaggatgtagaccaaagtttccagaaagaattggagactctactagatgcaaaacagaatgacatttgtaaacggaacctggaagcatcctcggattattgctcggctttacttaaggatatttttggtcctctagaagaagcagtgaagcagggaatttattctaagccaggaggccataatctcttcattcagaaaacagaagaactgaaggcaaagtactatcgggagcctcggaaaggaatacaggctgaagaagttctgcagaaatatttaaagtccaaggagtctgtgagtcatgcaatattacagactgaccaggctctcacagagacggaaaaaaagaagaaaggtgagaagaaagtggaaattatgcaagatagaaagaaatctataaattttaaataaatttggcctggccctcatgggatgttaaactagagcaagaatggcaaagatgcttcttagctcctcaagcatatctgactggcatgatcctgcattgtggttacctggaagggaaaaacaacccctgggaattttatccaggaagttggaacaatcacaaacaaaagtgggaggcagaaggaagaggcacattaatcctagagaagattatctttttctcctcagaggcacaagtgaaagcagaagctgaaaaggctgaagcgcaaaggttggcggcgattcaaaggcagaacgagcaaatgatgcaggagagggagagactccatcaggaacaagtgagacaaatggagatagccaaacaaaattggctggcagagcaacagaaaatgcaggaacaacagatgcaggaacaggctgcacagctcagcacaacattccaagctcaaaatagaagccttctcagtgagctccagcacgcccagaggactgttaataacgatgatccatgtgttttactctaaagtgctaaatatgggagtttcctttttttactctttgtcactgatgacacaacagaaaagaaactgtagaccttgggacaatcaacatttaaataaactttataattattttttcaaactttcatatagagttataagattatgatgctggtatctggtaaaatgtacatcccagtagtccaatagtttaaatgtttattgcttcctttaagagattataaattgtataagggacattgtatcactgcc

SEQ ID NO: 389732 - DNA, 690 bp, Homo sapiens
atcccagcttatgaagactatctcaagctgttttcccatttagaggttgtggttgtggtggacaatacataatagttctgctttggctaaatttaaaggcctacttggcttaaatcaaaatgagttgttctgacttgatgtttttctgttgggttcttacaagtaatatttttagatgatctctagttaaagagaactaacctcttgagaatgtttgtcaaagttgggcagtttgtgaagttatttaacagaaattttatgaaagttgtgaggagtgggtgatcttattttaattctggggttgattaaaggccacctagaggatcatacagaatttatttggactttccatgatatacaatcccttggcagaacttttctttttaattctaatttaacaatattaggtataattgaatgaaactctcttatttagtttagtatcaagaatatctgaacactattgtgcctttaagtgccttttatgatttttaggccaaactgataattggtcttattttacattttactaatatgtgtttcctgtgaaaattcccaaattttcctgagttctttatatttgaaagtattaacatgttatattgcccaggtaagactagagatgggtgtttgttactattgagaagactatgtcctgaggaagataaaaatttgctttgtcacccagaa

SEQ ID NO: 389733 - DNA, 118 bp, Homo sapiens
attgcaccaccaactggctgataccccatctcttctccctctctttggtcctccctattcactgagacaaaacaacattgaaattaggtcaactggctgggcacggtggctcacgcct

SEQ ID NO: 389734 - DNA, 278 bp, Homo sapiens
ttggggtaatccagcactctgaatatgagggcccaccttggtctcacctaggtggcgtgtgcggctgcagcatgagttagggtcaagggcaaggggaggaatggctggtgatgtgagactggagaaggagctgatggctctgtgcatagctggtcactgcaggcccctgtgggctagggctgagctgtgccccgctgtgttttcagcaccacctcccctacactgggacctcgtctctaactggcagagtggtcaatgaaaaaaagggcatgccttgg

SEQ ID NO: 389735 - DNA, 324 bp, Homo sapiens
aatgtcgctgatggtttagtctggttcaagtgccagtgcctcatgtcactagctgctgtgtgcctttgggtaaactgccccaacctcctgagcttggctgactgtcccctggtgcagtcctcttgggctgtcctatggtctgctactgcaaagcagagcctccttcgagccagtgaagaggcaccataagctctttcttgcctgagcaggctgccctttcttcttcctaacttctcctgcacccctactccctagcaacggccctggacaggttatcagggtatgtcagtatccccatggctttggaggtgctgctccaggaga

SEQ ID NO: 389736 - DNA, 361 bp, Homo sapiens
tctcctgggttcaagtgattctcctgcctcagcctcccgagtagctgggattacaggcatgcgccacgatgcctggctaattttgtatttttagtagagatggggtttctccatgttggtcaggctggtcttgaactcctgacctcaggtgatccacctgcctcggcctcccaaagtgctgagattacaggtgtaagtcaccgcacaccgcccacagagttttaataatttaatcctttcagtgttaaagacacacccttttgactgccctgtaggacagtcaaccattctttgtagattagaagacttgatttttttttttaaagctcagtctctaacatacattctaaaagctttctat

SEQ ID NO: 389737 - DNA, 923 bp, Homo sapiens
aagggatgttactgcacttatgtgtaatcagatctttatttaggtatacatatcctcctataccgcacataaatagatttcagagcccccatacaatgggcagtgtctgctatagggcttcaggcattaaataaaaccgagggttgttgattttgctgtgacagtacactaaatcaatactatatcttatacagtttgaaaatatgataccctacactttcaggggaccgagtctgacaaacacaatacatttatctgtgacctatatcaagtacacatttaggagccaggtaggttacctgcttacacactatattttaattgaattcaaactatcaagcactacttagaaactggaaaacatatatatgttagcatcaaagggggcagaagcaaagaagatacagatctgcactgaagacattagactggccatagaaaagtaagcttgaactcccaattgatgtgaccacactcttcttaattttgttcacagtaaaaacacttttttgagttattaggcttacccctagcttttgacctttgcatttcatatatgttagatgtctcagcaagaatatctggtctcccctaatttttattcccagtgccgatgttcaaaataaactttctccagtctgggaaccttttttacttccccatatttgttattatttagaatggttcatacgtctgctttgtttgatactggtcttcagattatgagactcgatgataacagtatggtactgcttctgtggacaaatatcgtgccttaacaatgtggtgtccttttccactgaagaaggacagacgttcgatctagaaataaggtggaattttccttgcggtggtttaactgccttcacattggacaggagtggattctgtggatcccagaatttctaaaggagggttgaact

SEQ ID NO: 389738 - DNA, 994 bp, Homo sapiens
gtttggaatcatgtggctgaaaatcttaccatatgctttccacaggctgagcaagaggatagatcattgaatagatgctttaattccatttttgacaatgaaccttgtgcttctgaaaatatttatatttaaccatgaggttatgatgattttttctctacactttttgagaagcctcttcagaaaagagcaaagttgtctgctctaatggatagaataaggagctgggagaaaggagacctgggtattaatctcagctctaccactacatggtagagctatgtagtggtagactatctgggagactctagaatctttaccattccctctactattcctagctcccttttctttcatagtcaacaagtgctttttgaacaattattgaggtaaataacataccctaaaagttagtactgatccccattatcatgctctgttgttccctggatgctcttttgaggaatttacttggttaatacagttaatagtataatacttataataacaattttgagaattatcagcatgagacaatttatttgcataatagctttttgttattatccagaatacatttagttctggattttgtttgatattgtgaatgcaaactatttttttgtgttagcctaaataaaatgaaatacagttatggaaatatttctgctgcaagaaaagaattacatacaactagtatacatatttagaggtgctgtagtcttctagactgtaaaggcagatggccgtgagtggaaatctgagtgtataggatgtgtttcgtgttcccactgcatatgcattattacccttgtctgagtggttgtttaaactgacatctgtaaaactaatctgtaaagtgagatctgggttctgacctatctcttacagtccataatgttgtgattctaagaatatttcattccttactgctttctgccctccattctgaccaatgctgcaaccacaaataaaaacattacttaccctatga

SEQ ID NO: 389739 - DNA, 375 bp, Homo sapiens
gctgaggcagggagaattgcttgaacctgggaggcggaggttgcagtgagccgagatcaggccactgcgctccagcctgggtgacagagcaagactccgtctcaaaaaaataaataaatacaaataaaaaaacaaaaaggaatgttaaataatgataaaaggattagtccaacagaaaaatatcacaatcctaaatatatatcttcctaaaactgtagctctcaaatttattaaacaattactactagacttaagaaactgatgaacaacaacacaataatactgtgggacttcaatcctccactgacagcactagacaggtcatcaagacagaaagtcaacaaaaaaacaatggacttaaactacaccctagaa

SEQ ID NO: 389740 - DNA, 462 bp, Homo sapiens
gccttgtgagttcatctatatccatttccaggaaaggtcatgggctgaggtggtgcttcactgaaataaatgcactttggagttgacagtaaccaagcaaggccagggaccctgaggagacccctccccacacttgcaatgatcaaacatgctacatcttagaaattggatctgccggtttatggcaacttgacgtaaaatgtgtatctcaggtcaggctgatctgatttaaatatcttagtgttaggcattctctatctgacattgtgaaaacgcatataatggaaccaagattagaatatcaagatgacaagaaggattgtaccttgaagacagtaaaagtcacttgcattctggggttacacatttaatttaaaatagttttattccctgttcctagggtccttgtaactctctcctctgctatatttatattaaataaataattttaaatgagtcaaa

SEQ ID NO: 389741 - DNA, 2777 bp, Homo sapiens
gaagaaagccaagaaaagggaccagaagagaaagcacgagaagacaggaggaagaaagggagagagggccaggcagtcgcactgtgaacagaacaggagaaggcgaagcggggcaaagttccctgcccaccgacgccagcctgcttggatgacttgcctcgtttcataattcacttactgtctgcaccagccggcctcagcctggctggaccctgctgcctgtgtggcccggagccagaggcccccacactcccagctgctcttctacagatgccatcaacgagcaggactctgggtggctccactgtctaagcctggagagtcaccgccgagggatgaggacgcgccagcccgggggaacgcgccagctgctttcgcggccccaagcgcgcagtgcccagcagccgcgccgagcctgacacgctgtcctctcccctcgcgcacagggctctgcgagtgacccggcgggcgagctccgtgctgcatggaacggctgcagaagcaaccacttacctcccccgggagcgtgagcccctcccgagattccagtgtgcctggctctccctccagcatcgtggccaagatggacaatcaggtgctgggctacaaggacctggctgccatccccaaggacaaggccatcctggacatcgagcggcccgacctcatgatctacgagcctcacttcacttattccctcctggaacacgtggagctgcctcgcagccgcgagcgctcgctgtcacccaaatccacatcccccccaccatccccagaggtgtgggcggacagccggtcgcctggaatcatctctcaggcctcggcccccagaaccactggaaccccccggaccagcctgccccatttccaccaccctgagacctcccgcccagattccaacatctacaagaagcctcccatctataagcagagagagtccgtgggaggcagccctcagaccaagcacctcatcgaggatctcatcatcgagtcatccaagtttcctgcagcccagcccccagaccccaaccagccagccaaaatcgaaaccgactactggccatgccccccgtctctggctgttgtggagacagaatggaggaagcggaaggcgtctcggaggggagcagaggaagaggaggaggaggaagatgacgactctggagaggagatgaaggctctcagggagcgtcagagagaggaactcagtaaggttacttccaacttgggaaagatgatcttgaaagaagagatggaaaagtcattgccgatccgaaggaaaacccgctctctgcctgaccggacacccttccatacctccttgcaccagggaacgtctaaatcttcctctctccccgcctatggcaggaccaccctgagccggctacagtccacagagttcagcccatcagggagtgagactggaagcccaggcctgcagaacggagagggccagagggggaggatggaccgggggaactccctgccctgtgtgctggagcagaagatctatccctatgaaatgctagtggtgaccaacaaggggcgaaccaagctgccaccgggggtggatcggatgcggcttgagaggcatctgtctgccgaggacttctcaagggtatttgccatgtcccctgaagagtttggcaagctggctctgtggaagcggaatgagctcaagaagaaggcctctctcttctgatggcccccacctgctccgggacggcccccttacccctgctgcttcagggtttttccccggcgggttgggaggggcaggaggtggggtggaaatagggtgggctcctttcctcaggtagagtggggggccaaaacctctgcagtccccggcagtgagctatggactttcttccccctcacaaggctgggggcctcctgctctcgtccctggccctccctgcacagggcaaagccagtctgggctctggcacacagagttcatgtttgcgccctctccctgcccctcaccccagagggtgaggaggaatgaggggcattggtggttaggccggttggctgtcttgaacagctggagggaagatgcaggggtgggaagcggccaggcagaaagagctccaggctcttgtgtcgcccacccagccctcccatactcactcctgacagctttcctgcactgcagcttcctgctcctctgactctagtgggaacaggccccagctcagcctccggcagggaggtcacccctccacttcagcttgccctgacctccgctcgcaaaccccgagcttccaagccttttgctccagccctgcggcttccccagaagcctgggcttagggtggagatgccgcctacacacgatcctggccctccacctgcctccaggccacgaaatgggaattccagcactaagccaggcaccgggcagaagctgggccttccgcctcccttggatggggtcaagaggccaggcctggcacattttggagtgtcctggctaccagctctcacctacacccacgcacccccccacacactatgctctctcaagaatgtaatttattggggcccccccagctgctttcctcacctgcccctgccctaccttacacccccagcttgacttctttccagtccacgtgtgtatataatgatatctatatttttgcccaggtctgggtattgctcctgcccagaccctgacatccctttccactgtgtgtgtgaccatgctgggggagggggactctgcttggaattaaaaggttgcattgggtccctaaaatctgtctttt

SEQ ID NO: 389742 - DNA, 2703 bp, Homo sapiens
gaagaaagccaagaaaagggaccagaagagaaagcacgagaagacaggaggaagaaagggagagagggccaggcagtcgcactgtgaacagaacaggagaaggcgaagcggggcaaagttccctgcccaccgacgccagcctgcttggatgacttgcctcgtttcataattcacttactgtctgcaccagccggcctcagcctggctggaccctgctgcctgtgtggcccggagccagaggcccccacactcccagctgctcttctacagatgccatcaacgagcaggactctgggtggctccactgtctaagcctggagagtcaccgccgagggatgaggacgcgccagcccgggggaacgcgccagctgctttcgcggccccaagcgcgcagtgcccagcagccgcgccgagcctgacacgctgtcctctcccctcgcgcacagggctctgcgagtgacccggcgggcgagctccgtgctgcatggaacggctgcagaagcaaccacttacctcccccgggagcgtgagcccctcccgagattccagtgtgcctggctctccctccagcatcgtggccaagatggacaatcaggtgctgggctacaaggacctggctgccatccccaaggacaaggccatcctggacatcgagcggcccgacctcatgatctacgagcctcacttcacttattccctcctggaacacgtggagctgcctcgcagccgcgagcgctcgctgtcacccaaatccacatcccccccaccatccccagaggtgtgggcggacagccggtcgcctggaatcatctctcaggcctcggcccccagaaccactggaaccccccggaccagcctgccccatttccaccaccctgagacctcccgcccagattccaacatctacaagaagcctcccatctataagcagagagagtccgtgggaggcagccctcagaccaagcacctcatcgaggatctcatcatcgagtcatccaagtttcctgcagcccagcccccagaccccaaccagccagccaaaatcgaaaccgactactggccatgccccccgtctctggctgttgtggagacagaatggaggaagcggaaggcgtctcggaggggagcagaggaagaggaggaggaggaagatgacgactctggagaggagatgaaggctctcagggagcgtcagagagaggaactcagtaaggttacttccaacttgggaaagatgatcttgaaagaagagatggaaaagtcattgccgatccgaaggaaaacccgctctctgcctgaccggacacccttccatacctccttgcaccagggaacgtctaaatcttcctctctccccgcctatggcaggaccaccctgagccggctacagtccacagagttcagcccatcagggagtgagactggaagcccagatctatccctatgaaatgctagtggtgaccaacaaggggcgaaccaagctgccaccgggggtggatcggatgcggcttgagaggcatctgtctgccgaggacttctcaagggtatttgccatgtcccctgaagagtttggcaagctggctctgtggaagcggaatgagctcaagaagaaggcctctctcttctgatggcccccacctgctccgggacggcccccttacccctgctgcttcagggtttttccccggcgggttgggaggggcaggaggtggggtggaaatagggtgggctcctttcctcaggtagagtggggggccaaaacctctgcagtccccggcagtgagctatggactttcttccccctcacaaggctgggggcctcctgctctcgtccctggccctccctgcacagggcaaagccagtctgggctctggcacacagagttcatgtttgcgccctctccctgcccctcaccccagagggtgaggaggaatgaggggcattggtggttaggccggttggctgtcttgaacagctggagggaagatgcaggggtgggaagcggccaggcagaaagagctccaggctcttgtgtcgcccacccagccctcccatactcactcctgacagctttcctgcactgcagcttcctgctcctctgactctagtgggaacaggccccagctcagcctccggcagggaggtcacccctccacttcagcttgccctgacctccgctcgcaaaccccgagcttccaagccttttgctccagccctgcggcttccccagaagcctgggcttagggtggagatgccgcctacacacgatcctggccctccacctgcctccaggccacgaaatgggaattccagcactaagccaggcaccgggcagaagctgggccttccgcctcccttggatggggtcaagaggccaggcctggcacattttggagtgtcctggctaccagctctcacctacacccacgcacccccccacacactatgctctctcaagaatgtaatttattggggcccccccagctgctttcctcacctgcccctgccctaccttacacccccagcttgacttctttccagtccacgtgtgtatataatgatatctatatttttgcccaggtctgggtattgctcctgcccagaccctgacatccctttccactgtgtgtgtgaccatgctgggggagggggactctgcttggaattaaaaggttgcattgggtccctaaaatctgtctttt

SEQ ID NO: 389743 - DNA, 639 bp, Homo sapiens
cgtacccgttggaatagcgggttttgcagcaattgttgcatatggattatataaactgaagagcaggggaatactaaaatgtccattcatctgatccacatgcgtgtggcagcccaaggctttgttgtaggagcaatgactgttggtatgggctattccatgtatcgggaattctgggcaaaacctaagccttagaagaagagatgctgtcttggtcttgttggaggagcttgctttagttagatgtcttattattaaagttacctattattgttggaaataaactaatttgtatgggtttagatggtaacatggcattttgaatattggcttcctttcttgcaggcttgatttgcttggtgaccgaattactagtgactagtttactaactaggtcattcaaggaagtcaagttaacgctcgctgtcacccaaatccacatcccccccaccatccccagaggtgtgggcggacagccggtcgcctggaatcatctctcaggcctcggcccccagaaccactggaaccccccggaccagcctgccccatttccaccaccctgagacctcccgcccagattccaacatctacaagaagcctcccatctataagcagagaggtgagggcgcccctggctca

SEQ ID NO: 389744 - DNA, 2527 bp, Homo sapiens
tgccgcggctgagccgggcctgagctgccggcaggttgtcttggcaacaggaggtggagaggagatgcgccgagggatggaggtgtatgtcaccgaggaggctgctgcgctcctgccccacgccctgggcccttgaagcctggagagtcaccgccgagggatgaggacgcgccagcccgggggaacgcgccagctgctttcgcggccccaagcgcgcagtgcccagcagccgcgccgagcctgacacgctgtcctctcccctcgcgcacagggctctgcgagtgacccggcgggcgagctccgtgctgcatggaacggctgcagaaggccaagatggacaatcaggtgctgggctacaaggacctggctgccatccccaaggacaaggccatcctggacatcgagcggcccgacctcatgatctacgagcctcacttcacttattccctcctggaacacgtggagctgcctcgcagccgcgagcgctcgctgtcacccaaatccacatcccccccaccatccccagaggtgtgggcggacagccggtcgcctggaatcatctctcaggcctcggcccccagaaccactggaaccccccggaccagcctgccccatttccaccaccctgagacctcccgcccagattccaacatctacaagaagcctcccatctataagcagagagagtccgtgggaggcagccctcagaccaagcacctcatcgaggatctcatcatcgagtcatccaagtttcctgcagcccagcccccagaccccaaccagccagccaaaatcgaaaccgactactggccatgccccccgtctctggctgttgtggagacagaatggaggaagcggaaggcgtctcggaggggagcagaggaagaggaggaggaggaagatgacgactctggagaggagatgaaggctctcagggagcgtcagagagaggaactcagtaaggttacttccaacttgggaaagatgatcttgaaagaagagatggaaaagtcattgccgatccgaaggaaaacccgctctctgcctgaccggacacccttccatacctccttgcaccagggaacgtctaaatcttcctctctccccgcctatggcaggaccaccctgagccggctacagtccacagagttcagcccatcagggagtgagactggaagcccaggcctgcagaacggagagggccagagggggaggatggaccgggggaactccctgccctgtgtgctggagcagaagatctatccctatgaaatgctagtggtgaccaacaaggggcgaaccaagctgccaccgggggtggatcggatgcggcttgagaggcatctgtctgccgaggacttctcaagggtatttgccatgtcccctgaagagtttggcaagctggctctgtggaagcggaatgagctcaagaagaaggcctctctcttctgatggcccccacctgctccgggacggcccccttacccctgctgcttcagggtttttccccggcgggttgggaggggcaggaggtggggtggaaatagggtgggctcctttcctcaggtagagtggggggccaaaacctctgcagtccccggcagtgagctatggactttcttccccctcacaaggctgggggcctcctgctctcgtccctggccctccctgcacagggcaaagccagtctgggctctggcacacagagttcatgtttgcgccctctccctgcccctcaccccagagggtgaggaggaatgaggggcattggtggttaggccggttggctgtcttgaacagctggagggaagatgcaggggtgggaagcggccaggcagaaagagctccaggctcttgtgtcgcccacccagccctcccatactcactcctgacagctttcctgcactgcagcttcctgctcctctgactctagtgggaacaggccccagctcagcctccggcagggaggtcacccctccacttcagcttgccctgacctccgctcgcaaaccccgagcttccaagccttttgctccagccctgcggcttccccagaagcctgggcttagggtggagatgccgcctacacacgatcctggccctccacctgcctccaggccacgaaatgggaattccagcactaagccaggcaccgggcagaagctgggccttccgcctcccttggatggggtcaagaggccaggcctggcacattttggagtgtcctggctaccagctctcacctacacccacgcacccccccacacactatgctctctcaagaatgtaatttattggggcccccccagctgctttcctcacctgcccctgccctaccttacacccccagcttgacttctttccagtccacgtgtgtatataatgatatctatatttttgcccaggtctgggtattgctcctgcccagaccctgacatccctttccactgtgtgtgtgaccatgctgggggagggggactctgcttggaattaaaaggttgcattgggtccctaaaatctgtctttt

SEQ ID NO: 389745 - DNA, 2702 bp, Homo sapiens
gaagaaagccaagaaaagggaccagaagagaaagcacgagaagacaggaggaagaaagggagagagggccaggcagtcgcactgtgaacagaacaggagaaggcgaagcggggcaaagttccctgcccaccgacgccagcctgcttggatgacttgcctcgtttcataattcacttactgtctgcaccagccggcctcagcctggctggaccctgctgcctgtgtggcccggagccagaggcccccacactcccagctgctcttctacagatgccatcaacgagcaggactctgggtggctccactgtctaagcctggagagtcaccgccgagggatgaggacgcgccagcccgggggaacgcgccagctgctttcgcggccccaagcgcgcagtgcccagcagccgcgccgagcctgacacgctgtcctctcccctcgcgcacagggctctgcgagtgacccggcgggcgagctccgtgctgcatggaacggctgcagaaggccaagatggacaatcaggtgctgggctacaaggacctggctgccatccccaaggacaaggccatcctggacatcgagcggcccgacctcatgatctacgagcctcacttcacttattccctcctggaacacgtggagctgcctcgcagccgcgagcgctcgctgtcacccaaatccacatcccccccaccatccccagaggtgtgggcggacagccggtcgcctggaatcatctctcaggcctcggcccccagaaccactggaaccccccggaccagcctgccccatttccaccaccctgagacctcccgcccagattccaacatctacaagaagcctcccatctataagcagagagagtccgtgggaggcagccctcagaccaagcacctcatcgaggatctcatcatcgagtcatccaagtttcctgcagcccagcccccagaccccaaccagccagccaaaatcgaaaccgactactggccatgccccccgtctctggctgttgtggagacagaatggaggaagcggaaggcgtctcggaggggagcagaggaagaggaggaggaggaagatgacgactctggagaggagatgaaggctctcagggagcgtcagagagaggaactcagtaaggttacttccaacttgggaaagatgatcttgaaagaagagatggaaaagtcattgccgatccgaaggaaaacccgctctctgcctgaccggacacccttccatacctccttgcaccagggaacgtctaaatcttcctctctccccgcctatggcaggaccaccctgagccggctacagtccacagagttcagcccatcagggagtgagactggaagcccaggcctgcagaacggagagggccagagggggaggatggaccgggggaactccctgccctgtgtgctggagcagaagatctatccctatgaaatgctagtggtgaccaacaaggggcgaaccaagctgccaccgggggtggatcggatgcggcttgagaggcatctgtctgccgaggacttctcaagggtatttgccatgtcccctgaagagtttggcaagctggctctgtggaagcggaatgagctcaagaagaaggcctctctcttctgatggcccccacctgctccgggacggcccccttacccctgctgcttcagggtttttccccggcgggttgggaggggcaggaggtggggtggaaatagggtgggctcctttcctcaggtagagtggggggccaaaacctctgcagtccccggcagtgagctatggactttcttccccctcacaaggctgggggcctcctgctctcgtccctggccctccctgcacagggcaaagccagtctgggctctggcacacagagttcatgtttgcgccctctccctgcccctcaccccagagggtgaggaggaatgaggggcattggtggttaggccggttggctgtcttgaacagctggagggaagatgcaggggtgggaagcggccaggcagaaagagctccaggctcttgtgtcgcccacccagccctcccatactcactcctgacagctttcctgcactgcagcttcctgctcctctgactctagtgggaacaggccccagctcagcctccggcagggaggtcacccctccacttcagcttgccctgacctccgctcgcaaaccccgagcttccaagccttttgctccagccctgcggcttccccagaagcctgggcttagggtggagatgccgcctacacacgatcctggccctccacctgcctccaggccacgaaatgggaattccagcactaagccaggcaccgggcagaagctgggccttccgcctcccttggatggggtcaagaggccaggcctggcacattttggagtgtcctggctaccagctctcacctacacccacgcacccccccacacactatgctctctcaagaatgtaatttattggggcccccccagctgctttcctcacctgcccctgccctaccttacacccccagcttgacttctttccagtccacgtgtgtatataatgatatctatatttttgcccaggtctgggtattgctcctgcccagaccctgacatccctttccactgtgtgtgtgaccatgctgggggagggggactctgcttggaattaaaaggttgcattgggtccctaaaatctgtctttt

SEQ ID NO: 389746 - DNA, 2394 bp, Homo sapiens
tgccgcggctgagccgggcctgagctgccggcaggttgtcttggcaacaggaggtggagaggagatgcgccgagggatggaggtgtatgtcaccgaggaggctgctgcgctcctgccccacgccctgggcccttgaagggctctgcgagtgacccggcgggcgagctccgtgctgcatggaacggctgcagaaggccaagatggacaatcaggtgctgggctacaaggacctggctgccatccccaaggacaaggccatcctggacatcgagcggcccgacctcatgatctacgagcctcacttcacttattccctcctggaacacgtggagctgcctcgcagccgcgagcgctcgctgtcacccaaatccacatcccccccaccatccccagaggtgtgggcggacagccggtcgcctggaatcatctctcaggcctcggcccccagaaccactggaaccccccggaccagcctgccccatttccaccaccctgagacctcccgcccagattccaacatctacaagaagcctcccatctataagcagagagagtccgtgggaggcagccctcagaccaagcacctcatcgaggatctcatcatcgagtcatccaagtttcctgcagcccagcccccagaccccaaccagccagccaaaatcgaaaccgactactggccatgccccccgtctctggctgttgtggagacagaatggaggaagcggaaggcgtctcggaggggagcagaggaagaggaggaggaggaagatgacgactctggagaggagatgaaggctctcagggagcgtcagagagaggaactcagtaaggttacttccaacttgggaaagatgatcttgaaagaagagatggaaaagtcattgccgatccgaaggaaaacccgctctctgcctgaccggacacccttccatacctccttgcaccagggaacgtctaaatcttcctctctccccgcctatggcaggaccaccctgagccggctacagtccacagagttcagcccatcagggagtgagactggaagcccaggcctgcagaacggagagggccagagggggaggatggaccgggggaactccctgccctgtgtgctggagcagaagatctatccctatgaaatgctagtggtgaccaacaaggggcgaaccaagctgccaccgggggtggatcggatgcggcttgagaggcatctgtctgccgaggacttctcaagggtatttgccatgtcccctgaagagtttggcaagctggctctgtggaagcggaatgagctcaagaagaaggcctctctcttctgatggcccccacctgctccgggacggcccccttacccctgctgcttcagggtttttccccggcgggttgggaggggcaggaggtggggtggaaatagggtgggctcctttcctcaggtagagtggggggccaaaacctctgcagtccccggcagtgagctatggactttcttccccctcacaaggctgggggcctcctgctctcgtccctggccctccctgcacagggcaaagccagtctgggctctggcacacagagttcatgtttgcgccctctccctgcccctcaccccagagggtgaggaggaatgaggggcattggtggttaggccggttggctgtcttgaacagctggagggaagatgcaggggtgggaagcggccaggcagaaagagctccaggctcttgtgtcgcccacccagccctcccatactcactcctgacagctttcctgcactgcagcttcctgctcctctgactctagtgggaacaggccccagctcagcctccggcagggaggtcacccctccacttcagcttgccctgacctccgctcgcaaaccccgagcttccaagccttttgctccagccctgcggcttccccagaagcctgggcttagggtggagatgccgcctacacacgatcctggccctccacctgcctccaggccacgaaatgggaattccagcactaagccaggcaccgggcagaagctgggccttccgcctcccttggatggggtcaagaggccaggcctggcacattttggagtgtcctggctaccagctctcacctacacccacgcacccccccacacactatgctctctcaagaatgtaatttattggggcccccccagctgctttcctcacctgcccctgccctaccttacacccccagcttgacttctttccagtccacgtgtgtatataatgatatctatatttttgcccaggtctgggtattgctcctgcccagaccctgacatccctttccactgtgtgtgtgaccatgctgggggagggggactctgcttggaattaaaaggttgcattgggtccctaaaatctgtctttt

SEQ ID NO: 389747 - DNA, 2527 bp, Homo sapiens
  misc_feature (509)..(509): n is a, c, g, or t
tgccgcggctgagccgggcctgagctgccggcaggttgtcttggcaacaggaggtggagaggagatgcgccgagggatggaggtgtatgtcaccgaggaggctgctgcgctcctgccccacgccctgggcccttgaagcctggagagtcaccgccgagggatgaggacgcgccagcccgggggaacgcgccagctgctttcgcggccccaagcgcgcagtgcccagcagccgcgccgagcctgacacgctgtcctctcccctcgcgcacagggctctgcgagtgacccggcgggcgagctccgtgctgcatggaacggctgcagaaggccaagatggacaatcaggtgctgggctacaaggacctggctgccatccccaaggacaaggccatcctggacatcgagcggcccgacctcatgatctacgagcctcacttcacttattcaataatggaaaaagtggagatgaatagaagaagcgagagatagatgtaaaaaaaataaaaatnaaaaaaaaaataaacagaggtgtgggcggacagccggtcgcctggaatcatctctcaggcctcggcccccagaaccactggaaccccccggaccagcctgccccatttccaccaccctgagacctcccgcccagattccaacatctacaagaagcctcccatctataagcagagagagtccgtgggaggcagccctcagaccaagcacctcatcgaggatctcatcatcgagtcatccaagtttcctgcagcccagcccccagaccccaaccagccagccaaaatcgaaaccgactactggccatgccccccgtctctggctgttgtggagacagaatggaggaagcggaaggcgtctcggaggggagcagaggaagaggaggaggaggaagatgacgactctggagaggagatgaaggctctcagggagcgtcagagagaggaactcagtaaggttacttccaacttgggaaagatgatcttgaaagaagagatggaaaagtcattgccgatccgaaggaaaacccgctctctgcctgaccggacacccttccatacctccttgcaccagggaacgtctaaatcttcctctctccccgcctatggcaggaccaccctgagccggctacagtccacagagttcagcccatcagggagtgagactggaagcccaggcctgcagaacggagagggccagagggggaggatggaccgggggaactccctgccctgtgtgctggagcagaagatctatccctatgaaatgctagtggtgaccaacaaggggcgaaccaagctgccaccgggggtggatcggatgcggcttgagaggcatctgtctgccgaggacttctcaagggtatttgccatgtcccctgaagagtttggcaagctggctctgtggaagcggaatgagctcaagaagaaggcctctctcttctgatggcccccacctgctccgggacggcccccttacccctgctgcttcagggtttttccccggcgggttgggaggggcaggaggtggggtggaaatagggtgggctcctttcctcaggtagagtggggggccaaaacctctgcagtccccggcagtgagctatggactttcttccccctcacaaggctgggggcctcctgctctcgtccctggccctccctgcacagggcaaagccagtctgggctctggcacacagagttcatgtttgcgccctctccctgcccctcaccccagagggtgaggaggaatgaggggcattggtggttaggccggttggctgtcttgaacagctggagggaagatgcaggggtgggaagcggccaggcagaaagagctccaggctcttgtgtcgcccacccagccctcccatactcactcctgacagctttcctgcactgcagcttcctgctcctctgactctagtgggaacaggccccagctcagcctccggcagggaggtcacccctccacttcagcttgccctgacctccgctcgcaaaccccgagcttccaagccttttgctccagccctgcggcttccccagaagcctgggcttagggtggagatgccgcctacacacgatcctggccctccacctgcctccaggccacgaaatgggaattccagcactaagccaggcaccgggcagaagctgggccttccgcctcccttggatggggtcaagaggccaggcctggcacattttggagtgtcctggctaccagctctcacctacacccacgcacccccccacacactatgctctctcaagaatgtaatttattggggcccccccagctgctttcctcacctgcccctgccctaccttacacccccagcttgacttctttccagtccacgtgtgtatataatgatatctatatttttgcccaggtctgggtattgctcctgcccagaccctgacatccctttccactgtgtgtgtgaccatgctgggggagggggactctgcttggaattaaaaggttgcattgggtccctaaaatctgtctttt

SEQ ID NO: 389748 - DNA, 2557 bp, Homo sapiens
  misc_feature (3)..(3): n is a, c, g, or t
  misc_feature (6)..(6): n is a, c, g, or t
ggnacnaggttgcctggttgtgagagtcaggggagcagggacaggtccaagacaaggaaggcagttgggctgtgggaatggggagcccagggaaggcctccagagctggcctggagagtcaccgccgagggatgaggacgcgccagcccgggggaacgcgccagctgctttcgcggccccaagcgcgcagtgcccagcagccgcgccgagcctgacacgctgtcctctcccctcgcgcacagggctctgcgagtgacccggcgggcgagctccgtgctgcatggaacggctgcagaagcaaccacttacctcccccgggagcgtgagcccctcccgagattccagtgtgcctggctctccctccagcatcgtggccaagatggacaatcaggtgctgggctacaaggacctggctgccatccccaaggacaaggccatcctggacatcgagcggcccgacctcatgatctacgagcctcacttcacttattccctcctggaacacgtggagctgcctcgcagccgcgagcgctcgctgtcacccaaatccacatcccccccaccatccccagaggtgtgggcggacagccggtcgcctggaatcatctctcaggcctcggcccccagaaccactggaaccccccggaccagcctgccccatttccaccaccctgagacctcccgcccagattccaacatctacaagaagcctcccatctataagcagagagagtccgtgggaggcagccctcagaccaagcacctcatcgaggatctcatcatcgagtcatccaagtttcctgcagcccagcccccagaccccaaccagccagccaaaatcgaaaccgactactggccatgccccccgtctctggctgttgtggagacagaatggaggaagcggaaggcgtctcggaggggagcagaggaagaggaggaggaggaagatgacgactctggagaggagatgaaggctctcagggagcgtcagagagaggaactcagtaaggttacttccaacttgggaaagatgatcttgaaagaagagatggaaaagtcattgccgatccgaaggaaaacccgctctctgcctgaccggacacccttccatacctccttgcaccagggaacgtctaaatcttcctctctccccgcctatggcaggaccaccctgagccggctacagtccacagagttcagcccatcagggagtgagactggaagcccaggcctgcagaacggagagggccagagggggaggatggaccgggggaactccctgccctgtgtgctggagcagaagatctatccctatgaaatgctagtggtgaccaacaaggggcgaaccaagctgccaccgggggtggatcggatgcggcttgagaggcatctgtctgccgaggacttctcaagggtatttgccatgtcccctgaagagtttggcaagctggctctgtggaagcggaatgagctcaagaagaaggcctctctcttctgatggcccccacctgctccgggacggcccccttacccctgctgcttcagggtttttccccggcgggttgggaggggcaggaggtggggtggaaatagggtgggctcctttcctcaggtagagtggggggccaaaacctctgcagtccccggcagtgagctatggactttcttccccctcacaaggctgggggcctcctgctctcgtccctggccctccctgcacagggcaaagccagtctgggctctggcacacagagttcatgtttgcgccctctccctgcccctcaccccagagggtgaggaggaatgaggggcattggtggttaggccggttggctgtcttgaacagctggagggaagatgcaggggtgggaagcggccaggcagaaagagctccaggctcttgtgtcgcccacccagccctcccatactcactcctgacagctttcctgcactgcagcttcctgctcctctgactctagtgggaacaggccccagctcagcctccggcagggaggtcacccctccacttcagcttgccctgacctccgctcgcaaaccccgagcttccaagccttttgctccagccctgcggcttccccagaagcctgggcttagggtggagatgccgcctacacacgatcctggccctccacctgcctccaggccacgaaatgggaattccagcactaagccaggcaccgggcagaagctgggccttccgcctcccttggatggggtcaagaggccaggcctggcacattttggagtgtcctggctaccagctctcacctacacccacgcacccccccacacactatgctctctcaagaatgtaatttattggggcccccccagctgctttcctcacctgcccctgccctaccttacacccccagcttgacttctttccagtccacgtgtgtatataatgatatctatatttttgcccaggtctgggtattgctcctgcccagaccctgacatccctttccactgtgtgtgtgaccatgctgggggatcagactgggtgaataggctgggtttttccctctctcac

SEQ ID NO: 389749 - DNA, 1979 bp, Homo sapiens
  misc_feature (3)..(3): n is a, c, g, or t
  misc_feature (6)..(6): n is a, c, g, or t
ggnacnaggttgcctggttgtgagagtcaggggagcagggacaggtccaagacaaggaaggcagttgggctgtgggaatggggagcccagggaaggcctccagagctggcctggagagtcaccgccgagggatgaggacgcgccagcccgggggaacgcgccagctgctttcgcggccccaagcgcgcagtgcccagcagccgcgccgagcctgacacgctgtcctctcccctcgcgcacagggctctgcgagtgacccggcgggcgagctccgtgctgcatggaacggctgcagaagcaaccacttacctcccccgggagcgtgagcccctcccgagattccagtgtgcctggctctccctccagcatcgtggccaagatggacaatcaggtgctgggctacaaggacctggctgccatccccaaggacaaggccatcctggacatcgagcggcccgacctcatgatctacgagcctcacttcacttattccctcctggaacacgtggagctgcctcgcagccgcgagcgctcgctgtcacccaaatccacatcccccccaccatccccagaggtgtgggcggacagccggtcgcctggaatcatctctcaggcctcggcccccagaaccactggaaccccccggaccagcctgccccatttccaccaccctgagacctcccgcccagattccaacatctacaagaagcctcccatctataagcagagagagtccgtgggaggcagccctcagaccaagcacctcatcgaggatctcatcatcgagtcatccaagtttcctgcagcccagcccccagaccccaaccagccagccaaaatcgaaaccgactactggccatgccccccgtctctggctgttgtggagacagaatggaggaagcggaaggcgtctcggaggggagcagaggaagaggaggaggaggaagatgacgactctggagaggagatgaaggctctcagggagcgtcagagagaggaactcagtaaggttacttccaacttgggaaagatgatcttgaaagaagagatggaaaagtcattgccgatccgaaggaaaacccgctctctgcctgaccggacacccttccatacctccttgcaccagggaacgtctaaatcttcctctctccccgcctatggcaggaccaccctgagccggctacagtccacagagttcagcccatcagggagtgagactggaagcccaggcctgcagaacggagagggccagagggggaggatggaccgggggaactccctgccctgtgtgctggagcagaagatctatccctatgaaatgctagtggtgaccaacaaggggcgaaccaagctgccaccgggggtggatcggatgcggcttgagaggcatctgtctgccgaggacttctcaagggtatttgccatgtcccctgaagagtttggcaagctggctctgtggaagcggaatgagctcaagaagaaggcctctctcttctgatggcccccacctgctccgggacggcccccttacccctgctgcttcagggtttttccccggcgggttgggaggggcaggaggtggggtggaaatagggtgggctcctttcctcaggtagagtggggggccaaaacctctgcagtccccggcagtgagctatggactttcttccccctcacaaggctgggggcctcctgctctcgtccctggccctccctgcacagggcaaagccagtctgggctctggcacacagagttcatgtttgcgccctctccctgcccctgccctaccttacacccccagcttgacttctttccagtccacgtgtgtatataatgatatctatatttttgcccaggtctgggtattgctcctgcccagaccctgacatccctttccactgtgtgtgtgaccatgctgggggagggggactctgcttggaattaaaaggttgcattgggtccctaaaatctgtctttt

SEQ ID NO: 389750 - DNA, 837 bp, Homo sapiens
  misc_feature (3)..(3): n is a, c, g, or t
  misc_feature (6)..(6): n is a, c, g, or t
ggnacnaggttgcctggttgtgagagtcaggggagcagggacaggtccaagacaaggaaggcagttgggctgtgggaatggggagcccagggaaggcctccagagctggcctggagagtcaccgccgagggatgaggacgcgccagcccgggggaacgcgccagctgctttcgcggccccaagcgcgcagtgcccagcagccgcgccgagcctgacacgctgtcctctcccctcgcgcacagggctctgcgagtgacccggcgggcgagctccgtgctgcatggaacggctgcagaagcaaccacttacctcccccgggagcgtgagcccctcccgagattccagtgtgcctggctctccctccagcatcgtggccaagatggacaatcaggtgctgggctacaaggacctggctgccatccccaaggacaaggccatcctggacatcgagcggcccgacctcatgatctacgagcctcacttcacttattccctcctggaacacgtggagctgcctcgcagccgcgagcgctcgctgtcacccaaatccacatcccccccaccatccccagaggtgtgggcggacagccggtcgcctggaatcatctctcaggcctcggcccccagaaccactggaaccccccggaccagcctgccccatttccaccaccctgagacctcccgcccagattccaacatctacaagaagcctcccatctataagcagagagagtccgtgggaggcagccctcagaccaagcacctcatcgaggatctcatcatcgagtcatccaagtttccttgaccagcccctcccccaataaactcgcctcttgg

SEQ ID NO: 389751 - DNA, 2573 bp, Homo sapiens
  misc_feature (3)..(3): n is a, c, g, or t
  misc_feature (6)..(6): n is a, c, g, or t
ggnacnaggttgcctggttgtgagagtcaggggagcagggacaggtccaagacaaggaaggcagttgggctgtgggaatggggagcccagggaaggcctccagagctggcctggagagtcaccgccgagggatgaggacgcgccagcccgggggaacgcgccagctgctttcgcggccccaagcgcgcagtgcccagcagccgcgccgagcctgacacgctgtcctctcccctcgcgcacagggctctgcgagtgacccggcgggcgagctccgtgctgcatggaacggctgcagaagcaaccacttacctcccccgggagcgtgagcccctcccgagattccagtgtgcctggctctccctccagcatcgtggccaagatggacaatcaggtgctgggctacaaggacctggctgccatccccaaggacaaggccatcctggacatcgagcggcccgacctcatgatctacgagcctcacttcacttattccctcctggaacacgtggagctgcctcgcagccgcgagcgctcgctgtcacccaaatccacatcccccccaccatccccagaggtgtgggcggacagccggtcgcctggaatcatctctcaggcctcggcccccagaaccactggaaccccccggaccagcctgccccatttccaccaccctgagacctcccgcccagattccaacatctacaagaagcctcccatctataagcagagagagtccgtgggaggcagccctcagaccaagcacctcatcgaggatctcatcatcgagtcatccaagtttcctgcagcccagcccccagaccccaaccagccagccaaaatcgaaaccgactactggccatgccccccgtctctggctgttgtggagacagaatggaggaagcggaaggcgtctcggaggggagcagaggaagaggaggaggaggaagatgacgactctggagaggagatgaaggctctcagggagcgtcagagagaggaactcagtaaggttacttccaacttgggaaagatgatcttgaaagaagagatggaaaagtcattgccgatccgaaggaaaacccgctctctgcctgaccggacacccttccatacctccttgcaccagggaacgtctaaatcttcctctctccccgcctatggcaggaccaccctgagccggctacagtccacagagttcagcccatcagggagtgagactggaagcccaggcctgcagaacggagagggccagagggggaggatggaccgggggaactccctgccctgtgtgctggagcagaagatctatccctatgaaatgctagtggtgaccaacaaggggcgaaccaagctgccaccgggggtggatcggatgcggcttgagaggcatctgtctgccgaggacttctcaagggtatttgccatgtcccctgaagagtttggcaagctggctctgtggaagcggaatgagctcaagaagaaggcctctctcttctgatggcccccacctgctccgggacggcccccttacccctgctgcttcagggtttttccccggcgggttgggaggggcaggaggtggggtggaaatagggtgggctcctttcctcaggtagagtggggggccaaaacctctgcagtccccggcagtgagctatggactttcttccccctcacaaggctgggggcctcctgctctcgtccctggccctccctgcacagggcaaagccagtctgggctctggcacacagagttcatgtttgcgccctctccctgcccctcaccccagagggtgaggaggaatgaggggcattggtggttaggccggttggctgtcttgaacagctggagggaagatgcaggggtgggaagcggccaggcagaaagagctccaggctcttgtgtcgcccacccagccctcccatactcactcctgacagctttcctgcactgcagcttcctgctcctctgactctagtgggaacaggccccagctcagcctccggcagggaggtcacccctccacttcagcttgccctgacctccgctcgcaaaccccgagcttccaagccttttgctccagccctgcggcttccccagaagcctgggcttagggtggagatgccgcctacacacgatcctggccctccacctgcctccaggccacgaaatgggaattccagcactaagccaggcaccgggcagaagctgggccttccgcctcccttggatggggtcaagaggccaggcctggcacattttggagtgtcctggctaccagctctcacctacacccacgcacccccccacacactatgctctctcaagaatgtaatttattggggcccccccagctgctttcctcacctgcccctgccctaccttacacccccagcttgacttctttccagtccacgtgtgtatataatgatatctatatttttgcccaggtctgggtattgctcctgcccagaccctgacatccctttccactgtgtgtgtgaccatgctgggggagggggactctgcttggaattaaaaggttgcattgggtccctaaaatctgtctttt

SEQ ID NO: 389752 - DNA, 434 bp, Homo sapiens
tatgcagtggaagccgtaggagacaggttgtggcatgaacaaacaccctttgagacctcccgcccagattccaacatctacaagaagcctcccatctataagcagagagagtccgtgggaggcagccctcagaccaagcacctcatcgaggatctcatcatcgagtcatccaagtttcctgcagcccagcccccagaccccaaccagccagccaaaatcgaaaccgactactggccatgccccccgtctctggctgttgtggagacagaatggaggaagcggaaggcgtctcggaggggagcagaggaagaggaggaggaggaagatgacgactctggagaggagatgaaggctctcagggagcgtcagagagaggaactcagtaaggttacttccaacttgggaaagggggatctggatggacagggggatct

SEQ ID NO: 389753 - DNA, 2510 bp, Homo sapiens
ggttcctggaagagacacctattacctaggctcctgggggaagtgacagcccgtggatctggcctacgcctctcgggcctctgtggcctcagagcgtctgggccacactgtctgggaagagcctggagagtcaccgccgagggatgaggacgcgccagcccgggggaacgcgccagctgctttcgcggccccaagcgcgcagtgcccagcagccgcgccgagcctgacacgctgtcctctcccctcgcgcacagggctctgcgagtgacccggcgggcgagctccgtgctgcatggaacggctgcagaaggccaagatggacaatcaggtgctgggctacaaggacctggctgccatccccaaggacaaggccatcctggacatcgagcggcccgacctcatgatctacgagcctcacttcacttattccctcctggaacacgtggagctgcctcgcagccgcgagcgctcgctgtcacccaaatccacatcccccccaccatccccagaggtgtgggcggacagccggtcgcctggaatcatctctcaggcctcggcccccagaaccactggaaccccccggaccagcctgccccatttccaccaccctgagacctcccgcccagattccaacatctacaagaagcctcccatctataagcagagagagtccgtgggaggcagccctcagaccaagcacctcatcgaggatctcatcatcgagtcatccaagtttcctgcagcccagcccccagaccccaaccagccagccaaaatcgaaaccgactactggccatgccccccgtctctggctgttgtggagacagaatggaggaagcggaaggcgtctcggaggggagcagaggaagaggaggaggaggaagatgacgactctggagaggagatgaaggctctcagggagcgtcagagagaggaactcagtaaggttacttccaacttgggaaagatgatcttgaaagaagagatggaaaagtcattgccgatccgaaggaaaacccgctctctgcctgaccggacacccttccatacctccttgcaccagggaacgtctaaatcttcctctctccccgcctatggcaggaccaccctgagccggctacagtccacagagttcagcccatcagggagtgagactggaagcccaggcctgcagaacggagagggccagagggggaggatggaccgggggaactccctgccctgtgtgctggagcagaagatctatccctatgaaatgctagtggtgaccaacaaggggcgaaccaagctgccaccgggggtggatcggatgcggcttgagaggcatctgtctgccgaggacttctcaagggtatttgccatgtcccctgaagagtttggcaagctggctctgtggaagcggaatgagctcaagaagaaggcctctctcttctgatggcccccacctgctccgggacggcccccttacccctgctgcttcagggtttttccccggcgggttgggaggggcaggaggtggggtggaaatagggtgggctcctttcctcaggtagagtggggggccaaaacctctgcagtccccggcagtgagctatggactttcttccccctcacaaggctgggggcctcctgctctcgtccctggccctccctgcacagggcaaagccagtctgggctctggcacacagagttcatgtttgcgccctctccctgcccctcaccccagagggtgaggaggaatgaggggcattggtggttaggccggttggctgtcttgaacagctggagggaagatgcaggggtgggaagcggccaggcagaaagagctccaggctcttgtgtcgcccacccagccctcccatactcactcctgacagctttcctgcactgcagcttcctgctcctctgactctagtgggaacaggccccagctcagcctccggcagggaggtcacccctccacttcagcttgccctgacctccgctcgcaaaccccgagcttccaagccttttgctccagccctgcggcttccccagaagcctgggcttagggtggagatgccgcctacacacgatcctggccctccacctgcctccaggccacgaaatgggaattccagcactaagccaggcaccgggcagaagctgggccttccgcctcccttggatggggtcaagaggccaggcctggcacattttggagtgtcctggctaccagctctcacctacacccacgcacccccccacacactatgctctctcaagaatgtaatttattggggcccccccagctgctttcctcacctgcccctgccctaccttacacccccagcttgacttctttccagtccacgtgtgtatataatgatatctatatttttgcccaggtctgggtattgctcctgcccagaccctgacatccctttccactgtgtgtgtgaccatgctgggggagggggactctgcttggaattaaaaggttgcattgggtccctaaaatctgtctttt

SEQ ID NO: 389754 - DNA, 2623 bp, Homo sapiens
tggcgcgggctcgggtttcctgggctcgcgcggcgcggcccgtgctacctgttggggaagaaaacccgagcccccggaggggccggggccggggccgggacgtgcatccagccgggccccgggccccaggccccaggcccgaggcgcaggcgagggccctgcggagcccggcggagcccgggcggcccgcggacgccaggagcctcctcgggcagcgagattgctttttttccgcctggagagtcaccgccgagggatgaggacgcgccagcccgggggaacgcgccagctgctttcgcggccccaagcgcgcagtgcccagcagccgcgccgagcctgacacgctgtcctctcccctcgcgcacagggctctgcgagtgacccggcgggcgagctccgtgctgcatggaacggctgcagaaggccaagatggacaatcaggtgctgggctacaaggacctggctgccatccccaaggacaaggccatcctggacatcgagcggcccgacctcatgatctacgagcctcacttcacttattccctcctggaacacgtggagctgcctcgcagccgcgagcgctcgctgtcacccaaatccacatcccccccaccatccccagaggtgtgggcggacagccggtcgcctggaatcatctctcaggcctcggcccccagaaccactggaaccccccggaccagcctgccccatttccaccaccctgagacctcccgcccagattccaacatctacaagaagcctcccatctataagcagagagagtccgtgggaggcagccctcagaccaagcacctcatcgaggatctcatcatcgagtcatccaagtttcctgcagcccagcccccagaccccaaccagccagccaaaatcgaaaccgactactggccatgccccccgtctctggctgttgtggagacagaatggaggaagcggaaggcgtctcggaggggagcagaggaagaggaggaggaggaagatgacgactctggagaggagatgaaggctctcagggagcgtcagagagaggaactcagtaaggttacttccaacttgggaaagatgatcttgaaagaagagatggaaaagtcattgccgatccgaaggaaaacccgctctctgcctgaccggacacccttccatacctccttgcaccagggaacgtctaaatcttcctctctccccgcctatggcaggaccaccctgagccggctacagtccacagagttcagcccatcagggagtgagactggaagcccaggcctgcagaacggagagggccagagggggaggatggaccgggggaactccctgccctgtgtgctggagcagaagatctatccctatgaaatgctagtggtgaccaacaaggggcgaaccaagctgccaccgggggtggatcggatgcggcttgagaggcatctgtctgccgaggacttctcaagggtatttgccatgtcccctgaagagtttggcaagctggctctgtggaagcggaatgagctcaagaagaaggcctctctcttctgatggcccccacctgctccgggacggcccccttacccctgctgcttcagggtttttccccggcgggttgggaggggcaggaggtggggtggaaatagggtgggctcctttcctcaggtagagtggggggccaaaacctctgcagtccccggcagtgagctatggactttcttccccctcacaaggctgggggcctcctgctctcgtccctggccctccctgcacagggcaaagccagtctgggctctggcacacagagttcatgtttgcgccctctccctgcccctcaccccagagggtgaggaggaatgaggggcattggtggttaggccggttggctgtcttgaacagctggagggaagatgcaggggtgggaagcggccaggcagaaagagctccaggctcttgtgtcgcccacccagccctcccatactcactcctgacagctttcctgcactgcagcttcctgctcctctgactctagtgggaacaggccccagctcagcctccggcagggaggtcacccctccacttcagcttgccctgacctccgctcgcaaaccccgagcttccaagccttttgctccagccctgcggcttccccagaagcctgggcttagggtggagatgccgcctacacacgatcctggccctccacctgcctccaggccacgaaatgggaattccagcactaagccaggcaccgggcagaagctgggccttccgcctcccttggatggggtcaagaggccaggcctggcacattttggagtgtcctggctaccagctctcacctacacccacgcacccccccacacactatgctctctcaagaatgtaatttattggggcccccccagctgctttcctcacctgcccctgccctaccttacacccccagcttgacttctttccagtccacgtgtgtatataatgatatctatatttttgcccaggtctgggtattgctcctgcccagaccctgacatccctttccactgtgtgtgtgaccatgctgggggagggggactctgcttggaattaaaaggttgcattgggtccctaaaatctgtctttt

SEQ ID NO: 389755 - DNA, 2365 bp, Homo sapiens
  misc_feature (3)..(3): n is a, c, g, or t
  misc_feature (6)..(6): n is a, c, g, or t
ggnacnaggttgcctggttgtgagagtcaggggagcagggacaggtccaagacaaggaaggcagttgggctgtgggaatggggagcccagggaaggcctccagagctggggctctgcgagtgacccggcgggcgagctccgtgctgcatggaacggctgcagaaggccaagatggacaatcaggtgctgggctacaaggacctggctgccatccccaaggacaaggccatcctggacatcgagcggcccgacctcatgatctacgagcctcacttcacttattccctcctggaacacgtggagctgcctcgcagccgcgagcgctcgctgtcacccaaatccacatcccccccaccatccccagaggtgtgggcggacagccggtcgcctggaatcatctctcaggcctcggcccccagaaccactggaaccccccggaccagcctgccccatttccaccaccctgagacctcccgcccagattccaacatctacaagaagcctcccatctataagcagagagagtccgtgggaggcagccctcagaccaagcacctcatcgaggatctcatcatcgagtcatccaagtttcctgcagcccagcccccagaccccaaccagccagccaaaatcgaaaccgactactggccatgccccccgtctctggctgttgtggagacagaatggaggaagcggaaggcgtctcggaggggagcagaggaagaggaggaggaggaagatgacgactctggagaggagatgaaggctctcagggagcgtcagagagaggaactcagtaaggttacttccaacttgggaaagatgatcttgaaagaagagatggaaaagtcattgccgatccgaaggaaaacccgctctctgcctgaccggacacccttccatacctccttgcaccagggaacgtctaaatcttcctctctccccgcctatggcaggaccaccctgagccggctacagtccacagagttcagcccatcagggagtgagactggaagcccaggcctgcagaacggagagggccagagggggaggatggaccgggggaactccctgccctgtgtgctggagcagaagatctatccctatgaaatgctagtggtgaccaacaaggggcgaaccaagctgccaccgggggtggatcggatgcggcttgagaggcatctgtctgccgaggacttctcaagggtatttgccatgtcccctgaagagtttggcaagctggctctgtggaagcggaatgagctcaagaagaaggcctctctcttctgatggcccccacctgctccgggacggcccccttacccctgctgcttcagggtttttccccggcgggttgggaggggcaggaggtggggtggaaatagggtgggctcctttcctcaggtagagtggggggccaaaacctctgcagtccccggcagtgagctatggactttcttccccctcacaaggctgggggcctcctgctctcgtccctggccctccctgcacagggcaaagccagtctgggctctggcacacagagttcatgtttgcgccctctccctgcccctcaccccagagggtgaggaggaatgaggggcattggtggttaggccggttggctgtcttgaacagctggagggaagatgcaggggtgggaagcggccaggcagaaagagctccaggctcttgtgtcgcccacccagccctcccatactcactcctgacagctttcctgcactgcagcttcctgctcctctgactctagtgggaacaggccccagctcagcctccggcagggaggtcacccctccacttcagcttgccctgacctccgctcgcaaaccccgagcttccaagccttttgctccagccctgcggcttccccagaagcctgggcttagggtggagatgccgcctacacacgatcctggccctccacctgcctccaggccacgaaatgggaattccagcactaagccaggcaccgggcagaagctgggccttccgcctcccttggatggggtcaagaggccaggcctggcacattttggagtgtcctggctaccagctctcacctacacccacgcacccccccacacactatgctctctcaagaatgtaatttattggggcccccccagctgctttcctcacctgcccctgccctaccttacacccccagcttgacttctttccagtccacgtgtgtatataatgatatctatatttttgcccaggtctgggtattgctcctgcccagaccctgacatccctttccactgtgtgtgtgaccatgctgggggagggggactctgcttggaattaaaaggttgcattgggtccctaaaatctgtctttt

SEQ ID NO: 389756 - DNA, 1827 bp, Homo sapiens
tctagaggaccccccgagttggtcctgatctcatcatcgagtcatccaagtttcctgcagcccagcccccagaccccaaccagccagccaaaatcgaaaccgactactggccatgccccccgtctctggctgttgtggagacagaatggaggaagcggaaggcgtctcggaggggagcagaggaagaggaggaggaggaagatgacgactctggagaggagatgaaggctctcagggagcgtcagagagaggaactcagtaaggttacttccaacttgggaaagatgatcttgaaagaagagatggaaaagtcattgccgatccgaaggaaaacccgctctctgcctgaccggacacccttccatacctccttgcaccagggaacgtctaaatcttcctctctccccgcctatggcaggaccaccctgagccggctacagtccacagagttcagcccatcagggagtgagactggaagcccaggcctgcagaacggagagggccagagggggaggatggaccgggggaactccctgccctgtgtgctggagcagaagatctatccctatgaaatgctagtggtgaccaacaaggggcgaaccaagctgccaccgggggtggatcggatgcggcttgagaggcatctgtctgccgaggacttctcaagggtatttgccatgtcccctgaagagtttggcaagctggctctgtggaagcggaatgagctcaagaagaaggcctctctcttctgatggcccccacctgctccgggacggcccccttacccctgctgcttcagggtttttccccggcgggttgggaggggcaggaggtggggtggaaatagggtgggctcctttcctcaggtagagtggggggccaaaacctctgcagtccccggcagtgagctatggactttcttccccctcacaaggctgggggcctcctgctctcgtccctggccctccctgcacagggcaaagccagtctgggctctggcacacagagttcatgtttgcgccctctccctgcccctcaccccagagggtgaggaggaatgaggggcattggtggttaggccggttggctgtcttgaacagctggagggaagatgcaggggtgggaagcggccaggcagaaagagctccaggctcttgtgtcgcccacccagccctcccatactcactcctgacagctttcctgcactgcagcttcctgctcctctgactctagtgggaacaggccccagctcagcctccggcagggaggtcacccctccacttcagcttgccctgacctccgctcgcaaaccccgagcttccaagccttttgctccagccctgcggcttccccagaagcctgggcttagggtggagatgccgcctacacacgatcctggccctccacctgcctccaggccacgaaatgggaattccagcactaagccaggcaccgggcagaagctgggccttccgcctcccttggatggggtcaagaggccaggcctggcacattttggagtgtcctggctaccagctctcacctacacccacgcacccccccacacactatgctctctcaagaatgtaatttattggggcccccccagctgctttcctcacctgcccctgccctaccttacacccccagcttgacttctttccagtccacgtgtgtatataatgatatctatatttttgcccaggtctgggtattgctcctgcccagaccctgacatccctttccactgtgtgtgtgaccatgctgggggagggggactctgcttggaattaaaaggttgcattgggtccctaaaatctgtctttt

SEQ ID NO: 389757 - DNA, 1922 bp, Homo sapiens
  misc_feature (3)..(3): n is a, c, g, or t
  misc_feature (6)..(6): n is a, c, g, or t
ggnacnaggttgcctggttgtgagagtcaggggagcagggacaggtccaagacaaggaaggcagttgggctgtgggaatggggagcccagggaaggcctccagagctggcctggagagtcaccgccgagggatgaggacgcgccagcccgggggaacgcgccagctgctttcgcggccccaagcgcgcagtgcccagcagccgcgccgagcctgacacgctgtcctctcccctcgcgcacagggctctgcgagtgacccggcgggcgagctccgtgctgcatggaacggctgcagaagcaaccacttacctcccccgggagcgtgagcccctcccgagattccagtgtgcctggctctccctccagcatcgtggccaagatggacaatcaggtgctgggctacaaggacctggctgccatccccaaggacaaggccatcctggacatcgagcggcccgacctcatgatctacgagcctcacttcacttattccctcctggaacacgtggagctgcctcgcagccgcgagcgctcgctgtcacccaaatccacatcccccccaccatccccagaggtgtgggcggacagccggtcgcctggaatcatctctcaggcctcggcccccagaaccactggaaccccccggaccagcctgccccatttccaccaccctgagacctcccgcccagattccaacatctacaagaagcctcccatctataagcagagagagtccgtgggaggcagccctcagaccaagcacctcatcgaggatctcatcatcgagtcatccaagtttcctgcagcccagcccccagaccccaaccagccagccaaaatcgaaaccgactactggccatgccccccgtctctggctgttgtggagacagaatggaggaagcggaaggcgtctcggaggggagcagaggaagaggaggaggaggaagatgacgactctggagaggagatgaaggctctcagggagcgtcagagagaggaactcagtaaggttacttccaacttgggaaagatgatcttgaaagaagagatggaaaagtcattgccgatccgaaggaaaacccgctctctgcctgaccggacacccttccatacctccttgcaccagggaacgtctaaatcttcctctctccccgcctatggcaggaccaccctgagccggctacagtccacagagttcagcccatcagggagtgagactggaagcccaggcctgcagaacggagagggccagagggggaggatggaccgggggaactccctgccctgtgtgctggagcagaagatctatccctatgaaatgctagtggtgaccaacaaggggcgaaccaagctgccaccgggggtggatcggatgcggcttgagaggcatctgtctgccgaggacttctcaagggtatttgccatgtcccctgaagagtttggcaagctggctctgtggaagcggaatgagctcaagaagaaggcctctctcttctgatggcccccacctgctccgggacggcccccttacccctgctgcttcagggtttttccccggcgggttgggaggggcaggaggtggggtggaaatagggtgggctcctttcctcaggtagagtggggggccaaaacctctgcagtccccggcagtgagctatggactttcttccccctcacaaggctgggggcctcctgctctcgtccctggccctccctgcacagggcaaagccagtctgggctctggcacacagagttcatgtttgcgccctctccctgcccctcaccccagagggtgaggaggaatgaggggcattggtggttaggccggttggctgtcttgaacagctggagggaagatgcaggggtgataaaatcaaagcgatattgacacactacaaacattatagaacctgcaaaaaaa

SEQ ID NO: 389758 - DNA, 162 bp, Homo sapiens
aggatatcaaactcaaacagtttaattgagctacttgtctactgaccaaaaacttcgttttttgggagaggtgctgggctcttgggcaggaaagagggtaaaatgttggctctggtgagtcatctacctgctttcttgctgaccgctgtgtcggtgggtaag

SEQ ID NO: 389759 - DNA, 317 bp, Homo sapiens
tgctgtggagctcacagcaaaccaccacgcagaatttgctgttgattgctcttttcactcctcctctctgaaactagcaagaacaggaagaaatatgtttgttcccagaggtacatacagtactcaactacaggtaccacctctctagactcattttataactcagctgcttaatgccatatttatcagtcttttaaaaaccatatcttctttgataaatatgaaaatctcacgtcttctccacactccgacctcttaagtctataatgtgcctctttagagggtatacagccaatccccatcttctttgaggttct

SEQ ID NO: 389760 - DNA, 115 bp, Homo sapiens
ggttctcacagtcacaaagatgagcaaagctccctggacagccacagactgaaggcactaaatgaccattcgaaggacatctgagaacaaacagaagtaacccttcgtgactcag

SEQ ID NO: 389761 - DNA, 588 bp, Homo sapiens
cctatacgttgatatggtatatttggaaatgaatttggtgatatgtatcaataagctttactgttgataatcttgatctgagaacttcatttttatatttatttgcctaaagaaagactatatttataagggtgtttgtgttgaaatggtcataccagtggaaatggcctacatggaatgggctgtacctcagctggacttcaattcaaatggctgtctgccagctccgagccttggacaagtcacttaacctctaaccctcagtcagtctctatatttttaaatggggacgacaataatccctgtctcagagtgtttttatgaagattacaatgtaatttaatatgcaaagcacttagaaccctgtctagcacggagaaacagcgcagttgtcaccccttctctgcaggggatacattccagggacccccgtggaagcctaaaactccaatagtgtcaactctgtataagcaggttgattatccctaatctgaaaatttgaaatgttctaaaaaccaaaactcagcggtgaaaggaaatccccactggagcatttcggattttcagattgaggcatttaaccagtta

SEQ ID NO: 389762 - DNA, 425 bp, Homo sapiens
ttatcggaagagcagctggagctcacaatttctcccagatgacatcttcttgctgcttaatcttgcttcctagtacccatctgccaggaaactgtgtgcttgcagtctagactaagacccacgactctgcttacccctcctcttgcagtagcaacataaagaccggggatcaattccctggctgaaaaaaaatgagagaaagatccaataggagtctatgtgggtggctctagggggctgctgctttgggttactagaggccaaacctggggaaacttgacccctgtcctgtccctcctgtgtcctgtctgatgctctgcacagaggaaagcagtgtcatgatttgattccagttacagcatttcttgtggcacctcccccatccccaccccaggacgtctttctaccttgcccacctgccagct

SEQ ID NO: 389763 - DNA, 417 bp, Homo sapiens
tattcaaaagaacgaataataagatgtggtcaaggaggagacagaaccagaccacatagagtccttgagagattttattctaaataacatgtaaagccactaaatgtttttggacagaggaataatgatctggttgaggctttagaaacatcatttttctttttgcatagaaagctgaattggtaagatgggggagaagtagaaacaaaaggactagttagaaggctccttagtagtataaccagaccagatgggcctcagattaaggtggtagcaatggaaatgatgagacatggtgagatttagagtagatttgaaggtacagacttgataataggttgcatgtgggctgtaaaagatactgagaaaccaaagaaggctcctggcctttcagcttgaccaactgagtcacgagtg

SEQ ID NO: 389764 - DNA, 373 bp, Homo sapiens
acggagtctttctcaggccatatttagtttgctttaacacgcttaacatttttataatacttcactttttaaattttgcatttgattaaaagttctaatttaatataagttttgcaaagcatcatctctttgaagatctttttttatgctacatgttacccataatagaaaaataaaaaccagaatatctcacctccactggttcgttatactctcctatctcctctcctcctaccatttattatcaattctttctttttctttttcttttctttttttttttttgaaacagtctcactctgtagcccaggctgcagtgcagtggggtgacttcagctcactgcaacctctgcctcatgggttcaagtgattc

SEQ ID NO: 389765 - DNA, 356 bp, Homo sapiens
aagttgtcttggatcacttcttcccttttcgttaactgcagctaccctgaagacatactcttctcctgcagttaagccagatatagttgcttctagagtcttaacttgtgtgcaggtgctccacttttcactccctttagtctgcatttcaaccacataaccagtaattttgctgccaccatcactttctggtttctcccacttaattgtagctgtattacgggtcacatcaacaagagttactcttccaggtgggaggggtggttcagacactttaacgggttctgttgtttcagctggcaaaccaatcccatattcattggaagccaagactcggaagtagtaagaacatcctt

SEQ ID NO: 389766 - DNA, 282 bp, Homo sapiens
gcattacaacaacaacaacaagccaccgaagttaacagagcagtgtcaccaaaacactgtcacaggaaaagagcaaagagactatgcaggaggggaaggcaaacacaggcaacagctcccctaagtacagaggtcctcaaaccatactcctcatcttcaggggccgtgatacactgaccacccatgtgcacttctctaagcagaggacccacagcttagtcccagagccattctaaaagggctctgagattccagaaaggttaagaagcactactctaaagg

SEQ ID NO: 389767 - DNA, 467 bp, Homo sapiens
cacctggctaagttttgttttttcagtagagacggggtttcgccatgttggccaggatggtcttgaactcctcatctcaggtgatccacccgccttggcctctcaaaatgctgggattacaggcataagccaccacgcccggcccccagtacctttcaaaacgtgtaatgagtgtaccctttgacttagcaatttcacttctgcaacttatcctgtagaatgatttgcacaactgtgcaagaaaatatgttcaaagatgttcattattgtttgtaactgtaaaaactggagaaaagagaaatatctaggacaggggtatttaagagatatctctatatgtagtgacgtagaaggatgtctaatttcagaacagtgtagagtgggtctttttctttttgctaaaaatatcatatacaggtgcttatatagacatagacactttcatttagtgtgcatgaaaagagcac

SEQ ID NO: 389768 - DNA, 425 bp, Homo sapiens
gccactgtggccactcagtccaactttgactgcaggtgccttagagaccccaagcaagaaccactaagctgtgctcagctaattcacagaaatatgagagataataaatttaagttttagggtggttagttatatgactatagataacatgcttagataaagtagataaaatagataacatagataaaaatgcttattttattcattaaaaagggtcttttaaattctcttagtcttataagtgaaacactgctttcagttttcttcattttgctcctggaatccttctgactgtattgaaggttgacaggtgacttctcttaggacgagctgaaagacatggctaatttttgtgcatcttcaattaaaaattaaacacttagtagagtgaagttgttgtaattgctgctgtatttaagaaaaac

SEQ ID NO: 389769 - DNA, 818 bp, Homo sapiens
caaactaatattttttcccctctacgtgctgtcactaatcttggattaccactgacccctttctccattactgtatttcccattgttgctgggaaaaaaaaatctgttataaagttacctgtactgagcctctgtcgggggcatgctgctccaacagtttcccttgttagcagtcattctaaacttttccacaaccttccttcttccagggtcattttattcctctgtagagatgattttgctttctgctttcctaagataatctagtgtggcttcattccattattttcttctctcttccctttacaacattactatctcaggatttttttgagctattgtttcttgtctcattcactcacctttttttttcagacactgcatcctctggtttccaaagctagccctttcccttgagcctgtacatcctcctgacctcatcacctctctcctgttatgaacttagcttctttttcttacagacatgcctgcgtttcctcgaccttcaaaacaaaacccggataaaattcttcaaactttttccttttctgttcccctcagaatctagggaaattccatgtatgatcagttttcttctaaggaaatgaggaaggctgatgtgagcaccctagatttttggtcacctttccttccacctatgttttctcatcactgtggcatgactgccttctctactgcttgtaaaactgtattctgaagaaccttagaggatatttagtaagtaacataataaaatagtgccctcatcctaaacctttgttcatgtcttccttcctaaaactgatcatttcacttta

SEQ ID NO: 389770 - DNA, 383 bp, Homo sapiens
tttctaacaattagttgctgatatagaaatagaagtattttccggacatttagtttacatatggccattttgctaaactctattgttaattctgataatgtctcaataattctttgttttttttctgtaggaagtcaaattgtaaatgataacagtttttttttttaattttcaaagcttatagttctttcttcttttttgtttatttgaccacatggcctaagacctacagtacaatgctgagtagtaggattaatagtagataactttattttgtttctgatactaaaggagctgcttctaatattttatttggttgatttttttgcaagtttatggtagacattcttagattagatttgtaaaattcccttctactttta

SEQ ID NO: 389771 - DNA, 695 bp, Homo sapiens
gtgttgtttactacagtccattttatccctaggccttttatttgttttcttttacatcattcccctttcctggttggtttctgtaggtctgggcatcttttataaaaactcataaatctaatattcttccccctcaaagtctattggattgtagatgtttggaccataaaatatgcatgactgggaaagaggggtagacccagtctcagtttctaacttttctgactgtttagaattgataataaagtcttttttaagtccaaagagtttattcatcttattacttttggcttgccagaaagctaaatgctcattactgtgtaagttaagtattgagtgttaacctacagttgctgtatccacaaattactctttttgttcttgaagttaaaaatacagtgtgcaggaagtgaacacttaatccttaatatccttatttttaagtgtccacctcatgaggttgttgtgaagattgaagtagatgatcctcataaaatgctcagcagtgtagcacatagcaagttctcaagttttagccactactaatttatgattcctcattctttctatttgccgcaaaaatgagccttgcaaattgtgatttaatgaattttatatatgaacaaaatgtaccctgttgcctttttcttttgaattttaaattttattatgtgacttacacattactgtttaat

SEQ ID NO: 389772 - DNA, 266 bp, Homo sapiens
ggcctgaggctaccaaactcaacaaggcttgttaagtttttgttttaactaatagttaacagttaagcaaaaccccttaattaaaacaaaagcaatagctaataactaagtagaagtcacaatcagccaaaatcacctccctaaaagaaaatctaaaatgatcttttctaactggaaaggcagtgtgggatactgagcaaggacacaggctctggaggcagatctgggttcaaactccagccccagaacaagatgtgctaagcatg

SEQ ID NO: 389773 - DNA, 2743 bp, Homo sapiens
gagtattcagcgatggacatttgcatggtggccctgtctcatcttggctctgctctccagcttggcagcctctggcttcccgagaagcccctttcggctgcttggggagcaagggtggccaatggcatcgaggtctacagtaccaaaatcaactccaaggtgacctcccgttttgctcacaatgttgtcaccatgagagccgtcaaccgtgcagacacggccaaggaggtttcctttgatgtggagctgcccaagacggccttcatcaccaacttcaccttgaccatcgacggtgttacctaccctgggaatgtcaaggagaaggaagttgccaagaagcagtattgggaggaagttggagaagttcacagtctcggtcaacgtggctgcaggcagcaaagtcaccttcgagctaacctacgaggagctgctgaagaggcacaagggcaagtacgagatgtacctcaaggtccagcctaagcaactggtcaaacactttgagatcgaggtagacatcttcgagcctcagggaatcagcatgctggatgctgaggcctctttcatcaccaacgacctcctgggaagcgccctcaccaagtccttctcagggaaaaagggccatgtgtccttcaagcccagcttagaccaacagcgttcatgcccaacctgtacagattccctcctcaatggagatttcactatcacctatgacgtgaacagagaatctcctggcaacgtgcagatagtcaatggctacttcgtgcacttctttgcacctcaaggccttccagtggtgcctaagaacgtggcctttgtgattgacatcagcggctccatggctggtcggaaattagagcagacaaaggaggcccttctcagaatcctggaagatatgaaagaggaagactatctgaatttcatcctgttcagtggagatgtgtccacatggaaagagcacttagtccaggccacgcccgagaacctccaggaggccaggacgtttgtgaagagcatggaggataaaggaatgaccaacatcaatgacgggctgctgaggggcatcagtatgctgaacaaggcccgagaggagcacagaatcccagagaggagcacctccattgtcatcatgctgactgatggggatgccaatgttggtgagagcagacccgaaaaaatccaagagaatgtgcggaatgccatcgggggcaagttccccttgtataacctgggctttggcaacaatctgaattataacttcctggagaacatggccctggagaaccatgggtttgcccggcgcatttatgaggactctgatgccgatttgcagttgcagggcttctatgaggaggtggccaacccactgctgacgggtgtggagatggagtaccccgagaacgctatcctggacctcacccagaacacttaccagcacttctacgatggctctgagatcgtggtggccgggcgcctggtggacgaggacatgaacagctttaaggcagatgtgaagggccatggggccaccaacgacctgaccttcacagaggaggtggacatgaaggagatggagaaggccctgcaggagcgggactacatcttcgggaattacattgagcggctctgggcctacctcaccattgagcagctgctggagaagcgcaagaacgcccatggcgaggagaaggagaacctcacggcccgggccctggacctgtccctcaagtatcactttgtgactccactgacctcaatggtggtgaccaagcctgaggacaacgaggatgagagggccattgccgacaagcctggggaagatgcagaagccacaccggtgagccccgccatgtcctacctgaccagctaccagcctcctcaaaacccctactactatgtggacggggatccccacttcatcatccaaattccggagaaagacgatgccctctgcttcaacatcgatgaagccccaggcacagtgctgcgccttattcaggatgcagtcacaggcctcacagttaatgggcagatcactggcgacaagagaggcagccctgactccaagaccagaaagacttactttggaaaactgggcatcgcaatgctcagatggacttccaggtggaggtgacaacggagaagatcaccctgtggaacagggccgtgccgagcactttcagctggctggacacagtcacagtcacgcaggatgggctgtccatgatgatcaacaggaagaacatggtggtctcctttggagatggggttaccttcgtggtcgtcctacaccaggtgtggaagaaacatcctgtccaccgtgactttctaggcttctacgtggtggacagtcaccggatgtcagcacagacgcatgggctgctggggcaattcttccaaccctttgactttaaagtgtctgacatccggccaggctctgaccccacaaagccagatgccacattggtggtgaagaaccatcagctgattgtcaccaggggctcccagaaagactacagaaaggatgccagcatcggcacgaaggttgtctgctggttcgtccacaacaacggagaagggctgattgatggtgtccacactgactacattgtccccaacctgttttgagtagacacaccagctcctgttgggatggatggcccggattttatggcatctggaacatgggcacagagaggggcctgtgggaggggctgggaaaataaagtccaaggtcgagaccaga

SEQ ID NO: 389774 - DNA, 2686 bp, Homo sapiens
gagtattcagcgatggacatttgcatggtggccctgtctcatcttggctctgctctccagcttggcagcctctggcttcccgagaagcccctttcggctgcttggggagcaagggtggccaatggcatcgaggtctacagtaccaaaatcaactccaaggtgacctcccgttttgctcacaatgttgtcaccatgagagccgtcaaccgtgcagacacggccaaggaggtttcctttgatgtggagctgcccaagacggccttcatcaccaacttcaccttgaccatcgacggtgttacctaccctgggaatgtcaaggagaaggaagttgccaagaagcagtattgggaggaagttggagaagttcacagtctcggtcaacgtggctgcaggcagcaaagtcaccttcgagctaacctacgaggagctgctgaagaggcacaagggcaagtacgagatgtacctcaaggtccagcctaagcaactggtcaaacactttgagatcgaggtagacatcttcgagcctcagggaatcagcatgctggatgctgaggcctctttcatcaccaacgacctcctgggaagcgccctcaccaagtccttctcagggaaaaagggccatgtgtccttcaagcccagcttagaccaacagcgttcatgcccaacctgtacagattccctcctcaatggagatttcactatcacctatgacgtgaacagagaatctcctggcaacgtgcagatagtcaatggctacttcgtgcacttctttgcacctcaaggccttccagtggtgcctaagaacgtggcctttgtgattgacatcagcggctccatggctggtcggaaattagagcagacaaaggaggcccttctcagaatcctggaagatatgaaagaggaagactatctgaatttcatcctgttcagtggagatgtgtccacatggaaagagcacttagtccaggccacgcccgagaacctccaggaggccaggacgtttgtgaagagcatggaggataaaggaatgaccaacatcaatgacgggctgctgaggggcatcagtatgctgaacaaggcccgagaggagcacagaatcccagagaggagcacctccattgtcatcatgctgactgatggggatgccaatgttggtgagagcagacccgaaaaaatccaagagaatgtgcggaatgccatcgggggcaagttccccttgtataacctgggctttggcaacaatctgaattataacttcctggagaacatggccctggagaaccatgggtttgcccggcgcatttatgaggactctgatgccgatttgcagttgcagggcttctatgaggaggtggccaacccactgctgacgggtgtggagatggagtaccccgagaacgctatcctggacctcacccagaacacttaccagcacttctacgatggctctgagatcgtggtggccgggcgcctggtggacgaggacatgaacagctttaaggcagatgtgaagggccatggggccaccaacgacctgaccttcacagaggaggtggacatgaaggagatggagaaggccctgcaggagcgggactacatcttcgggaattacattgagcggctctgggcctacctcaccattgagcagctgctggagaagcgcaagaacgcccatggcgaggagaaggagaacctcacggcccgggccctggacctgtccctcaagtatcactttgtgactccactgacctcaatggtggtgaccaagcctgaggacaacgaggatgagagggccattgccgacaagcctggggaagatgcagaagccacaccggtgagccccgccatgtcctacctgagtgagtacatgctggcaaaagacgatgccctctgcttcaacatcgatgaagccccaggcacagtgctgcgccttattcaggatgcagtcacaggcctcacagttaatgggcagatcactggcgacaagagaggcagccctgactccaagaccagaaagacttactttggaaaactgggcatcgcaatgctcagatggacttccaggtggaggtgacaacggagaagatcaccctgtggaacagggccgtgccgagcactttcagctggctggacacagtcacagtcacgcaggatgggctgtccatgatgatcaacaggaagaacatggtggtctcctttggagatggggttaccttcgtggtcgtcctacaccaggtgtggaagaaacatcctgtccaccgtgactttctaggcttctacgtggtggacagtcaccggatgtcagcacagacgcatgggctgctggggcaattcttccaaccctttgactttaaagtgtctgacatccggccaggctctgaccccacaaagccagatgccacattggtggtgaagaaccatcagctgattgtcaccaggggctcccagaaagactacagaaaggatgccagcatcggcacgaaggttgtctgctggttcgtccacaacaacggagaagggctgattgatggtgtccacactgactacattgtccccaacctgttttgagtagacacaccagctcctgttgggatggatggcccggattttatggcatctggaacatgggcacagagaggggcctgtgggaggggctgggaaaataaagtccaaggtcgagaccaga

SEQ ID NO: 389775 - DNA, 3848 bp, Homo sapiens
gagtattcagcgatggacatttgcatggtggccctgtctcatcttggctctgctctccagcttggcagcctctggcttcccgagaagcccctttcggctgcttggggagcaagggtggccaatggcatcgaggtctacagtaccaaaatcaactccaaggtgacctcccgttttgctcacaatgttgtcaccatgagagccgtcaaccgtgcagacacggccaaggaggtttcctttgatgtggagctgcccaagacggccttcatcaccaacttcaccttgaccatcgacggtgttacctaccctgggaatgtcaaggagaaggaagttgccaagaagcagtattgggaggaagttggagaagttcacagtctcggtcaacgtggctgcaggcagcaaagtcaccttcgagctaacctacgaggagctgctgaagaggcacaagggcaagtacgagatgtacctcaaggtccagcctaagcaactggtcaaacactttgagatcgaggtagacatcttcgagcctcagggaatcagcatgctggatgctgaggcctctttcatcaccaacgacctcctgggaagcgccctcaccaagtccttctcagggaaaaagggccatgtgtccttcaagcccagcttagaccaacagcgttcatgcccaacctgtacagattccctcctcaatggagatttcactatcacctatgacgtgaacagagaatctcctggcaacgtgcagatagtcaatggctacttcgtgcacttctttgcacctcaaggccttccagtggtgcctaagaacgtggcctttgtgattgacatcagcggctccatggctggtcggaaattagagcagacaaaggaggcccttctcagaatcctggaagatatgaaagaggaagactatctgaatttcatcctgttcagtggagatgtgtccacatggaaagagcacttagtccaggccacgcccgagaacctccaggaggccaggacgtttgtgaagagcatggaggataaaggaatgaccaacatcaatgacgggctgctgaggggcatcagtatgctgaacaaggcccgagaggagcacagaatcccagagaggagcacctccattgtcatcatgctgactgatggggatgccaatgttggtgagagcagacccgaaaaaatccaagagaatgtgcggaatgccatcgggggcaagttccccttgtataacctgggctttggcaacaatctgaattataacttcctggagaacatggccctggagaaccatgggtttgcccggcgcatttatgaggactctgatgccgatttgcagttgcagggcttctatgaggaggtggccaacccactgctgacgggtgtggagatggagtaccccgagaacgctatcctggacctcacccagaacacttaccagcacttctacgatggctctgagatcgtggtggccgggcgcctggtggacgaggacatgaacagctttaaggcagatgtgaagggccatggggccaccaacgacctgaccttcacagaggaggtggacatgaaggagatggagaaggccctgcaggagcgggactacatcttcgggaattacattgagcggctctgggcctacctcaccattgagcagctgctggagaagcgcaagaacgcccatggcgaggagaaggagaacctcacggcccgggccctggacctgtccctcaagtatcactttgtgactccactgacctcaatggtggtgaccaagcctgaggacaacgaggatgagagggccattgccgacaagcctggggaagatgcagaagccacaccggtgagccccgccatgtcctacctgaccagctaccagcctcctcaaaacccctactactatgtggacggggatccccacttcatcatccaaattccggagaaagacgatgccctctgcttcaacatcgatgaagccccaggcacagtgctgcgccttattcaggatgcagtcacaggcctcacagttaatgggcagatcactggcgacaagagaggcagccctgactccaagaccagaaagacttactttggaaaactgggcatcgcaatgctcagatggacttccaggtggaggtgacaacggagaagatcaccctgtggaacagggccgtgccgagcactttcagctggctggacacagtcacagtcacgcaggatgggctgtccatgatgatcaacaggaagaacatggtggtctcctttggagatggggttaccttcgtggtcgtcctacaccaggtgtggaagaaacatcctgtccaccgtgactttctaggcttctacgtggtggacagtcaccggatgtcagcacagacgcatgggctgctggggcaattcttccaaccctttgactttaaagtgtctgacatccggccaggctctgaccccacaaagccagatgccacattggtggtgaagaaccatcagctgattgtcaccaggggctcccagaaagactacagaaaggatgccagcatcggcacgaaggttgtctgctggttcgtccacaacaacggagaagggctgattgatggtgtccacactgactacattgtccccaacctgttttgagtagacacaccagctcctgttgggatggatggcccggattttatggcatctggaacatgggcacagagaggggcctgtgggaggggctgggaaaataaagtccaaggtcgagaccagaaaaaaaaaaaaaaaaaaaaaaaaaaaaaaaaaaaaaaaaaaaaggggggcccccccaaaaatttcccccggggggcgccccaaacgctatcacgcgcgccacccccagtcttttctgttgacacaagggtggcgccccccaataagaggaggagctcgcgtattataataacgactagagagcgcgacggcggccgagcacggttataaacaacgcgtgtcgctagatccgtgtgggacaaccaaacgcggttaaccagcgtaggagagccactttggtgagacagcggagcacccccccactatctcttcgcgcgcggggggggagagcaaccaccaactatgtgggccaccgaaacattacccctctctcaagcgcaggatctttctacacacgcgcctcctcaaagggcggggccacatacatatatatcacaccacctcttttccaccggcgctgtctaacaacgctgggtgcgtgttcacaccacccacaatcaccgccgggcacaattattaattgaccctggcggctgccctgccttttagaaaacaaactagtttgtgcgacgtcaaaccaccggcgagactaatcttcgtctgtatctgcacaccagcccttttttttctaccccccccgggcggagccgctcagatagttagataataaccgccggcatcgacaggtctcacatgcagcctacacgctacacaatctctaagaacgcagtccgtaagccactagcggtcgttacactaccaacgccttaatactacgaagtggtgcgagctggactcgactaggatgccgccccggacgcactgatgtggcgtcggcacgggcgagcgagcgagtgcgcgcgctagcaagccggcaggcgagatggtgtatgcggaggagtgatggtggctgctcagcagacgtgtcgttgggactgctctggcgttggtggttgtgtggctgtgtattactggtgctagcggggttgcgtgtaggcttgtgcttgctgctagagcgtgtgcagattgcatgcgccgaaggagacggacgcagaggagcgcgccctgcgaggagtcacacaggaccgaaacgagacaaaaccgcg

SEQ ID NO: 389776 - DNA, 893 bp, Homo sapiens
gtcgtcgggcgcctcccagggccacttgcttagctcagccctctctccctttgtatctgcagccagctaccagcctcctcaaaacccctactactatgtggacggggatccccacttcatcatccaaattccggagaaagacgatgccctctgcttcaacatcgatgaagccccaggcacagtgctgcgccttattcaggatgcagtcacaggcctcacagttaatgggcagatcactggcgacaagagaggcagccctgactccaagaccagaaagacttactttggaaaaatcaccctgtggaacagggccgtgccgagcactttcagctggctggacacagtcacagtcacgcaggatgggctgtccatgatgatcaacaggaagaacatggtggtctcctttggagatggggttaccttcgtggtcgtcctacaccaggtgtggaagaaacatcctgtccaccgtgactttctaggcttctacgtggtggacagtcaccggatgtcagcacagacgcatgggctgctggggcaattcttccaaccctttgactttaaagtgtctgacatccggccaggctctgaccccacaaagccagatgccacattggtggtgaagaaccatcagctgattgtcaccaggggctcccagaaagactacagaaaggatgccagcatcggcacgaaggttgtctgctggttcgtccacaacaacggagaagggctgattgatggtgtccacactgactacattgtccccaacctgttttgagtagacacaccagctcctgttgggatggatggcccggattttatggcatctggaacatgggcacagagaggggcctgtgggaggggctgggaaaataaagtccaaggtcgagaccaga

SEQ ID NO: 389777 - DNA, 2604 bp, Homo sapiens
gagtattcagcgatggacatttgcatggtggccctgtctcatcttggctctgctctccagcttggcagcctctggcttcccgagaagcccctttcggctgcttggggagcaagggtggccaatggcatcgaggtctacagtaccaaaatcaactccaaggtgacctcccgttttgctcacaatgttgtcaccatgagagccgtcaaccgtgcagacacggccaaggaggtttcctttgatgtggagctgcccaagacggccttcatcaccaacttcaccttgaccatcgacggtgttacctaccctgggaatgtcaaggagaaggaagttgccaagaagcagtattgggaggaagttggagaagttcacagtctcggtcaacgtggctgcaggcagcaaagtcaccttcgagctaacctacgaggagctgctgaagaggcacaagggcaagtacgagatgtacctcaaggtccagcctaagcaactggtcaaacactttgagatcgaggtagacatcttcgagcctcagggaatcagcatgctggatgctgaggcctctttcatcaccaacgacctcctgggaagcgccctcaccaagtccttctcagggaaaaagggccatgtgtccttcaagcccagcttagaccaacagcgttcatgcccaacctgtacagattccctcctcaatggagatttcactatcacctatgacgtgaacagagaatctcctggcaacgtgcagatagtcaatggctacttcgtgcacttctttgcacctcaaggccttccagtggtgcctaagaacgtggcctttgtgattgacatcagcggctccatggctggtcggaaattagagcagacaaaggaggcccttctcagaatcctggaagatatgaaagaggaagactatctgaatttcatcctgttcagtggagatgtgtccacatggaaagagcacttagtccaggccacgcccgagaacctccaggaggccaggacgtttgtgaagagcatggaggataaaggaatgaccaacatcaatgacgggctgctgaggggcatcagtatgctgaacaaggcccgagaggagcacagaatcccagagaggagcacctccattgtcatcatgctgactgatggggatgccaatgttggtgagagcagacccgaaaaaatccaagagaatgtgcggaatgccatcgggggcaagttccccttgtataacctgggctttggcaacaatctgaattataacttcctggagaacatggccctggagaaccatgggtttgcccggcgcatttatgaggactctgatgccgatttgcagttgcagggcttctatgaggaggtggccaacccactgctgacgggtgtggagatggagtaccccgagaacgctatcctggacctcacccagaacacttaccagcacttctacgatggctctgagatcgtggtggccgggcgcctggtggacgaggacatgaacagctttaaggcagatgtgaagggccatggggccaccaacgacctgaccttcacagaggaggtggacatgaaggagatggagaaggccctgcaggagcgggactacatcttcgggaattacattgagcggctctgggcctacctcaccattgagcagctgctggagaagcgcaagaacgcccatggcgaggagaaggagaacctcacggcccgggccctggacctgtccctcaagtatcactttgtgactccactgacctcaatggtggtgaccaagcctgaggacaacgaggatgagagggccattgccgacaagcctggggaagatgcagaagccacaccggtgagccccgccatgtcctacctgaccagctaccagcctcctcaaaacccctactactatgtggacggggatccccacttcatcatccaaattccggagaaagacgatgccctctgcttcaacatcgatgaagccccaggcacagtgctgcgccttattcaggatgcagtcacaggcctcacagttaatgggcagatcactggcgacaagagaggcagccctgactccaagaccagaaagacttactttggaaaactgggcatcgcaatgctcagatggacttccaggtggaggtgacaacggagaagatcaccctgtggaacagggccgtgccgagcactttcagctggctggacacagtcacagtcacgcaggatggcggatgtcagcacagacgcatgggctgctggggcaattcttccaaccctttgactttaaagtgtctgacatccggccaggctctgaccccacaaagccagatgccacattggtggtgaagaaccatcagctgattgtcaccaggggctcccagaaagactacagaaaggatgccagcatcggcacgaaggttgtctgctggttcgtccacaacaacggagaagggctgattgatggtgtccacactgactacattgtccccaacctgttttgagtagacacaccagctcctgttgggatggatggcccggattttatggcatctggaacatgggcacagagaggggcctgtgggaggggctgggaaaataaagtccaaggtcgagaccaga

SEQ ID NO: 389778 - DNA, 496 bp, Homo sapiens
ccacgttacccgtggcaatggccaggggctgacagcatgaatatttttcttcccagggcaattcttccaaccctttgactttaaagtgtctgacatccggccaggctctgaccccacaaagccagatgccacattggtggtgaagaaccatcagctgattgtcaccaggtgaggagacttctcccacaccctcacctgctcagcaacgagaggaggaaagagcacctgcagcccaggcacattagtctggtgggcttttgtcttctgtggggtacccttgtttccctttgaggtcttggcccctcccaggctcttgctaatcaagaaaaagcccaaacttggcttcctcgaaagagtaatcatgtaacttcattcttgaccaaagaattctgggctgttagaattgccaacttcccaccctttttcaatctcaggtccgctagcctagcagccatcttacccaccccgtgtattgcagcatctctcttctttcccc

SEQ ID NO: 389779 - DNA, 281 bp, Homo sapiens
cagcgttcatgcccaacctgtacagattccctcctcaatggagatttcactatcacctatgacgtgaacagagaatctcctggcaacgtgcaggtacccgggctggctgattcatcatcagggtggggcgagggctggtcgggcgggggctgcagctggatctagtgccatcaccctgggtcctcagcccaaggctgttttcctgcaggatgtgggacagctgatggcctagagcctggtgcagcaccccctagagggtgggataggaacgtctttttctt

SEQ ID NO: 389780 - DNA, 2805 bp, Homo sapiens
gagtattcagcgatggacatttgcatggtggccctgtctcatcttggctctgctctccagcttggcagcctctggcttcccgagaagcccctttcggctgcttggggagaaacggagcctcccggaagggcaagggtggccaatggcatcgaggtctacagtaccaaaatcaactccaaggtgacctcccgttttgctcacaatgttgtcaccatgagagccgtcaaccgtgcagacacggccaaggaggtttcctttgatgtggagctgcccaagacggccttcatcaccaacttcaccttgaccatcgacggtgttacctaccctgggaatgtcaaggagaaggaagttgccaagaagcagtatgaaaaggctgtgtcccagggcaagacggccggcttggtcaatgggaggaagttggagaagttcacagtctcggtcaacgtggctgcaggcagcaaagtcaccttcgagctaacctacgaggagctgctgaagaggcacaagggcaagtacgagatgtacctcaaggtccagcctaagcaactggtcaaacactttgagatcgaggtagacatcttcgagcctcagggaatcagcatgctggatgctgaggcctctttcatcaccaacgacctcctgggaagcgccctcaccaagtccttctcagggaaaaagggccatgtgtccttcaagcccagcttagaccaacagcgttcatgcccaacctgtacagattccctcctcaatggagatttcactatcacctatgacgtgaacagagaatctcctggcaacgtgcagatagtcaatggctacttcgtgcacttctttgcacctcaaggccttccagtggtgcctaagaacgtggcctttgtgattgacatcagcggctccatggctggtcggaaattagagcagacaaaggaggcccttctcagaatcctggaagatatgaaagaggaagactatctgaatttcatcctgttcagtggagatgtgtccacatggaaagagcacttagtccaggccacgcccgagaacctccaggaggccaggacgtttgtgaagagcatggaggataaaggaatgaccaacatcaatgacgggctgctgaggggcatcagtatgctgaacaaggcccgagaggagcacagaatcccagagaggagcacctccattgtcatcatgctgactgatggggatgccaatgttggtgagagcagacccgaaaaaatccaagagaatgtgcggaatgccatcgggggcaagttccccttgtataacctgggctttggcaacaatctgaattataacttcctggagaacatggccctggagaaccatgggtttgcccggcgcatttatgaggactctgatgccgatttgcagttgcagggcttctatgaggaggtggccaacccactgctgacgggtgtggagatggagtaccccgagaacgctatcctggacctcacccagaacacttaccagcacttctacgatggctctgagatcgtggtggccgggcgcctggtggacgaggacatgaacagctttaaggcagatgtgaagggccatggggccaccaacgacctgaccttcacagaggaggtggacatgaaggagatggagaaggccctgcaggagcgggactacatcttcgggaattacattgagcggctctgggcctacctcaccattgagcagctgctggagaagcgcaagaacgcccatggcgaggagaaggagaacctcacggcccgggccctggacctgtccctcaagtatcactttgtgactccactgacctcaatggtggtgaccaagcctgaggacaacgaggatgagagggccattgccgacaagcctggggaagatgcagaagccacaccggtgagccccgccatgtcctacctgaccagctaccagcctcctcaaaacccctactactatgtggacggggatccccacttcatcatccaaattccggagaaagacgatgccctctgcttcaacatcgatgaagccccaggcacagtgctgcgccttattcaggatgcagtcacaggcctcacagttaatgggcagatcactggcgacaagagaggcagccctgactccaagaccagaaagacttactttggaaaactgggcatcgcaatgctcagatggacttccaggtggaggtgacaacggagaagatcaccctgtggaacagggccgtgccgagcactttcagctggctggacacagtcacagtcacgcaggatgggctgtccatgatgatcaacaggaagaacatggtggtctcctttggagatggggttaccttcgtggtcgtcctacaccaggtgtggaagaaacatcctgtccaccgtgactttctaggcttctacgtggtggacagtcaccggatgtcagcacagacgcatgggctgctggggcaattcttccaaccctttgactttaaagtgtctgacatccggccaggctctgaccccacaaagccagatgccacattggtggtgaagaaccatcagctgattgtcaccaggggctcccagaaagactacagaaaggatgccagcatcggcacgaaggttgtctgctggttcgtccacaacaacggagaagggctgattgatggtgtccacactgactacattgtccccaacctgttttgagtagacacaccagctcctgttgggatggatggcccggattttatggcatctggaacatgggcacagagaggggcctgtgggaggggctgggaaaataaagtccaaggtcgagaccaga

SEQ ID NO: 389781 - DNA, 2690 bp, Homo sapiens
gagtattcagcgatggacatttgcatggtggccctgtctcatcttggctctgctctccagcttggcagcctctggcttcccgagaagcccctttcggctgcttggggagcaagggtggccaatggcatcgaggtctacagtaccaaaatcaactccaaggtgacctcccgttttgctcacaatgttgtcaccatgagagccgtcaaccgtgcagacacggccaaggaggtttcctttgatgtggagctgcccaagacggccttcatcaccaacttcaccttgaccatcgacggtgttacctaccctgggaatgtcaaggagaaggaagttgccaagaagcagtattgggaggaagttggagaagttcacagtctcggtcaacgtggctgcaggcagcaaagtcaccttcgagctaacctacgaggagctgctgaagaggcacaagggcaagtacgagatgtacctcaaggtccagcctaagcaactggtcaaacactttgagatcgaggtagacatcttcgagcctcagggaatcagcatgctggatgctgaggcctctttcatcaccaacgacctcctgggaagcgccctcaccaagtccttctcagggaaaaagggccatgtgtccttcaagcccagcttagaccaacagcgttcatgcccaacctgtacagattccctcctcaatggagatttcactatcacctatgacgtgaacagagaatctcctggcaacgtgcagatagtcaatggctacttcgtgcacttctttgcacctcaaggccttccagtggtgcctaagaacgtggcctttgtgattgacatcagcggctccatggctggtcggaaattagagcagacaaaggaggcccttctcagaatcctggaagatatgaaagaggaagactatctgaatttcatcctgttcagtggagatgtgtccacatggaaagagcacttagtccaggccacgcccgagaacctccaggaggccaggacgtttgtgaagagcatggaggataaaggaatgaccaacatcaatgacgggctgctgaggggcatcagtatgctgaacaaggcccgagaggagcacagaatcccagagaggagcacctccattgtcatcatgctgactgatggggatgccaatgttggtgagagcagacccgaaaaaatccaagagaatgtgcggaatgccatcgggggcaagttccccttgtataacctgggctttggcaacaatctgaattataacttcctggagaacatggccctggagaaccatgggtttgcccggcgcatttatgaggactctgatgccgatttgcagttgcagggcttctatgaggaggtggccaacccactgctgacgggtgtggagatggagtaccccgagaacgctatcctggacctcacccagaacacttaccagcacttctacgatggctctgagatcgtggtggccgggcgcctggtggacgaggacatgaacagctttaaggcagatgtgaagggccatggggccaccaacgacctgaccttcacagaggaggtggacatgaaggagatggagaaggccctgcaggagcgggactacatcttcgggaattacattgagcggctctgggcctacctcaccattgagcagctgctggagaagcgcaagaacgcccatggcgaggagaaggagaacctcacggcccgggccctggacctgtccctcaagtatcactttgtgactccactgacctcaatggtggtgaccaagcctgaggacaacgaggatgagagggccattgccgacaagcctggggaagatgcagaagccacaccggtgagccccgccatgtcctacctgaccagctaccagcctcctcaaaacccctactactatgtggacggggatccccacttcatcatccaaattccggagaaagacgatgccctctgcttcaacatcgatgaagccccaggcacagtgctgcgccttattcaggatgcagtcacaggcctcacagttaatgggcagatcactggcgacaagagaggcagccctgactccaagaccagaaagacttactttggaaaaatcaccctgtggaacagggccgtgccgagcactttcagctggctggacacagtcacagtcacgcaggatgggctgtccatgatgatcaacaggaagaacatggtggtctcctttggagatggggttaccttcgtggtcgtcctacaccaggtgtggaagaaacatcctgtccaccgtgactttctaggcttctacgtggtggacagtcaccggatgtcagcacagacgcatgggctgctggggcaattcttccaaccctttgactttaaagtgtctgacatccggccaggctctgaccccacaaagccagatgccacattggtggtgaagaaccatcagctgattgtcaccaggggctcccagaaagactacagaaaggatgccagcatcggcacgaaggttgtctgctggttcgtccacaacaacggagaagggctgattgatggtgtccacactgactacattgtccccaacctgttttgagtagacacaccagctcctgttgggatggatggcccggattttatggcatctggaacatgggcacagagaggggcctgtgggaggggctgggaaaataaagtccaaggtcgagaccaga

SEQ ID NO: 389782 - DNA, 2801 bp, Homo sapiens
gagtattcagcgatggacatttgcatggtggccctgtctcatcttggctctgctctccagcttggcagcctctggcttcccgagaagcccctttcggctgcttggggagcaagggtggccaatggcatcgaggtctacagtaccaaaatcaactccaaggtgacctcccgttttgctcacaatgttgtcaccatgagagccgtcaaccgtgcagacacggccaaggaggtttcctttgatgtggagctgcccaagacggccttcatcaccaacttcaccttgaccatcgacggtgttacctaccctgggaatgtcaaggagaaggaagttgccaagaagcagtattgggaggaagttggagaagttcacagtctcggtcaacgtggctgcaggcagcaaagtcaccttcgagctaacctacgaggagctgctgaagaggcacaagggcaagtacgagatgtacctcaaggtccagcctaagcaactggtcaaacactttgagatcgaggtagacatcttcgagcctcagggaatcagcatgctggatgctgaggcctctttcatcaccaacgacctcctgggaagcgccctcaccaagtccttctcagggaaaaagggccatgtgtccttcaagcccagcttagaccaacagcgttcatgcccaacctgtacagattccctcctcaatggagatttcactatcacctatgacgtgaacagagaatctcctggcaacgtgcagatagtcaatggctacttcgtgcacttctttgcacctcaaggccttccagtggtgcctaagaacgtggcctttgtgattgacatcagcggctccatggctggtcggaaattagagcagacaaaggaggcccttctcagaatcctggaagatatgaaagaggaagactatctgaatttcatcctgttcagtggagatgtgtccacatggaaagagcacttagtccaggccacgcccgagaacctccaggaggccaggacgtttgtgaagagcatggaggataaaggaatgaccaacatcaatgacgggctgctgaggggcatcagtatgctgaacaaggcccgagaggagcacagaatcccagagaggagcacctccattgtcatcatgctgactgatggggatgccaatgttggtgagagcagacccgaaaaaatccaagagaatgtgcggaatgccatcgggggcaagttccccttgtataacctgggctttggcaacaatctgaattataacttcctggagaacatggccctggagaaccatgggtttgcccggcgcatttatgaggactctgatgccgatttgcagttgcagggcttctatgaggaggtggccaacccactgctgacgggtgtggagatggagtaccccgagaacgctatcctggacctcacccagaacacttaccagcacttctacgatggctctgagatcgtggtggccgggcgcctggtggacgaggacatgaacagctttaaggcagatgtgaagggccatggggccaccaacgacctgaccttcacagaggaggtggacatgaaggagatggagaaggccctgcaggagcgggactacatcttcgggaattacattgagcggctctgggcctacctcaccattgagcagctgctggagaagcgcaagaacgcccatggcgaggagaaggagaacctcacggcccgggccctggacctgtccctcaagtatcactttgtgactccactgacctcaatggtggtgaccaagcctgaggacaacgaggatgagagggccattgccgacaagcctggggaagatgcagaagccacaccggtgagccccgccatgtcctacctgaccagctaccagcctcctcaaaacccctactactatgtggacggggatccccacttcatcatccaaattccggagaaagacgatgccctctgcttcaacatcgatgaagccccaggcacagtgctgcgccttattcaggatgcagtcacaggcctcacagttaatgggcagatcactggcgacaagagaggcagccctgactccaagaccagaaagacttactttggaaaactgggcatcgcaatgctcagatggacttccaggtggaggtgacaacggagaagatcaccctgtggaacagggccgtgccgagcactttcagctggctggacacagtcacagtcacgcaggatgggctgtccatgatgatcaacaggaagaacatggtggtctcctttggagatggggttaccttcgtggtcgtcctacaccaggtgtggaagaaacatcctgtccaccgtgactttctaggcttctacgtggtggacagtcaccggatgtcagcacagacgcatgggctgctggggcaattcttccaaccctttgactttaaagtgtctgacatccggccaggctctgaccccacaaagccagatgccacattggtggtgaagaaccatcagctgattgtcaccaggggctcccagaaagactacagaaaggatgccagcatcggcacgaaggttgtctgctggttcgtccacaacaacggagaagggctgattgatggtgtccacactgactacattgtccccaacctgttttgagtagacacaccagctcctgttgggatggatggcccggattttatggcatctggaacatgggcacagagaggggcctgtgggaggggctgggaaaataaagtccaaggtcgagaccagaaaaaaaaaacgcaccagctcccttctgcctggatgttccacctttggcgctctggtct

SEQ ID NO: 389783 - DNA, 2733 bp, Homo sapiens
  misc_feature (2651)..(2654): n is a, c, g, or t
gagtattcagcgatggacatttgcatggtggccctgtctcatcttggctctgctctccagcttggcagcctctggcttcccgagaagcccctttcggctgcttggggagcaagggtggccaatggcatcgaggtctacagtaccaaaatcaactccaaggtgacctcccgttttgctcacaatgttgtcaccatgagagccgtcaaccgtgcagacacggccaaggaggtttcctttgatgtggagctgcccaagacggccttcatcaccaacttcaccttgaccatcgacggtgttacctaccctgggaatgtcaaggagaaggaagttgccaagaagcagtattgggaggaagttggagaagttcacagtctcggtcaacgtggctgcaggcagcaaagtcaccttcgagctaacctacgaggagctgctgaagaggcacaagggcaagtacgagatgtacctcaaggtccagcctaagcaactggtcaaacactttgagatcgaggtagacatcttcgagcctcagggaatcagcatgctggatgctgaggcctctttcatcaccaacgacctcctgggaagcgccctcaccaagtccttctcagggaaaaagggccatgtgtccttcaagcccagcttagaccaacagcgttcatgcccaacctgtacagattccctcctcaatggagatttcactatcacctatgacgtgaacagagaatctcctggcaacgtgcagatagtcaatggctacttcgtgcacttctttgcacctcaaggccttccagtggtgcctaagaacgtggcctttgtgattgacatcagcggctccatggctggtcggaaattagagcagacaaaggaggcccttctcagaatcctggaagatatgaaagaggaagactatctgaatttcatcctgttcagtggagatgtgtccacatggaaagagcacttagtccaggccacgcccgagaacctccaggaggccaggacgtttgtgaagagcatggaggataaaggaatgaccaacatcaatgacgggctgctgaggggcatcagtatgctgaacaaggcccgagaggagcacagaatcccagagaggagcacctccattgtcatcatgctgactgatggggatgccaatgttggtgagagcagacccgaaaaaatccaagagaatgtgcggaatgccatcgggggcaagttccccttgtataacctgggctttggcaacaatctgaattataacttcctggagaacatggccctggagaaccatgggtttgcccggcgcatttatgaggactctgatgccgatttgcagttgcagggcttctatgaggaggtggccaacccactgctgacgggtgtggagatggagtaccccgagaacgctatcctggacctcacccagaacacttaccagcacttctacgatggctctgagatcgtggtggccgggcgcctggtggacgaggacatgaacagctttaaggcagatgtgaagggccatggggccaccaacgacctgaccttcacagaggaggtggacatgaaggagatggagaaggccctgcaggagcgggactacatcttcgggaattacattgagcggctctgggcctacctcaccattgagcagctgctggagaagcgcaagaacgcccatggcgaggagaaggagaacctcacggcccgggccctggacctgtccctcaagtatcactttgtgactccactgacctcaatggtggtgaccaagcctgaggacaacgaggatgagagggccattgccgacaagcctggggaagatgcagaagccacaccggtgagccccgccatgtcctacctgaccagctaccagcctcctcaaaacccctactactatgtggacggggatccccacttcatcatccaaattccggagaaagacgatgccctctgcttcaacatcgatgaagccccaggcacagtgctgcgccttattcaggatgcagtcacaggcctcacagttaatgggcagatcactggcgacaagagaggcagccctgactccaagaccagaaagacttactttggaaaactgggcatcgcaatgctcagatggacttccaggtggaggtgacaacggagaagatcaccctgtggaacagggccgtgccgagcactttcagctggctggacacagtcacagtcacgcaggatgggctgtccatgatgatcaacaggaagaacatggtggtctcctttggagatggggttaccttcgtggtcgtcctacaccaggtgtggaagaaacatcctgtccaccgtgactttctaggcttctacgtggtggacagtcaccggatgtcagcacagacgcatgggctgctggggcaattcttccaaccctttgactttaaagtgtctgacatccggccaggctctgaccccacaaagccagatgccacattggtggtgaagaaccatcagctgattgtcaccaggggctcccagaaagactacagaaaggatgccagcatcggcacgaaggttgtctgctggttcgtccacaacaacggagaagggctgattgatggtgtccacactgactacattgtccccaacctgttttgagtagacacaccagctcctgttggaannnngtgtagaaataaacatgaaagaggtccaatcaatgttttaatctgctaacatttatccctttttagcttaaaaaaaaaa

SEQ ID NO: 389784 - DNA, 2021 bp, Homo sapiens
gagtattcagcgatggacatttgcatggtggccctgtctcatcttggctctgctctccagcttggcagcctctggcttcccgagaagcccctttcggctgcttggggagcaagggtggccaatggcatcgaggtctacagtaccaaaatcaactccaaggtgacctcccgttttgctcacaatgttgtcaccatgagagccgtcaaccgtgcagacacggccaaggaggtttcctttgatgtggagctgcccaagacggccttcatcaccaacttcaccttgaccatcgacggtgttacctaccctgggaatgtcaaggagaaggaagttgccaagaagcagtattgggaggaagttggagaagttcacagtctcggtcaacgtggctgcaggcagcaaagtcaccttcgagctaacctacgaggagctgctgaagaggcacaagggcaagtacgagatgtacctcaaggtccagcctaagcaactggtcaaacactttgagatcgaggtagacatcttcgagcctcagggaatcagcatgctggatgctgaggcctctttcatcaccaacgacctcctgggaagcgccctcaccaagtccttctcagggaaaaagggccatgtgtccttcaagcccagcttagaccaacagcgttcatgcccaacctgtacagattccctcctcaatggagatttcactatcacctatgacgtgaacagagaatctcctggcaacgtgcagatagtcaatggctacttcgtgcacttctttgcacctcaaggccttccagtggtgcctaagaacgtggcctttgtgattgacatcagcggctccatggctggtcggaaattagagcagacaaaggaggcccttctcagaatcctggaagatatgaaagaggaagactatctgaatttcatcctgttcagtggagatgtgtccacatggaaagagcacttagtccaggccacgcccgagaacctccaggaggccaggacgtttgtgaagagcatggaggataaaggaatgaccaacatcaatgacgggctgctgaggggcatcagtatgctgaacaaggcccgagaggagcacagaatcccagagaggagcacctccattgtcatcatgctgactgatggggatgccaatgttggtgagagcagacccgaaaaaatccaagagaatgtgcggaatgccatcgggggcaagttccccttgtataacctgggctttggcaacaatctgaattataacttcctggagaacatggccctggagaaccatgggtttgcccggcgcatttatgaggactctgatgccgatttgcagttgcagggcttctatgaggaggtggccaacccactgctgacgggtgtggagatggagtaccccgagaacgctatcctggacctcacccagaacacttaccagcacttctacgatggctctgagatcgtggtggccgggcgcctggtggacgaggacatgaacagctttaaggcagatgtgaagggccatggggccaccaacgacctgaccttcacagaggaggtggacatgaaggagatggagaaggccctgcaggagcgggactacatcttcgggaattacattgagcggctctgggcctacctcaccattgagcagctgctggagaagcgcaagaacgcccatggcgaggagaaggagaacctcacggcccgggccctggacctgtccctcaagtatcactttgtgactccactgacctcaatggtggtgaccaagcctgaggacaacgaggatgagagggccattgccgacaagcctggggaagatgcagaagggatggaggccggaacccggaggcctcctgtgctgggcaccctacctgggtgtccagtggaggagtgggccaggctggggagacccagacctgctgaagtagggcatctgaaggaaaatggggtgtggggtgaataggagcctctgcacctctaaagggaagtgagtaaagggggcacactgcccatggggcatt

SEQ ID NO: 389785 - DNA, 335 bp, Homo sapiens
tcccacttcttacacatatttaaactgtagttgtagcttgaatccaaacaataaaaactgaacagctagttcaaaccccaggaggctcagttctacacttgggtcaccaggtagtttttttagataattttaggaaaatacactgcttttaaggttcatgacacatttatgaaatctttggacagttgtttgttttatatgatttatcagttttccccttaaaagataaggtcaactgtagttatgaataagttaatacattttgaaaatctggaactcttaagattggtcattcagtcagtttaggtcctaaacaggaattttattcattgttt

SEQ ID NO: 389786 - DNA, 261 bp, Homo sapiens
  misc_feature (224)..(224): n is a, c, g, or t
agctgtgccttctcctgcccagtctaagccaggagcctgcgaaaaacaacccaagggcctcccattcttcatgcagcagctcaaaggcaactaagaagcagctggaacattcatgaagccttaatatgattttaatttaggatattaagacagctgcagtgacctcacactcctagcttttaaactcaagtctaatgactcttttgctgctcctgcctatcagntaccccacctctgtgcacgtctggtgcaggcatacct

SEQ ID NO: 389787 - DNA, 809 bp, Homo sapiens
aagtctttgaaattcagtctgtttattatacttgctgcacgtctcaatttggatatggaaacgtcatcagaaaggcttgatctgtatttagagtccataaaattcacagttgaacaaagaagtagattcacacacccaagctgctccagacgcataaaaatcttcgttactgaaccgagtatggttcctgactgggaatctctcatagttacgatttttttaatttggaaataattttagacacagaagagctgcaaagatagtacagagaattcccataggacctcccccacaacccaacctcccttaatgttaacatctcacataaccatggtccagtgatcaaaaccaagacagtagcatcagtacaatcgccgtgaactaaactagggacttgccttgggtttcccagttttcaattcatgttctttttctgttgtggaacccaccccaggatgctgcactgttgcctgtgtctctttcctcagtctttcatgaccttgatatctttgaaatgtgctagtggggtattatgtagactctccctctacttgccgttttctcatggctagtccgtggctatagagttccataagaagaccacagaggtaaatgcacttcctcttccatcatattaggaagtgccagatattaacatgatccatggttaacagccgaggttgaccttgatctcctggttaagtggcatctgccaggtttctccactggttgttgcttagaagaagcaggtcactaagtccagcccacactcaagggagaggaattaacccctccatcctggtgggcgt

SEQ ID NO: 389788 - DNA, 328 bp, Homo sapiens
ccagtattctgtgcttaaagagcatggatgatggtgatactctcatgaaaatgcagaccttagaaaaagcgggtttgagactaatatgatgtgttccattttgcatgtgtttagtttgagacaaaggtagatttaaaagataggctggttctcagaagcttgtttgcctatatttttcattgatagaggtggccctaggaaattatttatttttgaccatctctatacttcctcaccctccccaccatctgccatggtcacagttgattgacctggagagcagatctgacctttaaatatttgtttgttgggtgttcagtggaacttg

SEQ ID NO: 389789 - DNA, 805 bp, Homo sapiens
agtgacttccttgttgtgagccccggcccggcagtgtcccgactcgtagccccgctgttcttaatccgggccgctagcctgagtctaggtcgcagccgcagccccaccccgtcggtcaccttttcagcgcaggtcctttccccgcacgccctgcgctccctaacatgcccaaccccagcagcacctcctctccctaccccctccctgaggaaattaggaacctgttggcagatgttgaaacatctgtagcacgatatactgaaacgcgaacaactctatccacgaaagcaaaggaaccagagagaatcccttatctaccgaagactacccacgatgtaaagtctaatctactcttcagtgaactttccaaagaccaaaggtgactgcacgaacgactggggcaacgaatactgatgacccttttgcttgggcctccagacactatttcattagcctcagacacgatactgactcacagactgatgaagcccccctctgatgcacgcccaagtttcctccaattgcagcacaagaccttccttttgttctaacaggctggctacctctgcacacacgcatcaccagactcccagctttctggcgatctgatcactccgcacaacaccgcatgcgcgtgacctcctcagcctacctcccgcctactccttacctcccttcattgcccacctgaccaccccgaccaccccacacaccacaagcgttgaacttcgccctcaccatctccctaccccgctgccccctattgccatacccctccccacacacccgcccgaccaccccatcc

SEQ ID NO: 389790 - DNA, 484 bp, Homo sapiens
agtctttccttccaaggagataactaagtttgagtcattgtttaaaaaatcaacttccactagtccagctatgacccctgaaatgccttccatttcaccttctactttctgtctaaagaagagggtttactgagctaattgcaggtctgaatcgtattatcgggaaaaggtttatcttacttgggagaacacagctattttaaggagctttagcacatttttattgcatccacctggcatgagaaatctccattgtgagcctccttggggtacccattcccattagaaaacagttcatcagcccagaagaggggaaaggagagagagaaggaagggcaaacgctggacacgcaggggtccccccgccccaattatccatcatttgtggggttccacatgcacctagtgcacagtgagtgtgaactcacggagacagactcaagtcatgtgcacgcatcccttttcaatgtgggtgctgggcaga

SEQ ID NO: 389791 - DNA, 395 bp, Homo sapiens
agttgtgctaccatctctacaatccagttgtagaacatttctaccaccccaaaaagatcccttatacccatttacggtcactcccctttccagcccctagtcccagtcaaccattcatctgttttctgtctatagatttgtcttttctggacagttcataaaaatggaataatatgtggtcatttgtttcttctctcacttagcatgtttttggggttcatccacattgcagcatgtatcagaactttattcctttgatggcccagtaatatacaccagttgatgaaccttttgagttgtttttactttttggctattcacagttgtcatttttaacagctgcagaatgtgaggagaacttttctaaataaccacataggaaatagtaaagtgac

SEQ ID NO: 389792 - DNA, 271 bp, Homo sapiens
catggtatttctctgtgatgctcttcgtgtgtgtgtgtgtgtgtgtgtgtatgtgtgtgtgtgtgtgtgtgtttttaaacacctctttaaattataagctccctgcaggcagattgctgtgttttatctcctcagcagtgtggggcatgtcctgagcactggttaaaggtagtcttcaggttactgagatgtgcattaataggcttcactattaagcaaatataaagccaatttcaggtaattaatctctgaaatttttgtttcagattaa

SEQ ID NO: 389793 - DNA, 201 bp, Homo sapiens
gattgggaagagttatttagcccatctctccattacctgcagttgctctgcattttaccctctgagtgaatcctcagccttcactgaaattctacaaagttaggggatgcgatatctactaggagcccactctgcctttggagtaatctgactgacagagggttttttggcctataataaatgtagcttctatttatcctt

SEQ ID NO: 389794 - DNA, 581 bp, Homo sapiens
ggcacatcagttcagaatactgccaaaaataagttttacaaagcttctgcaagttagaaagaaagagagagggagaagaagccacgtggaaagcagcaggattcagaatggctttgtacttctcaacactagccctggaatccagaagaccatggagcaatgccttccaaattgtgaagaaaaattacttccaaccttgagttcaatactcagccataaattggaggggaggtagaactaaaacacttttagaaatgtaaggtctcaaaagatgtgcttttcgtgcacactttctcaggaagctattgaagatgccctgtattagtctgttttcatgctgctgataaaagacatacctgagactgagaagaaaaagagatttaattggacttctagttccacatggctggggaggcctctgaatcatggcaggaggtgaaaggcacttcttacatggcagccacaagagaaaaatgaggaagaacaaaaagcggaaaccctgataaacccatcagatctcatgagatttattcactatcacaggaatagaacaggcccctttgattcaattacttcccccg

SEQ ID NO: 389795 - DNA, 485 bp, Homo sapiens
tttaactaacaaatctgaaacgtgaccaaaatagtttgtatggtaatccatcttcatagggggtcagattagggcttattttttgaataaagtttttggaatattcgtcttttttagaaagtggtcagaaaaccccggggttgatttttgactggaggtgttcctggagtaaaagttttaaattagatcagctcccagtactcagtcagccatcattttggtcagatactataaagcagtgattcccaaacttgaatattcagcagagtcactgcaggcttgtcaagacagatttctgcctccaacttaccaagtttctgattcagcagattttggttgggacctgagaatttacatttctaaccagctcaccggtgaccgtaattgtggtggtcagggaccacactctgagaatctgtgctctaaaggaatggattagcagaatatagtcagtaaagaattaatagaaccaagttggctaagaa

SEQ ID NO: 389796 - DNA, 276 bp, Homo sapiens
taaaaaactacttaggaagatgtttcaaaattaaataaggaaagagaaatgcaattatgattagctgaagttcaagttgtgatttactgtttttaacatgtttgctccgtccatctgtttgattccagaacgccttggaatgtcttttctggttatttcacattcgttgaatgagactgccaatgtcagctttagcttactgttgagagtaaaaatattaagacagtcttctcaattgccgtttggaacaccaacgctatccctggaagtcacctg

SEQ ID NO: 389797 - DNA, 268 bp, Homo sapiens
tggcagtttcacagtgatatatctaggaggggatttttgtccttatcttttagaattttttctgattttttgaaattcttggggctttgatttggtgttcattgctaataaaaaaaaaaaacttgaccattatctcaataaatacgttttttacctcaccttttgtcttctatggcattccatttgtatgcttatttaacagtttgatattatcccgcaccttttaaatgctttgttctgatttatttttcactcttttctcttcctt

SEQ ID NO: 389798 - DNA, 434 bp, Homo sapiens
aagcaagtcagctctagctgaaggtagaaaacgtacatgatccaagggcactggtatttataaatgtataatgataaggcagaatcattccaaaagagaagtgaatacaagattgagtcaaagtattccaaactcaaaagaagctcaattcctttttttggagaattgtccactccaccctagtttccagataaattaatcaccaaaggggtattatcaagtgggttcttcttttcaccatatgccagcaagatttggtgtggatttgatgtggtagataaggaaggaattgtatcctatacggttgttttcatatgcataagattgtgtatggaaattttcccacttctgtaaggttttcaaaccataagtggttaaccagaggctaacaaaatggttaaccaaatgtgtcaaccactaagccaagtggaaat

SEQ ID NO: 389799 - DNA, 435 bp, Homo sapiens
ggccttagctttttaaattttaaatgaatttcccaactatgtagacatgaagtcctttctggtttagtgtcaaaataaaagatactaatgagaatgtctttgggacataattatgtagatttaaaggagtgatgtagttttaattatgccctttagctagtgtacttacatattaagctcattcatgtctccttttccctctgaaacattgcttttctcaagccctaaattagtaatcagctcatgggtgtacctgaaggttatgtaagttaagttgaaggctgccaaagaatgtgtttaaactactaatccaaaacatactgtttatagttagaaaaaaatggcccatgggtttacagtgttcttcgctggattgacatggaggaaattccagccttgtatgtttatgtgttcctttctctttccctccccaaa

SEQ ID NO: 389800 - DNA, 391 bp, Homo sapiens
ggctccctcctcctcggggaagccaagagcaggtggggccgggccactttccggtgccctggccactctggatgtgctcagtgctctcagaggcccgagaggcaggcaggattgttaccccattttcggggatcagataacaagccccacctcggcaggtgactgagccagaattcgaactcaggcactttcatccatgcaacatacatagatgatacggctgctgtgcaccacgccgtggggtgggcctgggctgcaaaggacacagtctctaattccggataaggggtaacacatgtgaatggaaaaggaaccatggtgcatgagaggcaggagtctggcctacaggggagggaagcagtggggaaggctgcctggaggagagggtgct

SEQ ID NO: 389801 - DNA, 298 bp, Homo sapiens
tctgcctggtgtttctctgacaaacagcggagaaccctcagttctgaatgaagatctgggtttcctttgagtacgggggattggtttccactctggctactgcagacacaaaagccgaggggagaaaaaagaccccctggttcactcctaaggctggggctccagagaacagctcaggctgggagcacaggagggagggaaccagaggaggaagcgctcggctgtgccggccccgccaggcccggctcatgggccaggacatgcaaaacgcagggaggtggtgggggcattctgggtg

SEQ ID NO: 389802 - DNA, 792 bp, Homo sapiens
aaaaaaaagaagttagctaccatccaatccagaatgaggtcttgatacacccttggacctaggtgggtagctcaggggagcagatacatttttttcttgtgttaataattcttcagctgagcttcctcattatggcaggcagtgatcttgaccagctccttcctttactcaaaaagcccagtgtccccacatatacttttacgctactccggaattccaagtcagtctgaaattttaacttccccctccccatcacacacacacacacacacacacacacaaacctcttaaagaagaaatatttctgaaaaagagaagttgatttcctgttaccttaaatagacatcatttccccacattttcacactgggtggaagctctagatataaacaaattattcacttgtttaaagtttcttttaaatttattcagcttttgcctgttcgtattatcttattataatatccactggaccattctcaaactgcaactgctaggttacagttcatcctactttcccaggaaatttcttatcataagaaagaataagtcccaagaaaagaaaatcaagcagtgagaaaataaaaattatatgcacatgtacatatctggggatgaacaggaatgtttgaaaagacttcagaagaagcattccacatgaaaggtataatgaagcagttcactgttctttgtccagacttgattattagaatttcagtaacgatttttttttccaggggtaagtctgttgtgctgctctttgttgttttaacagattgccttgtaaatgaa

SEQ ID NO: 389803 - DNA, 398 bp, Homo sapiens
ctcccaggttcacgccattctcctgcctcagcctcccgagtagttgggactacaggcgcctgccgccacgcccagctaatattttttatttttagtagatgggtttgcaccgtgttagctaggatggtcttgatctcctgacctcgtgatccacctgaattttttttttttttggttcacgttctctcatgatcttcccgaaatgttatccttaagcttcggggagaggtgagcaacggaaggaactggcccaggctggtctcaaacttgtagcctcaaactgtcctgctgcctctgtcttccaaagtgctgggattataggtgttgagccaccatgcccagcccttctctgatctttaaggtgagaagctaacgtttttagccacttcagtgaaaaa

SEQ ID NO: 389804 - DNA, 195 bp, Homo sapiens
tgaaaattcgaggtctaacctcccccccgccctgccccttgagggcagcaatgctttcagaagctcacagggcaactccaatatgcggggcttgtgagaagcctattttaggctaagggtcgtcagcagcaaatagccaacatcctctccagcaggatacactgaggaaggacaggtggtttagacagagagcgc

SEQ ID NO: 389805 - DNA, 650 bp, Homo sapiens
cccatgttactgtccgtgtcttcattgaaatataggaggtcgtctactaagagtagtggctttcaaccttgactgcagatcggaatcatctaggatttttaaaactaccagtgcccaggccctacccccgatacagttagtctggagaggagcctaggtatcaatacaccgtaaagcttctaggaggtccacaagtcatcagggcttaacatggtccacacaagagaagtaccagctgccatgggagcactgcggaggtgcccggacttcacgcgagggtgttctagcagagggggcagcaaaggcaaaagcctggaggtgaaggatgtcttaagggaacaaagaaagttggtgtggctggagcatgtgggtggtcaaggaccacataattgctgcagtttatcctagggtcagaggaaagccatccaggggttttaagaagggaagggtgacatgagttatgttttaggagaatcattcagttgcttggagaatagattggaggaggaggaaagtagaagcagagaggccactgggaggctgctaacagaacgccaggctcaaaagatgcccggactggaggatacccaggagaggagtgaagatcttcaagatcagtggcagaattgataggacctggtagtagattg

SEQ ID NO: 389806 - DNA, 378 bp, Homo sapiens
cgcctcccgggttcacgccattctcctgcttcagcctccccagtagctgggactaaggcacccgccaccacgcccggctaattttttgtattttttagtagagacgggtttcaccatgttagccaggatggtctcgagctcctgacctcatgatctgcccgcctcggcctcccaaagtgccgggattacaggcgtgagccactgcacccggactgtgctttctttttcaatcgaggttagagttggccatgagggaacttatataagatttggaaggcagaagcaaaagagcagccattactctcagaaggtcactgtggttggatatggtgttggccaataggtcaaacctccatgtccatctgctctttcttatgt

SEQ ID NO: 389807 - DNA, 422 bp, Homo sapiens
aggaaatatgagctcccttcccagatccgtgcctctggacctgggctgaaggcttctactccctccattgtcaccttcgggaatctgcttgttaccttcctcccaagaatgttccagaaggtcttggtttaatttctggagggcattcaagaactcagtcatctcacgtgtctagaagagaaacattaaggccaggcacggtggcttatgtcggtaatcccagcactttggaaggctgaagcaggaggaccacttgagcccaggagttcaagaccagcctgggcaacatagcaagatctcatctctacaaaaaaaaaaaaaaaaaaaaaattagccgggcatggtggcacatgccattagtgtcagttatttagaaggccgagacggggggatcatttgatcccgggaagtgaaggtgctgt

SEQ ID NO: 389808 - DNA, 108 bp, Homo sapiens
tggtgggtgtaaatacgtaactgtttccccacattataacaaatgccttgtaaacagcagttcagacactgcaaacatatcccatcctgtagctgtcctatggattct

SEQ ID NO: 389809 - DNA, 726 bp, Homo sapiens
tgttcttttttctagaggttcgtattgctgctgtggaggccctctgcatgttggcccagtcttcaccctcttttgctgagaagtgccttgatttcctagttgacatgttcaacgatgaaattgaggaagtacgtctgcagtctatacataccatgagaaaaatctctaacaacatcaccctccgagaagatcagcttgacactgtcctggctgtgctagaggattcatccagagatattcgagaggctcttcatgaactcttatgctgtactaatgtttcaaccaaagaagggattcatcttgcattggtggagctgctgaaaaatttaaccaagtaccctactgatagggactccatatggaagtgcttgaagtttctgggaagtcggcatccaaccctggtgcttcccttggtgccagagcttctgagcacccacccattttttgacacagctgaaccagacatggatgatccagcttatattgcagttttggtacttattttcaatgctgctaaaacctgtccaacaatgccagcattgttctcagatcacaccttcaggcactatgcctacctccgaagacagtctttctcatcttgttcctgccttgaggttaccaggtagaaaacttggtgtcctccaggttgtttcttcccaagatcataactcaagagggctctttcccaggaggttcctgaaggcgaagcccttggacacagtgctc

SEQ ID NO: 389810 - DNA, 681 bp, Homo sapiens
  misc_feature (648)..(648): n is a, c, g, or t
tgttcttttttctagaggttcgtattgctgctgtggaggccctctgcatgttggcccagtcttcaccctcttttgctgagaagtgccttgatttcctagttgacatgttcaacgatgaaattgaggaagtacgtctgcagtctatacataccatgagaaaaatctctaacaacatcaccctccgagaagatcagcttgacactgtcctggctgtgctagaggattcatccagagatattcgagaggctcttcatgaactcttatgctgtactaatgtttcaaccaaagaagggattcatcttgcattggtggagctgctgaaaaatttaaccaagtgcttgaagtttctgggaagtcggcatccaaccctggtgcttcccttggtgccagagcttctgagcacccacccattttttgacacagctgaaccagacatggatgatccagcttatattgcagttttggtacttattttcaatgctgctaaaacctgtccaacaatgccagcattgttctcagatcacaccttcaggcactatgcctacctccgaagacaggttatggaaggggacctacaaaatgggaatttcatgtacagtggtgtgggaggaataaagcaggtgggtggttataccttcacatgagggntgcaggccaaaggtttggcaacttatagtaaca

SEQ ID NO: 389811 - DNA, 148 bp, Homo sapiens
ctgaatccattagccttactttgtcagtcatattaaagcaaaaagaacctatggcaagctttctgatacgccaagcaatgaatgatagtatttgaagctccaggactgctgagatcacgaaaggctaaggaccagagaggcagccaag

SEQ ID NO: 389812 - DNA, 351 bp, Homo sapiens
accaacaagatgagggtaacctgctgagccttcctatctgcagcaaaaagtaggccttggagttcagaagtagagcaactgttattttcactgagaaggaaagttccttctcaagtcagctgctgatctttctatggaatgagaaggagtgggaaccatgaaagaagagcttgggaggtcaatgggaccgagatagagggtgaagttcagggggaagaactcaaagggggaaccacagcatccctctccccatccccaaggtggcacgtgaatgttctggagatgaacaaagggcaggagggagtaggggcatgggagagctccagggcagccgccgtgcagaggagcaga

SEQ ID NO: 389813 - DNA, 1014 bp, Homo sapiens
ctgaactgaggctacactggccacagggagtcttggggaaatgagaaaaaggatgagaacgagatgaagtctggagaagtgcccacccctgtaacacacacacacaccacgcgagctgaatagtgtcaattccattatatgttgaatccacagtatctctgaatgtaactgtatttggagatagggtctttaaaaaggtaattaaaatgaagtctttatgctgggccctaaaaaaaacaacaaaaaaaaaaaaaaaaaacaaaaaacaaaaccacaacaaaaaacaccaaaaaaaaaaaaaagcggggacccccgcgacacatgaccaccacaggagaaacaagaacaagaaaaaacggaagcgcaaaacaagaaagaggacgacaaactagccccccagaaaaaaacaaaaaatacggcagcaaaacaccacgacggaaaaacaagaaacaaacagaccggcagaaaatcccagagaaaacgaaaaatacaaagagagatcagaccaaagagagaaaagaagacgcaacaaaaaaaagaaataaaaagaaaaaaaaaacagaaaaaacgagacggaggaggcaaacaaagaagaacaagagaccacagagacccacggcgcgcggcgaccgaccggcaccacccgccacccagaagacaacaagaaccaagaagagaaaacaaaaaaaggacagcagcggagggaacgcggaggataaggaaaggcaatgtagatactacagaagaggaaagaggaggaaggagccaacgctccgactgcaccgacaataagcgcacaccagagagagcagagaccggagcgagagaggaagacagcacggaggaggagaacagagcagcagaggaaaagagcggagacagagagagaagagaaacagcggacaaaaagacaagaacagaacagcacaaaaaaaaacccggaaaggagccgacgaagaggaacgacaagagaaggagagagcaagacacagcacagaaggacgaagaaagaag

SEQ ID NO: 389814 - DNA, 333 bp, Homo sapiens
tatatttgatgctaatgatctggtctgtgggtcatgtgggtgtctcctgtctcctgatccacctaacactgatgacaaagctcattagtacctctggccagagggtggacttgaggaaagagaggacagcactcatgtcaatcagtttggcttctcattagtaactccaaagaaaatagttggccaaagaggccagaaccacaaaaaggaagctaactttgagtcacccatatctgtccactattatcacagaggtgggaaaaggctaagtgtctggtatgtggtaagtggatgaagtgaaatgatattttttaaggctaaaataaaacttgt

SEQ ID NO: 389815 - DNA, 305 bp, Homo sapiens
  misc_feature (242)..(242): n is a, c, g, or t
  misc_feature (247)..(247): n is a, c, g, or t
  misc_feature (258)..(258): n is a, c, g, or t
aataaaaatgcctggggacagaagctgcttaggatgcgcccctgtgctcatgaaactatgactgattctgggactaagggatgtgacgggaaagggacaggaagaaaaaaggaaatgggaaatcaagagcaaaaaacagcaaaggacaataaatcaattcaagaagatattaccatcactcccagggagtgcaaggtttctaaggagcaagctggctctcctcactcattgctgcctggggnttctnatactaggtgntattgaaacttctaaaagtaggtgctattgaaacttctaaaactagg

SEQ ID NO: 389816 - DNA, 724 bp, Homo sapiens
tacacatgtggctgcaactgagacactggagcagcccagcaagcccagaggaattccgaattccaagaacctggacaacttgccgtcaagactttccatcaggtcttaaaaataaatatgaatttagattccatacatcgattaattgaggaaacacagatcttccagatgcaacaatcatcaattaagtcacgcggcgacatggtggcccctgcctcaccccccagggatacctgtaatacctgcttcccacttcatgggctacaatctcatgctgctcacaatttctgtgctcactcatataacaccaacaaatgggatatttgtgaagaacttcgcctgcgggagcttgaagaagtcaaggccagagctgctcagatggaaaagaccatgcggtggtggtcggactgcactgccaactggagagaaaaatggagtaaagttcgagctgaaaggaacagtgccagggaggaaggaagacaactcagaataaaactagagatggcgatgaaagaattgagtacactgaaaaagaaacagagtttgccacctcagaaggaggcattagaagctaatgttacccaggatctgaagcttcctggcttcgtagaagaatcctgtgaacatacagaccaatttcaattgagttcacaaatgcatgagtctatcagagagtattcggtacaaagacaattttctacaaaggaggacacaaataataagg

SEQ ID NO: 389817 - DNA, 673 bp, Homo sapiens
tacacatgtggctgcaactgagacactggagcagcccagcaagcccagagggtcttaaaaataaatatgaatttagattccatacatcgattaattgaggaaacacagatcttccagatgcaacaatcatcaattaagtcacgcggcgacatggtggcccctgcctcaccccccagggatacctgtaatacctgcttcccacttcatgggctacaatctcatgctgctcacaatttctgtgctcactcatataacaccaacaaatgggatatttgtgaagaacttcgcctgcgggagcttgaagaagtcaaggccagagctgctcagatggaaaagaccatgcggtggtggtcggactgcactgccaactggagagaaaaatggagtaaagttcgagctgaaaggaacagtgccagggaggaaggaagacaactcagaataaaactagagatggcgatgaaagaattgagtacactgaaaaagaaacagagtttgccacctcagaaggaggcattagaagctaatgttacccaggatctgaagcttcctggcttcgtagaagaatcctgtgaacatacagaccaatttcaattgagttcacaaatgcatgagtctatcagagagtattcggtacaaagacaattttctacaaaggaggacacaaataataagg

SEQ ID NO: 389818 - DNA, 119 bp, Homo sapiens
tccctcccttcagacacccaccactgtcttggacagatggggtaatcacaaatccttactaaatctttttgtcttattctccaacctcagccccttttaaaaactcacagcacatctca

SEQ ID NO: 389819 - DNA, 462 bp, Homo sapiens
tttactcttgtcaccgaggctggagtgcaatggcgcagtcttggctcactgcaacctccgcctcccaggttcaagcgattctcttagcctcccgagtagctgggattacaggcgcctaccaccacacccagctaatttttgtattttttttagtagagatggggtttcaccatgttggccaggctggtcttgaactcctgacctcaggtgatctgcccaccttggactcccagagtgctgggattacaggcatgagccaccgcgccccaccagatttcctttttaaacaatgaatttttattttttatttttttggagacagggtctctctatgttgctcatgctggtctcaaattcctaaactcctgggatggagcagtcctcctacctcagcctcccaaagtgttgagattacaggtatgaggtatgagccactgagcctgacatgaatttaaaaaagca

SEQ ID NO: 389820 - DNA, 2949 bp, Homo sapiens
tgctggcttgctgaatgttggcggaagcggacccccctgtgccgtggaaactggcggtggccgcggccgccgagtcggtctgcgcagcctcctgcgttttctcgcttggatcttggcactgagaggcggtggccggcgggatggagaaaagtaggatgaacctgcccaaggggccggacacgctctgcttcgacaaggacgagttcatgaaggaagatttcgatgtcgatcattttgtgtctgactgtaggaagcgggtccagctggaagaactgagagatgacctggagctctactataaacttcttaaaacagccatggtcgaactcatcaacaaggattatgcagattttgtcaatctttcaacaaacttggttggcatggacaaagccctcaaccagctttctgtgcctttgggacaattacgagaagaggttctgagccttagatcgtctgtcagtgaaggaattcgggcagttgatgaacgaatgtctaaacaagaggacattaggaaaaaaaagatgtgtgtattgaggcttatacaagttattcggtcagttgagaaaattgaaaaaatcttaaactctcaaagttctaaagaaacctctgcactagaagcaagcagcccccttttgactggacaaattttggagagaattgccacagaatttaatcagttacagtttcatgctgttcaaagcaaaggcatgcctcttttggacaaagtaagaccgcgtatagctggcattacagccatgttacagcagtcactggaaggtctcctattagaaggccttcagacgtctgacgtcgatataatacggcactgcttgcggacttacgccacgattgacaagacacgggacgcggaggccttagttggccaagtactagtgaaaccatacatagacgaggtgattatagagcagtttgttgaatctcatcccaatggccttcaggtcatgtataataaactcctggagtttgttcctcaccattgccgccttcttcgagaagtcacaggaggtgccatctccagtgaaaaaggcaatactgttcctggatatgactttttggtgaattctgtttggccacaaatagtacaaggattagaagaaaagttaccctcgctttttaatcctgggaatcccgatgcatttcatgagaaatataccataagtatggattttgtcagaagattggaacggcagtgtggatcacaggctagtgtaaagagattaagagcccatcctgcctatcacagcttcaataagaagtggaacttgcctgtttattttcaaataagatttagagaaatagcgggatccttagaagcagcacttacagatgtcctggaagatgccccagctgaaagtccgtattgccttttggcttctcatagaacttggagcagccttaggaggtgttggtcagatgagatgttcttgccattactggtgcatcgcctgtggagactcactctgcagattttggcacgatactctgtgtttgtcaatgagctttcactcaggcccatttctaatgaaagtcccaaggagatcaagaaacctttggtaactggtagcaaagaaccttccatcacccaaggaaacactgaagaccaaggaagtggtccttcggaaacaaagcctgtggtttccatttcccgcactcagctcgtgtatgtggttgcagacctggacaagcttcaggagcagcttccagaactcttggaaataatcaagccaaaacttgaaatgattggctttaagaatttttcttctatctcagcagccctggaggactcccagagctctttttcagcctgtgtgccctccttgagtagcaagatcatccaggatttaagtgactcttgcttcggtttcctaaaaagcgccctggaggttcccaggctttaccgaagaaccaataaggaggtcccaaccacagcttcctcctatgtggacagtgctctgaagcccttattccagcttcagagcggacacaaggataagctcaaacaagcaataattcagcagtggctagaaggcactctcagtgaaagcactcataagtactatgaaaccgtgtcagatgtattaaactctgtgaagaagatggaagagagcctgaaaaggctgaaacaagccagaaaaaccactcccgccaaccccgtcggtcccagtggtggcatgagcgacgacgacaaaatcaggctgcagttggccctagatgttgagtacttgggagagcagatacaaaagttgggactacaagcaagtgacataaaaagcttctcagctctcgcagagcttgttgctgctgccaaggaccaggcaacagcagagcagccttaagcatcttggaagatcccgaggttagattcttaagcaagagaagagttggacttccaggctgaaggggagaaagtgactctgttctcttagcaaccgtctgtagcaaagaagtgcttccagcatcactccagcaacacgcccatgcgtcttctctcagcgtatttgggtcttctttgcccaaaagaacacaaaagcctttttccattgtatggaagatagtttttaagacatttgaaactttctactatagtttacagaacaaattattttatttttattgtaaatcttagtgtggaagagctgatttctaaaatatgattaaagtaaatatatacctatgaatatcaagagtcgtctccctgagcctgtagttggaagtgacgactgtaatggaatgatgtcttgtatagaaatgcccttctctgaaataaagagaactcctgggctttctaaagaggctgcgggaagccatcctccactcccactgtgtgtgagagcagtgcttctgatcctgctgtcaccccgacctctggcaggagccggcgccagtaggaaagacctccttcctaaataaaagaagtgtctcccatga

SEQ ID NO: 389821 - DNA, 1281 bp, Homo sapiens
gtgtatcttcccggatctttctctgtgcgtgtgtgtggtgcgtgtgtgtgtgtgcgtgtatggatgtatacgtgtgtgtgtgttgttattgtcgtttttaaacaaaagtgggaacgtagtgtgccatgtctcggtgaccaaaataatccacggtagttgctttgccaaacaaagtgttttcaactcatctgattctaaaaggtttttggcaatatgttaagaaactaagagcacagaccagtacttttttgaaaattctctacttaaaagttcacttttttatttcctctagtgtggattttcttttctagaatgtttttaggcccacaaaagaggcttttattctgtctgatttgatgaactgagataaattaacatactggcttcttagaatgctaagtgtttgaccccaaaatcctcacattttacaacaagtaaatcctttgctctagaggaaaaaatatcctacaagtcttcagggaactgtcttctggtttagtagaggatgaagattttctttcttttttttccccccccatattcagcttgaattgcagtaacataattcattctcatggcctttgcagatacaaaagttgggactacaagcaagtgacataaaaagcttctcagctctcgcagagcttgttgctgctgccaaggaccaggcaacagcagagcagccttaagcatcttggaagatcccgaggttagattcttaagcaagagaagagttggacttccaggctgaaggggagaaagtgactctgttctcttagcaaccgtctgtagcaaagaagtgcttccagcatcactccagcaacacgcccatgcgtcttctctcagcgtatttgggtcttctttgcccaaaagaacacaaaagcctttttccattgtatggaagatagtttttaagacatttgaaactttctactatagtttacagaacaaattattttatttttattgtaaatcttagtgtggaagagctgatttctaaaatatgattaaagtaaatatatacctatgaatatcaagagtcgtctccctgagcctgtagttggaagtgacgactgtaatggaatgatgtcttgtatagaaatgcccttctctgaaataaagagaactcctgggctttctaaagaggctgcgggaagccatcctccactcccactgtgtgtgagagcagtgcttctgatcctgctgtcaccccgacctctggcaggagccggcgccagtaggaaagacctccttcctaaataaaagaagtgtctcccatga

SEQ ID NO: 389822 - DNA, 509 bp, Homo sapiens
tcctgtgcatctttatctcctaccatcatcattccaggaggtcccaaccacagcttcctcctatgtggacagtgctctgaagcccttattccagcttcagagcggacacaaggataagctcaaacaagcaataattcagcagtggctagaaggcactctcagtgaaagcactcataagtactatgaaaccgtgtcagatgtattaaactctgtgaagaagatggaagagagcctgaaaaggctgaaacaagccagaaaaaccactcccgccaaccccgtcggtcccagtggtggcatgagcgacgacgacaaaatcaggctgcagttggccctagatgttgagtacttgggagagcaggtaacccatcagccgccggcagctccagcgagcctgaaaccaaattctgagagccgggcagttacttggtggctcgcgtgatcccagagatgctgtcgcagtggctagggaattgcttcctgtgttaagactaggagtcggggctcccaaa

SEQ ID NO: 389823 - DNA, 2135 bp, Homo sapiens
tgctggcttgctgaatgttggcggaagcggacccccctgtgccgtggaaactggcggtggccgcggccgccgagtcggtctgcgcagcctcctgcgttttctcgcttggatcttggcactgagaggcggtggccggcgggatggagaaaagtaggatgaacctgcccaaggggccggacacgctctgcttcgacaaggacgagttcatgaaggaagatttcgatgtcgatcattttgtgtctgactgtaggaagcgggtccagctggaagaactgagagatgacctggagctctactataaacttcttaaaacagccatggtcgaactcatcaacaaggattatgcagattttgtcaatctttcaacaaacttggttggcatggacaaagccctcaaccagctttctgtgcctttgggacaattacgagaagaggttctgagccttagatcgtctgtcagtgaaggaattcgggcagttgatgaacgaatgtctaaacaagaggacattaggaaaaaaaagatgtgtgtattgaggcttatacaagttattcggtcagttgagaaaattgaaaaaatcttaaactctcaaagttctaaagaaacctctgcactagaagcaagcagcccccttttgactggacaaattttggagagaattgccacagaatttaatcagttacagtttcatgctgttcaaagcaaaggcatgcctcttttggacaaagtaagaccgcgtatagctggcattacagccatgttacagcagtcactggaaggtctcctattagaaggccttcagacgtctgacgtcgatataatacggcactgcttgcggacttacgccacgattgacaagacacgggacgcggaggccttagttggccaagtactagtgaaaccatacatagacgaggtgattatagagcagtttgttgaatctcatcccaatggccttcaggtcatgtataataaactcctggagtttgttcctcaccattgccgccttcttcgagaagtcacaggaggtgccatctccagtgaaaaaggcaatactgttcctggatatgactttttggtgaattctgtttggccacaaatagtacaaggattagaagaaaagttaccctcgctttttaatcctgggaatcccgatgcatttcatgagaaatataccataagtatggattttgtcagaagattggaacggcagtgtggatcacaggctagtgtaaagagattaagagcccatcctgcctatcacagcttcaataagaagtggaacttgcctgtttattttcaaataagatttagagaaatagcgggatccttagaagcagcacttacagatgtcctggaagatgccccagctgaaagtccgtattgccttttggcttctcatagaacttggagcagccttaggaggtgttggtcagatgagatgttcttgccattactggtgcatcgcctgtggagactcactctgcagattttggcacgatactctgtgtttgtcaatgagctttcactcaggcccatttctaatgaaagtcccaaggagatcaagaaacctttggtaactggtagcaaagaaccttccatcacccaaggaaacactgaagaccaaggaagtggtccttcggaaacaaagcctgtggtttccatttcccgcactcagctcgtgtatgtggttgcagacctggacaagcttcaggagcagcttccagaactcttggaaataatcaagccaaaacttgaaatgattggctttaagaatttttcttctatctcagcagccctggaggactcccagagctctttttcagcctgtgtgccctccttgagtagcaagatcatccaggatttaagtgactcttgcttcggtttcctaaaaagcgccctggaggttcccaggctttaccgaagaaccaataaggaggtcccaaccacagcttcctcctatgtggacagtgctctgaagcccttattccagcttcagagcggacacaaggataagctcaaacaagcaataattcagcagtggctagaaggcactctcagtgaaagcactcataagtactatgaaaccgtgtcagatgtattatttcaataaaggatcatttgacaactggtgaaa

SEQ ID NO: 389824 - DNA, 517 bp, Homo sapiens
gtccaaactaatcttgaactcctgagcgcaagtgatctgcctgccttggtctcccaaagtgctgggattacaggcgtgatccactgcgcccaaccgatgaaaatattttagtcactaatctattcctttttcacggaactgaatctagtgtgctaaattaaagaactatttgaactttcagtggcatattaaattcagtagccacattgtgttttatttaaactcagcttatcttgtcatatcattcttgtctcccaattttatcacaaaaaataaaataatgaactaatatattttcttctgtctttctctgcctcaaacccttccctaatctgaatgatggtagaaaaaaaggccaggatgaagacagtgaggagttgtggtggcgaatcatgtgctctgctttaaatctttttttaaaagttgttattttattttcagactcccagggaagcagatgagagtgcatggtttgtcagcccatgtctcccccacagttgtatctgtacagcctaat

SEQ ID NO: 389825 - DNA, 600 bp, Homo sapiens
gcttggatcttggcactgagaggcggtggccggcgggatggagaaaagtaggatgaacctgcccaaggggccggacacgctctgcttcgacaaggacgagttcatgaaggtgcgcgcggcgtccgctccccggagccgggccatgagggtgcctctgccctgtgccctctgtggcggtctcttcggtcggctgctcctgcctgcgcacgctcagtgtcaggtcctccgccgagacctcgctgcacttcgcaatgagtcttttggcgtcaggtttggcgggtgcagcctggagaaagcacttctgtaaaatcgtgcgtgttacatggaaaggcctgaaagttctgggcaagtggttttgagctgcatgtcaaagccactgttacccgttcctgttaccatgcagtgcagtcagattgccagtccccttgtcggaaagaagcttgtggaccggggccttggagctcattaagtgtgtgttgaataaatctccaagcccacgtactttcctagggactcgggtcggaaagaaaaagaacttaatctgaagttttgcttaacattcagctaaagcttccagaatgggatatttagaagcttaga

SEQ ID NO: 389826 - DNA, 267 bp, Homo sapiens
ctttgtaagtagattatggtatattttactgatatgtgcccttattttacagtgaaaaaggcaatactgttcctggatatgactttttggtgaattctgtttggccacaaatagtacaaggattagaagaaaagttaccctcgctttttaatcctgggaatcccgatgcatttcatgaggtatctccccgcccgtcgtcttgattcttgaagatgttaaccggagactggagaaatatcatgttctcttctacttagtcttggttct

SEQ ID NO: 389827 - DNA, 2315 bp, Homo sapiens
  misc_feature (1295)..(1295): n is a, c, g, or t
  misc_feature (1299)..(1299): n is a, c, g, or t
  misc_feature (1304)..(1304): n is a, c, g, or t
  misc_feature (2192)..(2192): n is a, c, g, or t
gtgtatcttcccggatctttctctgtgcgtgtgtgtggtgcgtgtgtgtgtgtgcgtgtatggatgtatacgtgtgtgtgtgttgttattgtcgtttttaaacaaaagtgggaacgtagtgtgccatgtctcggtgaccaaaataatccacggtagttgctttgccaaacaaagtgttttcaactcatctgattctaaaaggtttttggcaatatgttaagaaactaagagcacagaccagtacttttttgaaaattctctacttaaaagttcacttttttatttcctctagtgtggattttcttttctagaatgtttttaggcccacaaaagaggcttttattctgtctgatttgatgaactgagataaattaacatactggcttcttagaatgctaagtgtttgaccccaaaatcctcacattttacaacaagtaaatcctttgctctagaggaaaaaatatcctacaagtcttcagggaactgtcttctggtttagtagaggatgaagattttctttcttttttttccccccccatattcagcttgaattgcagtaacataattcattctcatggcctttgcagatacaaaagttgggactacaagcaagtgacataaaaagcttctcagctctcgcagagcttgttgctgctgccaaggaccaggcaacagcagagcagccttaagcatcttggaagatcccgaggttagattcttaagcaagagaagagttggacttccaggctgaaggggagaaagtgactctgttctcttagcaaccgtctgtagcaaagaagtgcttccagcatcactccagcaacacgcccatgcgtcttctctcagcgtatttgggtcttctttgcccaaaagaacacaaaagcctttttccattgtatggaagatagtttttaagacatttgaaactttctactatagtttacagaacaaattattttatttttattgtaaatcttagtgtggaagagctgatttctaaaatatgattaaagtaaatatatacctatgaatatcaagagtcgtctccctgagcctgtagttggaagtgacgactgtaatggaatgatgtcttgtatagaaatgcccttctctgaaataaagagaactcctgggctttctaaagaggctgcgggaagccatcctccactcccactgtgtgtgagagcagtgcttctgatcctgctgtcaccccgacctctggcaggagccggcgccagtaggaaagacctccttcctaaataaaagaagtgtctcccatgaaaaaaaaaaaaaanaaanaaaanaaaaaaaagcagcctcctgcgttttctcgcttggatcttggcactgagaggcggtggccggcgggatggagaaaagtaggatgaacctgcccaaggggccggacacgctctgcttcgacaaggacgagttcatgaaggaagatttcgatgtcgatcattttgtgtctgactgtaggaagcgggtccagctggaagaactgagagatgacctggagctctactataaacttcttaaaacagccatggtcgaactcatcaacaaggattatgcagattttgtcaatctttcaacaaacttggttggcatggacaaagccctcaaccagctttctgtgcctttgggacaattacgagaagaggttctgagccttagatcgtctgtcagtgaaggaattcgggcagttgatgaacgaatgtctaaacaagaggacattaggaaaaaaaagatgtgtgtattgaggcttatacaagttattcggtcagttgagaaaattgaaaaaatcttaaactctcaaagttctaaagaaacctctgcactagaagcaagcagcccccttttgactggacaaattttggagagaattgccacagaatttaatcagttacagtttcatgctgttcaaagcaaaggcatgcctcttttggacaaagtaagaccgcgtatagctggcattacagccatgttacagcagtcactggaaggtctcctattagaaggccttcagacgtctgacgtcgatataatacggcactgcttgcggacttacgccacgattgacaagacacgggacgcggaggccttagttggccaagtactagtgaaaccatacatagacgagactcccagggaagcagatgagagtgcatggtttgtcagcccatgtcttncccacagttgtatctgtacagtctaatccaaggaagtaagtttgaatgtgacctgttatttacttcactgtttagcaatggtcttcaggtcatgtataatatactcctggagtttgttcctca

SEQ ID NO: 389828 - DNA, 490 bp, Homo sapiens
tgctggcttgctgaatgttggcggaagcggacccccctgtgccgtggaaactggcggtggccgcggccgccgagtcggtctgcgcagcctcctgcgttttctcgcttggatcttggcactgagaggcggtggccggcgggatggagaaaagtaggatgaacctgcccaaggggccggacacgctctgcttcgacaaggacgagttcatgaaggaagatttcgatgtcgatcattttgtgtctgactgtaggaagcgggtccagctggaagaactgagagatgacctggagctctactataaacttcttaaaacagccatggtcgaactcatcaacaaggattatgcagattttgtcaatctttcaacaaacttggttggcatggacaaagccctcaaccagctttctgtgcctttgggacaattacgagaagaggttctggtaagtttcccgaataacatcaaacagtttaccctaaagcatgatatgct

SEQ ID NO: 389829 - DNA, 3983 bp, Homo sapiens
  misc_feature (2963)..(2963): n is a, c, g, or t
  misc_feature (2967)..(2967): n is a, c, g, or t
  misc_feature (2972)..(2972): n is a, c, g, or t
  misc_feature (3860)..(3860): n is a, c, g, or t
tgctggcttgctgaatgttggcggaagcggacccccctgtgccgtggaaactggcggtggccgcggccgccgagtcggtctgcgcagcctcctgcgttttctcgcttggatcttggcactgagaggcggtggccggcgggatggagaaaagtaggatgaacctgcccaaggggccggacacgctctgcttcgacaaggacgagttcatgaaggaagatttcgatgtcgatcattttgtgtctgactgtaggaagcgggtccagctggaagaactgagagatgacctggagctctactataaacttcttaaaacagccatggtcgaactcatcaacaaggattatgcagattttgtcaatctttcaacaaacttggttggcatggacaaagccctcaaccagctttctgtgcctttgggacaattacgagaagaggttctgagccttagatcgtctgtcagtgaaggaattcgggcagttgatgaacgaatgtctaaacaagaggacattaggaaaaaaaagatgtgtgtattgaggcttatacaagttattcggtcagttgagaaaattgaaaaaatcttaaactctcaaagttctaaagaaacctctgcactagaagcaagcagcccccttttgactggacaaattttggagagaattgccacagaatttaatcagttacagtttcatgctgttcaaagcaaaggcatgcctcttttggacaaagtaagaccgcgtatagctggcattacagccatgttacagcagtcactggaaggtctcctattagaaggccttcagacgtctgacgtcgatataatacggcactgcttgcggacttacgccacgattgacaagacacgggacgcggaggccttagttggccaagtactagtgaaaccatacatagacgaggtgattatagagcagtttgttgaatctcatcccaatggccttcaggtcatgtataataaactcctggagtttgttcctcaccattgccgccttcttcgagaagtcacaggaggtgccatctccagtgaaaaaggcaatactgttcctggatatgactttttggtgaattctgtttggccacaaatagtacaaggattagaagaaaagttaccctcgctttttaatcctgggaatcccgatgcatttcatgagaaatataccataagtatggattttgtcagaagattggaacggcagtgtggatcacaggctagtgtaaagagattaagagcccatcctgcctatcacagcttcaataagaagtggaacttgcctgtttattttcaaataagatttagagaaatagcgggatccttagaagcagcacttacagatgtcctggaagatgccccagctgaaagtccgtattgccttttggcttctcatagaacttggagcagccttaggaggtgttggtcagatgagatgttcttgccattactggtgcatcgcctgtggagactcactctgcagattttggcacgatactctgtgtttgtcaatgagctttcactcaggcccatttctaatgaaagtcccaaggagatcaagaaacctttggtaactggtagcaaagaaccttccatcacccaaggaaacactgaagaccaaggaagtggtccttcggaaacaaagcctgtggtttccatttcccgcactcagctcgtgtatgtggttgcagacctggacaagcttcaggagcagcttccagaactcttggaaataatcaagccaaaacttgaaatgattggctttaagaatttttcttctatctcagcagccctggaggactcccagagctctttttcagcctgtgtgccctccttgagtagcaagatcatccaggatttaagtgactcttgcttcggtttcctaaaaagcgccctggaggttcccaggctttaccgaagaaccaataaggaggtcccaaccacagcttcctcctatgtggacagtgctctgaagcccttattccagcttcagagcggacacaaggataagctcaaacaagcaataattcagcagtggctagaaggcactctcagtgaaagcactcataagtactatgaaaccgtgtcagatgtattaaactctgtgaagaagatggaagagagcctgaaaaggctgaaacaagccagaaaaaccactcccgccaaccccgtcggtcccagtggtggcatgagcgacgacgacaaaatcaggctgcagttggccctagatgttgagtacttgggagagcagatacaaaagttgggactacaagcaagtgacataaaaagcttctcagctctcgcagagcttgttgctgctgccaaggaccaggcaacagcagagcagccttaagcatcttggaagatcccgaggttagattcttaagcaagagaagagttggacttccaggctgaaggggagaaagtgactctgttctcttagcaaccgtctgtagcaaagaagtgcttccagcatcactccagcaacacgcccatgcgtcttctctcagcgtatttgggtcttctttgcccaaaagaacacaaaagcctttttccattgtatggaagatagtttttaagacatttgaaactttctactatagtttacagaacaaattattttatttttattgtaaatcttagtgtggaagagctgatttctaaaatatgattaaagtaaatatatacctatgaatatcaagagtcgtctccctgagcctgtagttggaagtgacgactgtaatggaatgatgtcttgtatagaaatgcccttctctgaaataaagagaactcctgggctttctaaagaggctgcgggaagccatcctccactcccactgtgtgtgagagcagtgcttctgatcctgctgtcaccccgacctctggcaggagccggcgccagtaggaaagacctccttcctaaataaaagaagtgtctcccatgaaaaaaaaaaaaaanaaanaaaanaaaaaaaagcagcctcctgcgttttctcgcttggatcttggcactgagaggcggtggccggcgggatggagaaaagtaggatgaacctgcccaaggggccggacacgctctgcttcgacaaggacgagttcatgaaggaagatttcgatgtcgatcattttgtgtctgactgtaggaagcgggtccagctggaagaactgagagatgacctggagctctactataaacttcttaaaacagccatggtcgaactcatcaacaaggattatgcagattttgtcaatctttcaacaaacttggttggcatggacaaagccctcaaccagctttctgtgcctttgggacaattacgagaagaggttctgagccttagatcgtctgtcagtgaaggaattcgggcagttgatgaacgaatgtctaaacaagaggacattaggaaaaaaaagatgtgtgtattgaggcttatacaagttattcggtcagttgagaaaattgaaaaaatcttaaactctcaaagttctaaagaaacctctgcactagaagcaagcagcccccttttgactggacaaattttggagagaattgccacagaatttaatcagttacagtttcatgctgttcaaagcaaaggcatgcctcttttggacaaagtaagaccgcgtatagctggcattacagccatgttacagcagtcactggaaggtctcctattagaaggccttcagacgtctgacgtcgatataatacggcactgcttgcggacttacgccacgattgacaagacacgggacgcggaggccttagttggccaagtactagtgaaaccatacatagacgagactcccagggaagcagatgagagtgcatggtttgtcagcccatgtcttncccacagttgtatctgtacagtctaatccaaggaagtaagtttgaatgtgacctgttatttacttcactgtttagcaatggtcttcaggtcatgtataatatactcctggagtttgttcctca

SEQ ID NO: 389830 - DNA, 844 bp, Homo sapiens
aagaggccctgctgtcccctgcctgcttccagggggtgggccagtgaactcgtagaggcaggcatctcgtcctttcttgcagctgtgacgggccaaggaaagaggggatccagcctcctccactgctcctctgctcctctgctcccacctggctgtgaaacctggggcgagtcatacctgcccctggccttgtctgtgagggactgggctggtggcacctaaagcccttccagttggggccgtctctgttgcacctgccctggcctcccctccagccctcccgagaagcatgctacccaggattacgcttttgtccccgcttcaccccatgctgtccgagccctgaagagacttcctctgtgtctagtcccaagaatagagttctgtcaaggacctccaagtcaccccttgctggaaagagagcattcttgagtgtggccgaggtcctgcttatcagcacagcgagtccactgccccagcccctggggctgctggaatgcaggagcctcccacccggacagggtcagctgctcacggctcccacagtagtccctggaatggagtgcgggagggagcactggtgctgagggcaggctgatcccagccactgccttccgacagggagtggccaggagcgaggctgcagacacagttttgttgcaccccagctggcccaggatgtgtgtactggcagccagtcctgccatccaggccctgggcttgctccaaggctgccagggtaccgggagctgtgttctgctcatgcaccagccttcaacatttcaccttgaccagtgacccactggatcttctcagggtcagggcttagccctgggggtctcca

SEQ ID NO: 389831 - DNA, 460 bp, Homo sapiens
cgtgcatagtttaacagagacgaataatgttcattttgatctttattaagaggtggcctcttaataggccacccccttaataggcctcagaatatctgctttaaagtggctttttcctgatggtttcttctaccattgttacagtagctgcctcaaatcagccaaagcagaagttcctattttgcttgagagcttaggcttcaggcaaaaactactgacatttatgagatacctagtattttacaatgctatctggttaaattcttataattgtccttttaaaaagacagagaacacagaggtaaaataactgctctgagttcacataggcaaatgttggagacgagattcaaacagaaactagactgactcaaaaatcaaatctaagtgatgaaagtaaaggtactgttttgtttgcatcacttaataattcatctggaatcacaagtcatgataagaa

SEQ ID NO: 389832 - DNA, 603 bp, Homo sapiens
ttgtgggggcatctctaatgctcacttatatctccctagaacatcactcttttggtgctgtgtccttcaaatgtatgtcaacagtggtggctgaaaagggactgctttggggaaaacaggacccaaccattcacccagaattgacccattaaatctcttccagtcctagtgttccctgagcccctcttggcacatatataagtaagctagaaattacaataagggacagtccattcctctatgacagcttgctggactgattcatgacaaagtggagaaatgtactcaatactccccggttaacacagtctagaaacagagtttctttatggatatccacacccaagtcatccaaactttcttgattccttttcactgccatcaaggtcctctagaaattgagtttaggtatcatcctttgaaaagttcccaagatttctaccaggaggtacacacaggcgttccctgtctagggcaggaggactatcctagcttgaccttctgatccactagaataagactggcgtatgatgcctgtcatcagaacagactggcacaagtagtgacatcaatgaaccacagcacaatcttccaagtgatgtc

SEQ ID NO: 389833 - DNA, 315 bp, Homo sapiens
ccccatgcactagttgtcagtgctgtccagctcgtcagtgtcacccctcctcgcaactccaggcgctcgtttttctgctccatacagagctccggggccattttccggtacttccggaaatcttccatcagggggcgccttctcaccatcaagggaaacaaggccttgagtctctgcttatgtgcaagactctaatccaagtgggaagaaaatcactctctggccacaaaaccagacagcacttacaaatctttcttcagaagggcccattttcccaaattcaaccaagacagatgttcaaactagaacacagac

SEQ ID NO: 389834 - DNA, 724 bp, Homo sapiens
gcggatcacaaggtcaaatcaagaccatcttggccaacatggtaaaaccccatctctactaaaaataaaaaaaattagccagctgtggtggtgtgcacctttagtcccagctactcaagaggctgaggcaggagaatcacttgaacctggaggcagaggttgcaatgagccgagattgcgccactacacaccagcctggcgacagagcgagactccatctcaaaaaataaataaataaaaagggggggtctatgtgacgaggagccttgaagcgttaagtgtttatctgcagttttattttattttggaatgcctaagtatgattttgtgaaagctggtatacaaataaatttaggaataaacctagcacatttatgatacagtttgacaaactgatcaataaaatctatcagttcattttgtaatctataactaagataaattatcatgataatgaaaaattactaatatatatagctaataactttttgcaggtcatttataaataggatatagattaaactatatttgttagattaatgatatatcacacttgccctattatcccaaagttttatcactttaaatgggatttctctatactacttctatttaaaatagtactattcaattatttgtgaatgtctttaaccaatacccaaccctcaaacacaaaggtgaattatttctgagagaagtaagatatagatgaaaaatatgcatt

SEQ ID NO: 389835 - DNA, 270 bp, Homo sapiens
ggcatgcagcaaatccttatggcctagaacggaatttgttagaatttcagccattacatccatgtaaggaaaagaagtcaaaaactggatgtaatcttttattttcaaggtcctcctctctgagatagagccaccttctataaatgggaaaccaaggcccagaggacctgggatgattccagctctttgacttattagccacgtgaccctcaacaaacaatttaacttcttcgtgctgaaatttcctcatctgcaaaaatgggtaaaatg

SEQ ID NO: 389836 - DNA, 463 bp, Homo sapiens
tcaatgaatatctcccccaccctgcacacttttttttcattttgttagatttctcaatgttcccgtctgttaagggaatcctgagtccaaattctttcagggtatttgtaattccaccctgttgtctcatccatgcatttcagataccaccatttgagttcttctccatgtcacacacacataatgttgaaagtgacagggctgagaatgaagtcctgaaaggacacacacaaacataaaccctcctccacctgcctgcatattgatatcaatccattaaatcagcagtctttgactaagactctaattgtactattaactaacctacatattctatcttgtctagaaggattttatgagagcttccacatctatgaagcgtttccttacatggcaccacctctacccaggcaggactggactaatcactcccccatctttcttacaactgaaccttttctca

SEQ ID NO: 389837 - DNA, 140 bp, Homo sapiens
tgtgggacagaatattgacctatgagttttactgaattcatgcaagaatgagccatgctaaaactgggtgaaaatgtagtcatgagcctaagaaaactccaaacgaaatatcactccgtttttattaagttcaggttagg

SEQ ID NO: 389838 - DNA, 255 bp, Homo sapiens
ctaaattctgatcagctgtcttgttactttccttctctgcctcttccatttgctgaaatacagagaaagggccctggtacttggcagacaggcaccactcagtataactggagacctttaggaaatgcaaggcacctccaaacctagagggaaagtttccagcacactgcaatgagcatacttatttccttttccttttattttagagcaccaataattagaatctacatcttctccataccacccccaccaaga

SEQ ID NO: 389839 - DNA, 418 bp, Homo sapiens
ctgcccttagccctctggtcttacttctgtagtaaccctggcaatcttgccattcttgactttgaaatgccacttatgtcagtgactccaaatctgtgtatcactggactttattccacatttttagccctatactgtctttatcccaagtcagctcccttcttccattcccactccacacagttcagagctgattgtgctccctcctttccttacttctgtgacttcctctgtaaagtaaaataattgtattatcatccatacatttgatgattcaaaattacagagatattcaactttgtattctatttggatcacagcaggtctcagaaaggaggtgtttagtttgaagaagctcatcgggataagtgagagggccagcagtctagacaaataaaatgtgccaaagcattgagac

SEQ ID NO: 389840 - DNA, 105 bp, Homo sapiens
ctgacctgtctaggatccctgagtccaggtccggcgagaaactccacagaaaggagggctgtcattcttttcctgagcatcccaaggatttcagagccagcccag

SEQ ID NO: 389841 - DNA, 765 bp, Homo sapiens
ataacattttgacccctatctaaagcaacttgtaatttataaaacttgacattgcttatggctgcagggactatgtgtagtcataaacagttacttttccatgagtaatttatgaccactgaaatgcaatgcacatttgagagtaaagaaacaaatattaaggatgatagtttctaagacacatgcctcctattctcatcttttccatgtgccacagtgtatgtttctacttcttatttcaaggttgaagtggccttttgttaaataaaaagagttgtaaaaagtagaaattgactgactcgcaaatggcatgtccagttacctcccatatgacatcccatgacagctcctcctttctattatttctgcatcttatataggacagcctgctacagggtgtcatccaacaaggcctacaatcctaaaacagaacgttaactgggctgatgcctccatttgggggaaataccagaatcctcacaggtgttcgttcattaagaaagaaacaaaggtccaggcgcggtggctcatgcctgtaaccccagcactttgggaggctgaggcaggcggatcactgaggtcaggagttcaagatcagcctggccaacatggtgaaaccttgtctctactaaaaatacaaaaaaattagctggacgtggtggcgcatgcctataatcccagctactcaggaggctgaggcaggagaatcgcttgaactgaggcacaggttgcagtgagccgggttggtaccactgcactccaggc

SEQ ID NO: 389842 - DNA, 214 bp, Homo sapiens
attttcccttcctaatagccgagtctggcatgctgtcgaagagtgtcacgggtaggtgctaagttgaccttgtaggtctgttttccatcctgacacaaaggggctactgggaagtttttagccagctatgatgacagggagggaggagttcacctgtggacctggtaggggcatgaacgagaaaggcgggttttcaaacggagctaggacagga

SEQ ID NO: 389843 - DNA, 223 bp, Homo sapiens
actgacttttcagggagaaccaactacaaatgagatgcaagtccacgacattagctgtttccttgaacaagaacttggcatatttaatggtgactttggtccaaaaccaaaataagtattatacagtcaagttgcatttgttcaccatcattggataactggctttccataaacaaattaattgtcaatgcaaggccaggcgcagaggcctgtaatcccagca

SEQ ID NO: 389844 - DNA, 659 bp, Homo sapiens
cttcagaatagcatgtgctaaagattctccatgtttttgcacaatcagttcctctgcctaaaataccttccagtcccctaactcctgcccctccatacataccctcaggtaattgttaattattcaaaacccagatgaaataacaccctttctttgctcccacagaacagtactttgtaattttcctctattataactcttactctatttgttatagttagtttgtactctcaatccctagttcagcctctggtcaatagaaggtacctaatgtttggttaatgatgcgattaaatataatcagctctgaaatgtgtttccagtgttaagaactcagctatcttatgtgcataggtacaatatatattttgttaattgaatttgtatttgttctattgatgtcattaaatggatctgcgccagtgacaattatacgtcttcctggagagcaagtacagattcagggggtcatccagacagcccagtcttctgtaattcacccaccacatgtgcaaatgatacagaaatttgaagacttagtggtcgagagttggaacttttataccctgagtcttcagatacatttcagttgctgtacctataatatataaaccaagataaagttgtcttacaaattagactgcagaccaaatcaggca

SEQ ID NO: 389845 - DNA, 699 bp, Homo sapiens
gttggtgtctggagttgggagagaccagtttctttgagcagtggacttcttcctgttggtttcagaacacaggccctatatcatattttgtttaaagtaagaggtctgctgcttaaaaagaaaaaaatttttttccaacacagcttctagtgtaaatggctttttgtgctaggcactatataacgtgactttaaagctggcataattccccaaacaatgaaagcttctggtgagaagcacgtaagtgttgagagaagtgatacaccaagaggaggcccaggttcacactcgacgtaagtggcagagctgggattaaactccttgtctgctacctccagagtccatatctctctcctcaccctgaaatgtaagccagacataccagcaggctgccaagtcattttaattcaaatttgatggagctgccacagcactggtattgctttgttcgagtttgcttcccagatgaccttgctgtgtgtttagacacctttgacagcccatattgaacatacctaaaatggtcttcactgtaagagttcattgattgtgcctctgtatgttcagagtgataatgttttttaatcagagggcattttatttggaatttcttttcaaaaagtgcaggtagttctaaacactaaatacaaggtaaaggttttttaagaatgtgcctagaaagtattgctcttggcccaa

SEQ ID NO: 389846 - DNA, 468 bp, Homo sapiens
taaataaataaataaataaatgtggaattaacaaataaatgcactaataaacaatggaattaaagtctctgggttcacactcaaatgggtggaaaacaaatacacaaaacagtatattattacatggtaagttaaatggtttatgcaaaaaatattatgaaagttttaaaagaaaacaacacttcagtattcagtctgataaaatcctgctatccagacaaagaagtaaggaagtctttctcaacaaagttggagccggccagatgcggtggctaacacctgtaatcccaccattctgggaggccgaggcaggcggatcacctgaggtcaggagttcgagaccagcctgaccaacatggacaaaccccatctctactaaaaacagaaaatcagctaggcatggtagtgcatgcctgtaatcccagctactccggaggctgaggcaggagaatggcatgaacccaggag

SEQ ID NO: 389847 - DNA, 263 bp, Homo sapiens
tttcaggagtgtatatgtttgttgtgtaagagcttatattggcagagaagtgcaaacttcccaaacctgactgcattcaaattgtctgtaaaagatggtccaaaaacatcatttctggtctatacttgtggtgaagccagtgttgcaggtctgatgtggggacttggaagtgaggtttttaacaagctccatgagtgtttctgacacactgtaagtttgggattcattgttaaagtggcaacacagccatgaaaataatgtgc

SEQ ID NO: 389848 - DNA, 209 bp, Homo sapiens
aggccacagtggcaggctgctggcaagagcaggagggggttagagggggacgggacagagagcaggaagcccaggccatgctgaaccacctgtcacttgtcattgtcatcattgtcaagccttgagtgttgcttcctctgatggccatgaagccatcgcagggctctgtgaagagtgatgtgatgagactgggcttgccggccactggg

SEQ ID NO: 389849 - DNA, 781 bp, Homo sapiens
atttactactttaaaaatggaaataataggtctttggtaccttcttgaaggtcatatgccacaaagaatgcaaaaatacatgaaagtccttagtatttgttgttatggtcattttttagagctaattttatttttaatcattagcggttgcttcgtttggagttctgtttttataacaatgatagataatatctgcatcatattattgatgtaaaaaaaatctacctttgaaatgaattagggatgtaccatacttttgaatgtttgtcatcaaacaacatttagcataaactgcatctagtggccattgctctgtaatatgtaaagacttgtcggtactttgtcctgctaattaatttgaggatttagattgtaagctctgtgagggcagaaagtaatatttttctcatttttgtaatcttttctattattgtctgcatagcatagtactttacactgtatcagaaattgagtattttggtttaggcttctatggtaatagaggttaagaaaggaaatttggtagacctttaacatttgctggattttgacatttttgatttttgactgaagtcttcaagttctgttacatgacacaagaatgtgaaatgattttttctttttttgggaaaagctggttttttgtgtgctttatataatttaaagaaaagacttgttatgaaatagtttcagtcattttctgaattattgttgaaattagtacagggtagattcacatggtcagaaagtgtcacttaaagttttcacctttagcttatgt

SEQ ID NO: 389850 - DNA, 234 bp, Homo sapiens
gggtaaaatggggcacaggcttagaattcatgatctgtctgtttctttatgtgaagaactagtgttgtcaattgaaacctattttattttcatccagttgaagcatcttacctagctattcttcttttgaaaagtctagacttcttttctaacatataatgcaaagatctgtttcttttagcattgttttgcatctaggttaggaactaaattagctatgaatttggggactat

SEQ ID NO: 389851 - DNA, 544 bp, Homo sapiens
gctaatttttgtatttttagtggagacagagtttcactgtgttggccaggctggtctcgaactcctgacctcgtgatccacccaccttggcctcccaaagtgctgggattacaggcgtgagcccctgtacccggccaagggggacatttagataattgattttaaccctttcttcctttagtatttacacataagtatctttctaaatcctgttttagctgcatctcataaatttctatatgttgtgctttatttggtttgaaatgttttctaatttcccttgtgatttcttctttactgtttaatttccaaatatttgagacttttctagataacttactgtactgatttctaatttaatccattgtggtctgagaacatgttgtgtaaagttttcagtcttgaaatgtattgagacttaccttatggtccagcacattatctatatggatgaatgtttcatatatacttgaaaagaatattttatatacagttgttgaatatactgttctgtaaatgtcaattaggacaggtagttaataat

SEQ ID NO: 389852 - DNA, 316 bp, Homo sapiens
tttaaaaaattctgtatagaaatacttttctaagggatactgaacagtcaaagcatgtttgatctctctgactttccctcattgaaagcattgattcttgttatacgtggttggtagatttagggagatgtaaactctgaaagaaacttgaaagtaataaatcctatatctcctttatgattatgtctcctttttttctaccccttaaacaacacacacacacacacctttagctgtgctggacacattatctaattccacgtgcgcaaattctgcatctagataatgttgtcttgtgacagtgtggtatctacct

SEQ ID NO: 389853 - DNA, 1223 bp, Homo sapiens
tatatgaagactcttttctttgcataaaaagcattaggcgtataaatgtataaatatattttattatgtacagtacaaaaatggaaccttatgcatgggccttaggaatacaggctagtatttcagcacagacttccctgcttgagttcttgctgatgcttgcaccgtgacagtgggcaccaacacagacgtgccacccaaccccctgcacacaccaccggccaccaggggcccccttgtgcgccttggctttataactcctctgggggtgatattggtggtgatcacagctcctagcataatgagagttccatttggtattgtcacacgtctcctgcctcgcttgggttgccatgtttgagcgatggccctgttgatttcaccctgccttttactgaatctgtaaattgttgtgcaattgtggttatagtagactgtagcacattgccttttctaaactgctacatgtttataatcttcatttttaaagtatgtataattttttaaagtatgtattctattcatatggtctgcttgtcagtgagccagacttgcttactatattcctttataataatgctagccacttcctggattctttagtaatgtgctgtatgcaagaactttccagtagcagtgaaggagggttgcctctccaagcttcctaagggatgctgccctgggtggggatgcattgcagaggcagtagtagcatgggggctagagtggggagcgagatggaaaagggtggggggataggagaattctagagtgcttccagcatgagggtcctgagaacttctgtcctgagttcagagaaacatgcaaagtaactaacaaaatcgctacttgcctttgcagttttacagacccagggagctgctttgggagtgagaaaggcaaccctccaatgtgtttcaactttaaaatgttgaattcttttcagacatgtggtatctcatttattctccttttctagcgtttgttgaatttcaggcagaatgtcttacagaatgtcctagaaccagattatcatttaatccgaaacagctgaggaagggacagagaaggtacaagggcaaggcagcataaaacagatcaggagaatgaagagggaatgctttggttttttgttctgttttgttttttctttttcaagtaactaaaacagcatctccactcattgcccaatgtcactaaagggtttagttttaaggagaaag

SEQ ID NO: 389854 - DNA, 731 bp, Homo sapiens
ctgctttgggagtgagaaaggcaaccctccaatgtgtttcaactttaaaatgttgaattcttttcagacatgtggtatctcatttattctccttttctagcgtttgttgaatttcaggcagaatgtcttacagaatgtcctagaaccagattatcatttaatccgaaacagctgaggaagggacagagaaggtacaagggcaaggcagcataaaacagatcaggagaatgaagagggaatgctttggttttttgttctgttttgttttttctttttcaagtaactaaaacagcatctacatgtagagtgtcgtggagagctgagaccagggtaaagtcaagtgcagcatcagtactgcgagacccaccagcccctggagagggtcagctgagaatctggtagtgaagcctgtgtagggtcccggcaccctcaccctcagccacctgcagagaggccagggccccagagactagcccggttctgaagtgggcaggggtgctgccagagccttccgccccttatattgagaccctgctttcaggacaggccagccgttggccaccatgtcacattctgagtgagtgtcacgggtccctaacaataattttctgatctggagcatatcagcagaatgcttagcctcaaggggcctggcagctgtaatgtttgatttatgatgagaactatccgaggccacacttggcctctaaataagctgctctagggagccg

SEQ ID NO: 389855 - DNA, 392 bp, Homo sapiens
ttttaatatagtctgtatattttttaatattttgtatatttctgtgtattttaagtattttagtaccacattattaaaaacatctctgtggcaaaaatcaatacaaaaccactggtttttttacccattatttttcaatcttattctatcttcagaggtttaacacacaactacacaacttctctagagcaacttgtattaccatttctttctccaatctatcttcgatttacatcacctagcaaggatatagtcttcatgatattttaagtatatactttccttctttctctttctttgaaagaaagagaaagaaggaaggaaggaagggaaagaaggagagagagagaaagaaagaaaaaagaaagaaagaaagagaaagaaagaaagga

SEQ ID NO: 389856 - DNA, 179 bp, Homo sapiens
accaatttgaaatcaagacttaaaagttgcaaggcaataaataaactgtattaaataccatattttgctgccatcaaaataatttataaacaactacaatacacaattaaaaatataatttttttctgaaatgtgtggaaaggtgggtggagtggttcttaccttgttttagagggtta

SEQ ID NO: 389857 - DNA, 407 bp, Homo sapiens
ggtaatttaaacagagaaataaatcttcttccaagcacagagagcttcatgtttaaaattttagatgattgtaataatcccagtaacagaatataatgaagtgtttcccagcacactttagagaagacatactgagtattatggttctgttcagattttattttctgggactctattttaaagtgctccatctgtatttaagaaaacacatgcatgcacatacatcctgtggcactctcttctagggcaggtgttggtgggtaggtccctgtgcatttgtttgggggacacgtttgacccagtggtgtaatagttgttacaagaggattctctggaggaaggctgctgctgcagaggaggaagtcacatttgtcttctcccaaaacatcaactcattgtcttcctag

SEQ ID NO: 389858 - DNA, 344 bp, Homo sapiens
attagcttttgtatttctatggtattggttttaatatctcctgtttcatttctaattgagcttatttggatcttctccttttcttggttaatcttggtaatggtctatcaattttatttatattttcaaagaacaagctttttgtttcatttatcttttgtattttttgtttcaatttcatttagttctgctctgatctttgttatttcttttcttctgctgagtttggggttggtttgttcttgtttctccagttatgtgtggtgtgacctcagattgtctatgtgttctcttccagactttttgatgcaggcattcaaggctatgaactttcctcttagcac

SEQ ID NO: 389859 - DNA, 830 bp, Homo sapiens
aaataataagtggtggtcaagtcactagttatctaaacttagtgacagggagtctaagagttgccatgcctatgcaaattcagtaaagttaaaggcaagtgcaatacaaattatattcatcttagcgcacatcactgcccaggatttcataaacagatacctcaacttgttagatctactctttaacatctatttcattttttaaaaaatttcagtaaagaatgctgttcataatcttgtatatttgtttaaaaccccactaatcgggtgcagcctgccatttgtaaaatactgtgtgtgttgggagtccccaagaccacctcaggtttgattattcactaaaaggactcacaggacccagcatatagttctacagctgtggacatattacaatgtcagggtacaatgcaaaatcagcaaaaaggggagggcccatgggtcgaagtctgaaggaaaaagagtcctctcccaatggagtcatacaggacacagttgatcccccagcaatgagctgtaacaatatggtcatgtgccacataatggtgtttcagtcaacgatggaccacatatatgacatttgtccagaagattatagtggagctcagaaattcctgtcgcctagtgacgtcataacatcctagcgtatcctaggtttcaggtgtttgtggtgatgctaatataagcaaacctgtgctgtcagacatgtaaaagtctagcatgtgcacggtacatataatacttgataataaacgactctgttactgtttaatgtgtttactatactatactttttattcttaactttagaatgtactccttctacttatttt

SEQ ID NO: 389860 - DNA, 400 bp, Homo sapiens
aagagaccatgaaagcagtcaggggagggctcaggtcgtcaggcgtggaggacagggggcctggctcaggcatccggggcccacgtggctgggaggccaccattgggtgggtgtcagctattatggccgtggcaggctagggactctcactgaacgcctcctcccaacaccaacctctcaggcttgggagaactgcccccactgtgccgctggagtcagcgctcccacaggcattcgggggaggccagggctgaaggggaccccagggcccacctccaccttttgcaaggcgaggcaagggtctggaatgctcccaggtggatgtggttgggcgacagcctggggtctgtctcataagctcaggtttggaaaataagaccatccactagctgttagcccc

SEQ ID NO: 389861 - DNA, 762 bp, Homo sapiens
gcttccagcggacggcagcgcgcgaggtgagacggcgagggctcccggggcgcaggtagagatgttccgtcggtgccgaaggcccggctagtgcggttgtgtggacggcgaaaaaaaccaggccaggcgtcaaagcaagtcacccatccgacctaaacccctctaagaccctggagtcacgtctccctccggggatcctcgtgaggtcttgggggtcccaccgccctgcgagccgcgcccgcgccccgccagacccggaactgcgtcgctagaacgtcgggacctggttccctctttaatcacacccccgggggcgcttcgtgtgaggttccacgggggaaggcgagaggcgcaggctgccacacacgcactgtttggaagaggggaagcattgccccccctgcaccacctcaccaagatggctactttgggacacacattccccttctatgctggccccaagccaaccttcccgatggacaccactttggccagcatcatcatgatctttctgactgcactggccacgttcatcgtcatcctgcctggcattcggggaaagacgaggctgttctggctgcttcgggtggtgaccagcttattcatcggggctgcaatcctggctgtgaatttcagttctgagtggtctgtgggccaggtcagcaccaacacatcatacaaggccttcagttctgagtggatcagcgctgatattgggctgcaggtcgggctgggtggagtcaacatcacactcacaggtga

SEQ ID NO: 389862 - DNA, 818 bp, Homo sapiens
gcttccagcggacggcagcgcgcgagaccaggccaggcgtcaaagcaagtcacccatccgacctaaacccctctaagaccctggagtcacgtctccctccggggatcctcgtgaggtcttgggggtcccaccgccctgcgagccgcgcccgcgccccgccagacccggaactgcgtcgctagaacgtcgggacctggttccctctttaatcacacccccgggggcgcttcgtgtgaggttccacgggggaaggcgagaggcgcaggctgccacacacgcactgtttggaagaggggaagggctgcacttcctgctttcatccagaccaagttcggatcaagtgggagttcttcaaagagagagtttgcattgccccccctgcaccacctcaccaagatggctactttgggacacacattccccttctatgctggccccaagccaaccttcccgatggacaccactttggccagcatcatcatgatctttctgactgcactggccacgttcatcgtcatcctgcctggcattcggggaaagacgaggctgttctggctgcttcgggtggtgaccagcttattcatcggggctgcaatcctggggacccccgtgcagcagctgaatgagaccatcaattacaacgaggagttcacctggcgcctgggtgagaactatgctgaggagtatgcaaaggctctggagaaggggctgccagaccctgtgttgtacctagctgagaagttcactccaagaagcccatgtggcctataccgccagtaccgcctggcgggacactacacctcagccatgctatggtg

SEQ ID NO: 389863 - DNA, 1170 bp, Homo sapiens
  misc_feature (2)..(2): n is a, c, g, or t
  misc_feature (4)..(4): n is a, c, g, or t
  misc_feature (11)..(14): n is a, c, g, or t
  misc_feature (21)..(21): n is a, c, g, or t
  misc_feature (34)..(35): n is a, c, g, or t
  misc_feature (37)..(37): n is a, c, g, or t
  misc_feature (60)..(60): n is a, c, g, or t
cnanttttaannnnttaaaantagtttgttaaanntnatgttatgactagtcataacatnataatttaactcccttttctttttattttatttcactggtgaaaaaagaggctgtaaaaaataaaatgacttctattacctcaagttagtgcaaggcctaggactaaaaattagtaatttttcactcttgaggcagtgctctgatgatgactacaatgtgtgtctcatttacttctatcgtaatcctttttttaatatattttagaaatggttttgttaaatgttgctaaaacactggtaaatgctctttaattttctttatatgcagaatgaaggttttttattgccagtgcaccttaatatatgttcactgataaataaaggaaaatggttataatatagggagttgggttctgtgtaataaaattgtattttttgtcccttaaaaatgcccttaatctttatcataagcaataatagaaactattgcccatgtactttaatgtattttctgtaataataaaggaaaatggttgtaataaaggaagttgggctttgtgtagtaagttccaattgttttttgtctaaaatgttcttggtatttattataagcattaataatagaaagttagacctccttggtattggtactttagagaagggtcactgttgagtcacttccagtttcctcttctcttagtcttgacagcatatggaaagctccactaacaaaataaaacttatattatttttaatgactttttttttctcgccacaagtaatctatatcctgatgtatttgaagtagagcagaaatacaaattatttaaatgtgctgatgtaccaatggactagatactgttttcttctatgttattaaattataaaataatatagtaagtaaatttaaacagtgtatttgaaaatcctgaagtatatttattatttgtctatttcatttgggtctaattattgtaatcatttgatcatgatgcaacaagtttgaaaaataatagaaaaaagtcagatgggggccgggcgcggtggctcacacctgcaatcccagcaccttgggaggctgaggtgggtggatcacgaggtcagtagttcgagaccagcctggccaacatggtgaaaccccatctctactaaaaataccaaaaaaaaaaa

SEQ ID NO: 389864 - DNA, 401 bp, Homo sapiens
tttcctgggttcaagtgattctcctgccccagtctgcctgagtagctgggattacaggtgcccaccaccaggcccagctaatttttctatttttagtagagacagggtttcaccatgttggccaggctggtcttgaacttctaaactcaggtgatccgcctgccttggcctcccaaagtgctgggattacaggcatgagccactgcgcctggcccattgcaatttatttgttaaagaaactgagtcctttgttccactgagttacattgcatccccatggtgctgttcaatatatttatctgtcccctttatttccagtaactggtagttaaatctagaggcttgatctgattcaggtttggttctggggtcagaacacttcaccagtggtggtaggtatt

SEQ ID NO: 389865 - DNA, 322 bp, Homo sapiens
atacatactaaaaaattcttttggggcatatatgaacaaaaaatttgaaggtcattctcctgtaagactcagtgattcccagtcttgtcttttcttttttttgttggcataatagcgtacataagaaaaatgagatatggaccccaaacagctaaaacaattttggaaaagaagaaacaagttagaagattcacactttctgatttcaaagcatattgcaaagctgtaataacccaaactgtatgatactggcataaagacaaacaaaccaatggaatggaatagatagctgataagtaaaccctcacatacatggtcaaga

SEQ ID NO: 389866 - DNA, 282 bp, Homo sapiens
cctaatatattctttacttagattctattttgttagttactaagatcactatccagcttcctttcaaatcatatttacctgatacactcttccatcctttatctgcaacctttctgtgtgctttcatcccactcttcctaccctgacagtccccaagcagccactgatctgatctactccctgtcactctaggttagtctgcactttctagagttgataaaaatgaaatcatacagtatgcactcttttggaggaggagaccaggcttcttttactcagcat

SEQ ID NO: 389867 - DNA, 335 bp, Homo sapiens
gttgtcaatattcaatgttatcctaatcctgtcctatataatttttttatctattcaacaaatgctattaattgagcaccaaggatacctccgtgaacatgaaagacagtctgcaccttcatggaactcacagttgcttggatttaagatcaaacaaataggccaggtgcggtggctcatgcctgtaatcccaacactctgggaggccgaggcaggcaaatcacgaggtcaggagatcgagaccatcctggctaacatggtgaaaccccgtctctactaaaaatacaaaaaaactagctgggtgtggtggcgggcgcctgtagtcccagctactt

SEQ ID NO: 389868 - DNA, 353 bp, Homo sapiens
gcctcccgaagtgctgggattacagccatgagtcactgtgcccagcctataattaagtttttaacacaataaatctgttttactgcaagaattaatagaattggcctagcacgtggcatgccacattccttcactggggggggctgctatattattactagtcctatcactggtactgtaagacatagaactgaagtgtttgttacacgaagaaacaagaatatgccaggtgcggtggttcacccctgtaatcccagcaccttgggaggctgaggtgggaggatcacttgagctcggaagttcgagaccagcctgggtaacatggcgaagcctcatctctactaaaaatacaa

SEQ ID NO: 389869 - DNA, 219 bp, Homo sapiens
ggcctccaagtgctgacacggccttctgcctcccctttaatgatatagtctgagaacgtgaaacaggtattgttttagcctactatccgttcactcacatttactgaacatctactaggtgtcagatactggggctatagcagtggagacagacaagatgatgtgtttgagggaggatgggaaggaacagaagtgcttctttaaaagtgatgacattgg

SEQ ID NO: 389870 - DNA, 6097 bp, Homo sapiens
  misc_feature (816)..(816): n is a, c, g, or t
  misc_feature (1379)..(1379): n is a, c, g, or t
agctctgctcatgtgctttgcctgctttcccatggcaggctttttattggttaaataaagacacaaacttttcatcagtctttgcaaatacttggttccggcaagttcttggcccttcccaggcttggggctgccggctcacggttcttctctctgcatttcagccaggcccccatatgctgggtttgcaggtcacgaccacccatgacggctgtgctgcgtggggtgcagttccccgtgggcgccgagggtggtgtggggctgcctctcgctcgctccaccagccacccgagggcccgtgtcctggtcgtggccgcgtgtgctctgctgtgtgggtggtcagtcctccccaggggccacctggatggtgtccactcctgccccatggcaggaagtcccagcggcacctggccacgtccctctaacatgtttctggaagtgggattctaggctggagcctcatagcgggcagatactgccccctggccatgagccatgacagttggttgatgggacttgaaggggcctctggacagtgtggctgcagccctggaccctaggagaatagcagccgtgatggggggcagggaccccactttctgggtgggagtgaggagggccggctgctgccccttgctgcagtcatcttcagtcactttcccggccgccacggccccctcctggcttcttgctctcagcagaggggacaagacccttgtgagggtgggcacaggcactccaattgtttggggccttcgctgtcccttgctgtctgtgctggtctttccaggcatccccaggccgtgtgtgtcagcnggtggaggctgggcacctctcacccacccaagctgaagcggcctcacagggggtggcaccaggtgtttctccagctgaacaagctcgccctggaacccccaccctgaaagggctactgcccccatgagaggagcttctagagatggtggccagccttgggggcccggtggagatgtgttcgcggggtcctggtctgattctgtcttggaaggaacatcgggcccctgagaggtcagagcagtggccggcccacggctccgctcaggcgccacggcggctcctttctgtttcttgtagtcactgagttcgaggttcccacagggaggaggcttcctgtggctccgccgtcagggagcagtggggctgccccagcctctgggggctttttaggtgctctgaggcgatctgggtgtggcctggccggtgtgggcagctttgcccttcgtctgagaccccgagccctggggcaggatgaggggtgtggggagagtttgctttttccagagacgtttatctgtttttttttagacggagtctcgctctgtcgcccaggctggagtgcngtggcgcgatctcggctcactgcaagctccgctcccgggttcacgccattctcctgcctcagcctcccaagtagctgggactacaggcgtgtgccatcacactcggctaattttttgtatttttagtagagacggggtttcaccgtgttagccaggatgctctcgatctcctgaccttgtgatccacccacctcggcctcccaaggtgctgggattacaggctgagccaccgcactggccagcgtttatctttaaatgtgccttggacctggcccctggctctttgggagggagagtccttggcaggccccgttgcctccaccccaccagtgcaccttggctcctggtcactgcccaccctccctgcccgggcaggaattcttacaggccctacactcctgaagggaaatcaggctggtcctggggcaggcagcctctcagagctgttgagaattgagcaatctccttgtgctctttcaagctgttcttttctttggttcacactgagcaagggctggttgctccgatagggagaagacgtgaggagtggcatttactgtgattgagcacagggcctgtggactctcccattcacgcagccacatttcccaaaaagaagtggtcctgctccccaccccccgacccccactgcagcgccacctgcctttatctgtacttggagggacagcgcacaggctgtggctggctaccccaggtggctccacccagctctcagaagttcacctgctgcactcagaggccgtttacttgaggtttgatatttatctccaaaggaagggctgccccgactggcctggaccctccagggagttcagcaagccggaaatgcgtgtctgctgctctcctggcccctgggccacctgcttctgtggccctgggattggggagccagggctgagggcctgtagggccccctgtctgtgcctctagaggccctgagccacctcctgcagtgttttagatcccataagcaagagacagaattgtgcatggatggtgagaaaacatgaagctttttatttgtaaacagaaaatggcagggctcactgtgtggggctggggacagcgctaggcctgctttaggccgtgcaccccaacctggggtgttccaccaagaggggtacagtggcctccactgtgagtatgtggccatcctctggctcctgattgctgagttcctgattgctgtctttgcgtaacttaggaaccccgatgaagagcccgtgctcatagctccgttcctgacatgttcaggaacgcctctgttgaggtttttctctttggttctggaattcctgggtccctttgacccctgatgcgtttgttttgggtgttgatgagcactggagctgcttccccacagggatggggcattggggagattccgacacagcagggccctcacccaggaggctgctgtgggtgctggagcggttgcttccatggagctgggattcctctcatttggggctgtaggaaggggtctttcctctctgtgctaacagttgtttgtttaaaaagaaaggctgtttaaacctttcaaacttaaaacttctttttttctttggagatggagtctcaccctgtctcctcccaggttcaagtgattgtcatgcctcagcctcctgaatagctgagattacaggcacatgctaccatgcccagctaatttttgtagttttagtagagacggtgatatggtttggctgtgtccccacccaaatctcaacttgaattgtatctccaagaatttccatgtgttgtgggagggacccaggggaggcaattgaatcatcgggctggtcttttctgtgctattctcgtgatagtgagtaagtctcatgcgatctgataggtttattaggggtttctgcttttgcttcctcctcattttttctcttgccgctgccatgtaaaaagtgcctttcaccacccgccatgattctgaggcttccccagccatgtggaactgtaagtccaattaaacctctttttgttcccagtttcgggtatatcttcttcagcagcgtgaaaatggagtgcacacacacgtcagcactgtgggcgcacacacctgcactcacacattcatcaggacccatgggcacacgtgcacacacacgtcagtcctgtgggtgcacacacctgcactcacacattcatcaggacccatgggcacacgtgcacacacgtcagcaccgtgagcgcacacacctgcactcacgcacacacctgcactcacgcactcaggaccgacggacatacgtgcacacacacatcagcaccgtgggcgcacacacctgcactcaacgcactcgtcaggacccacgggcagatgtacacacatgcaccagcacccgtggacacgtgcacgcacacatcagcacccatgggcatacatggatgcacacatcagtaccatgggcacacacacatgcacccactcccgatggcttcggcttgctgggtgcctgcttcgccctcgggtgagcaagtctggaggcaggcacttggggtggggccacagtatggttcttaggagcccagtgtcccctggacccacttgctcccagccttgggtcccaaagtgctgctcccactggtctctgtgccccacccatcatgggcagggctgtctgaacagggcagagtcacgagtgatgcaagggtggggtgtggaggccttgcctagaggcagcagccagctctggcttggctgggccttaccttcactgtcctgctgtgagacgcaggagccctgggggaggacggcagtctgtatcagggcagtggtgaaactgcagattcctaaatgtgatctggagacgactcttgctggagaaatctacccaggtcccttgggtctgtccctcccttcaccctccacagtcagggacaggctgcgtggtgtgcctccccatctgtgcgtggcctcagcgcagcaggcctgtcctgcccattgctaaaggtagagcccggcagattcattgtgtggtgagggcttccccagacccaccaactcctgtgtcttcccatggtgagaagggtggggtctctctggggcctttttttttttaggaagtcactgatgccactcaggtgggtgcccagctccccacctgatctctggagtggccccttctgctggaggctgccccaggctggatgccgtggcctgcagaccccccttcttgcagtccctgggcaggcagcacccatgcgcacacgtgcacacaggccgtgagcactgccctgtgagccaggtggtggtggggggtgttggggctaaggtttggttagggcccgagtgcttgcgcacccccccatccaatttcccatggtgctgggatgctgccgcctcctggaccctggcgttgaagtgccaccttcatctccctccccagacagtaagctccagacaagggcaggctgtggccgtcactctggccagctgctcgggggcttggtggctgctgggtggtcgcctggactctgccctcctgtctcctggtgtcccggaggggccttgctgggctgggccctccaccgccccattgggcgcctgactctcagggcgcagtcagttctttggggatggccctgatctctgagcgggactgcctctggcctttcttctgcatcccctacggaacagcagcctgctagacgccctgaggaggcaggctgaggggtggaaggggcgtggccgtgcccagcagagaccaccctctgatgacggtgggcgtcctttccagcccctctcggggcatcgcttcatcccttcccccatttccttcctggccctgctctccaagtcttgtgtgtgtggtggggcctggcttccctcccggcctctcgcctgttcccgcccatccctctctggttctctcaggcctcctctgggcttgccaggaatgtaggggaattagggggagggggacacaggaaatgcctcccctcctctgacaacagctccagctgcagggggaggggggaggggagagcagagtgggtgagacgagggagggctgaaggggggagtcggcttggggggagagtgttctcctgcccacccaggcactgggcgtggcccagccccacagacagaacagttctttcttccttattttattttttattagagacagggtctcactctgtcgcccaggctggagtgcagtcgtgtgattggcctcaagcgattctcccacctcagccttccaaagcactgggattacagcagtgagccagtgtgcccagcctcttcctaagtttacaccagtgtgggcatccagtgaggggaactggcctgtgatgcggtggtccttgtgacatgtcaggcagttttagagtagggtttgttaaaacatgggttaaattgggccccacccccagccctccactcctcagccattcaggagaagcgcgaggcatgggtgcgcgaaaattctgagtctgccttccacctgaaccccctctggaaggtctgaccacgggctgggtgtggtggctcatgcctgtaatcccagcacttttgggaggccgaggcgggtggctaatgaggtcaggagttaaagattagcctggctgatatggtgaaaccacgtatctactaaaaaaaaaaaaatacaaaaattagccggcattgtggcaggtgcctgtagtccccagctacttgggagggcgaggcaggagaa

SEQ ID NO: 389871 - DNA, 5090 bp, Homo sapiens
  misc_feature (816)..(816): n is a, c, g, or t
  misc_feature (1379)..(1379): n is a, c, g, or t
agctctgctcatgtgctttgcctgctttcccatggcaggctttttattggttaaataaagacacaaacttttcatcagtctttgcaaatacttggttccggcaagttcttggcccttcccaggcttggggctgccggctcacggttcttctctctgcatttcagccaggcccccatatgctgggtttgcaggtcacgaccacccatgacggctgtgctgcgtggggtgcagttccccgtgggcgccgagggtggtgtggggctgcctctcgctcgctccaccagccacccgagggcccgtgtcctggtcgtggccgcgtgtgctctgctgtgtgggtggtcagtcctccccaggggccacctggatggtgtccactcctgccccatggcaggaagtcccagcggcacctggccacgtccctctaacatgtttctggaagtgggattctaggctggagcctcatagcgggcagatactgccccctggccatgagccatgacagttggttgatgggacttgaaggggcctctggacagtgtggctgcagccctggaccctaggagaatagcagccgtgatggggggcagggaccccactttctgggtgggagtgaggagggccggctgctgccccttgctgcagtcatcttcagtcactttcccggccgccacggccccctcctggcttcttgctctcagcagaggggacaagacccttgtgagggtgggcacaggcactccaattgtttggggccttcgctgtcccttgctgtctgtgctggtctttccaggcatccccaggccgtgtgtgtcagcnggtggaggctgggcacctctcacccacccaagctgaagcggcctcacagggggtggcaccaggtgtttctccagctgaacaagctcgccctggaacccccaccctgaaagggctactgcccccatgagaggagcttctagagatggtggccagccttgggggcccggtggagatgtgttcgcggggtcctggtctgattctgtcttggaaggaacatcgggcccctgagaggtcagagcagtggccggcccacggctccgctcaggcgccacggcggctcctttctgtttcttgtagtcactgagttcgaggttcccacagggaggaggcttcctgtggctccgccgtcagggagcagtggggctgccccagcctctgggggctttttaggtgctctgaggcgatctgggtgtggcctggccggtgtgggcagctttgcccttcgtctgagaccccgagccctggggcaggatgaggggtgtggggagagtttgctttttccagagacgtttatctgtttttttttagacggagtctcgctctgtcgcccaggctggagtgcngtggcgcgatctcggctcactgcaagctccgctcccgggttcacgccattctcctgcctcagcctcccaagtagctgggactacaggcgtgtgccatcacactcggctaattttttgtatttttagtagagacggggtttcaccgtgttagccaggatgctctcgatctcctgaccttgtgatccacccacctcggcctcccaaggtgctgggattacaggctgagccaccgcactggccagcgtttatctttaaatgtgccttggacctggcccctggctctttgggagggagagtccttggcaggccccgttgcctccaccccaccagtgcaccttggctcctggtcactgcccaccctccctgcccgggcaggaattcttacaggccctacactcctgaagggaaatcaggctggtcctggggcaggcagcctctcagagctgttgagaattgagcaatctccttgtgctctttcaagctgttcttttctttggttcacactgagcaagggctggttgctccgatagggagaagacgtgaggagtggcatttactgtgattgagcacagggcctgtggactctcccattcacgcagccacatttcccaaaaagaagtggtcctgctccccaccccccgacccccactgcagcgccacctgcctttatctgtacttggagggacagcgcacaggctgtggctggctaccccaggtggctccacccagctctcagaagttcacctgctgcactcagaggccgtttacttgaggtttgatatttatctccaaaggaagggctgccccgactggcctggaccctccagggagttcagcaagccggaaatgcgtgtctgctgctctcctggcccctgggccacctgcttctgtggccctgggattggggagccagggctgagggcctgtagggccccctgtctgtgcctctagaggccctgagccacctcctgcagtgttttagatcccataagcaagagacagaattgtgcatggatggtgagaaaacatgaagctttttatttgtaaacagaaaatggcagggctcactgtgtggggctggggacagcgctaggcctgctttaggccgtgcaccccaacctggggtgttccaccaagaggggtacagtggcctccactgtgagtatgtggccatcctctggctcctgattgctgagttcctgattgctgtctttgcgtaacttaggaaccccgatgaagagcccgtgctcatagctccgttcctgacatgttcaggaacgcctctgttgaggtttttctctttggttctggaattcctgggtccctttgacccctgatgcgtttgttttgggtgttgatgagcactggagctgcttccccacagggatggggcattggggagattccgacacagcagggccctcacccaggaggctgctgtgggtgctggagcggttgcttccatggagctgggattcctctcatttggggctgtaggaaggggtctttcctctctgtgctaacagttgtttgtttaaaaagaaaggctgtttaaacctttcaaacttaaaacttctttttttctttggagatggagtctcaccctgtctcctcccaggttcaagtgattgtcatgcctcagcctcctgaatagctgagattacaggcacatgctaccatgcccagctaatttttgtagttttagtagagacggtgatatggtttggctgtgtccccacccaaatctcaacttgaattgtatctccaagaatttccatgtgttgtgggagggacccaggggaggcaattgaatcatcgggctggtcttttctgtgctattctcgtgatagtgagtaagtctcatgcgatctgataggtttattaggggtttctgcttttgcttcctcctcattttttctcttgccgctgccatgtaaaaagtgcctttcaccacccgccatgattctgaggcttccccagccatgtggaactgtaagtccaattaaacctctttttgttcccagtttcgggtatatcttcttcagcagcgtgaaaatggagtgcacacacacgtcagcactgtgggcgcacacacctgcactcacacattcatcaggacccatgggcacacgtgcacacacacgtcagtcctgtgggtgcacacacctgcactcacacattcatcaggacccatgggcacacgtgcacacacgtcagcaccgtgagcgcacacacctgcactcacgcacacacctgcactcacgcactcaggaccgacggacatacgtgcacacacacatcagcaccgtgggcgcacacacctgcactcaacgcactcgtcaggacccacgggcagatgtacacacatgcaccagcacccgtggacacgtgcacgcacacatcagcacccatgggcatacatggatgcacacatcagtaccatgggcacacacacatgcacccactcccgatggcttcggcttgctgggtgcctgcttcgccctcgggtgagcaagtctggaggcaggcacttggggtggggccacagtatggttcttaggagcccagtgtcccctggacccacttgctcccagccttgggtcccaaagtgctgctcccactggtctctgtgccccacccatcatgggcagggctgtctgaacagggcagagtcacgagtgatgcaagggtggggtgtggaggccttgcctagaggcagcagccagctctggcttggctgggccttaccttcactgtcctgctgtgagacgcaggagccctgggggaggacggcagtctgtatcagggcagtggtgaaactgcagattcctaaatgtgatctggagacgactcttgctggagaaatctacccaggtcccttgggtctgtccctcccttcaccctccacagtcagggacaggctgcgtggtgtgcctccccatctgtgcgtggcctcagcgcagcaggcctgtcctgcccattgctaaaggtagagcccggcagattcattgtgtggtgagggcttccccagacccaccaactcctgtgtcttcccatggtgagaagggtggggtctctctggggcctttttttttttaggaagtcactgatgccactcaggtgggtgcccagctccccacctgatctctggagtggccccttctgctggaggctgccccaggctggatgccgtggcctgcagaccccccttcttgcagtccctgggcaggcagcacccatgcgcacacgtgcacacaggccgtgagcactgccctgtgagccaggtggtggtggggggtgttggggctaaggtttggttagggcccgagtgcttgcgcacccccccatccaatttcccatggtgctgggatgctgccgcctcctggaccctggcgttgaagtgccaccttcatctccctccccagacagtaagctccagacaagggcaggctgtggccgtcactctggccagctgctcgggggcttggtggctgctgggtggtcgcctggactctgccctcctgtctcctggtgtcccggaggggccttgctgggctgggccctccaccgccccattgggcgcctgactctcagggcgcagtcagttctttggggatggccctgatctctgagcgggactgcctctggcactcgtaaagtgctgggattacaggcgtgagccagctgcacccggccccatagagagatgcg

SEQ ID NO: 389872 - DNA, 2811 bp, Homo sapiens
aggatcccgggcgatgtcgcgtgcatgtaaaaagtgcctttcaccacccgccatgattctgaggcttccccagccatgtggaactgtaagtccaattaaacctctttttgttcccagtttcgggtatatcttcttcagcagcgtgaaaatggagtgcacacacacgtcagcactgtgggcgcacacacctgcactcacacattcatcaggacccatgggcacacgtgcacacacacgtcagtcctgtgggtgcacacacctgcactcacacattcatcaggacccatgggcacacgtgcacacacgtcagcaccgtgagcgcacacacctgcactcacgcacacacctgcactcacgcactcaggaccgacggacatacgtgcacacacacatcagcaccgtgggcgcacacacctgcactcaacgcactcgtcaggacccacgggcagatgtacacacatgcaccagcacccgtggacacgtgcacgcacacatcagcacccatgggcatacatggatgcacacatcagtaccatgggcacacacacatgcacccactcccgatggcttcggcttgctgggtgcctgcttcgccctcgggtgagcaagtctggaggcaggcacttggggtggggccacagtatggttcttaggagcccagtgtcccctggacccacttgctcccagccttgggtcccaaagtgctgctcccactggtctctgtgccccacccatcatgggcagggctgtctgaacagggcagagtcacgagtgatgcaagggtggggtgtggaggccttgcctagaggcagcagccagctctggcttggctgggccttaccttcactgtcctgctgtgagacgcaggagccctgggggaggacggcagtctgtatcagggcagtggtgaaactgcagattcctaaatgtgatctggagacgactcttgctggagaaatctacccaggtcccttgggtctgtccctcccttcaccctccacagtcagggacaggctgcgtggtgtgcctccccatctgtgcgtggcctcagcgcagcaggcctgtcctgcccattgctaaaggtagagcccggcagattcattgtgtggtgagggcttccccagacccaccaactcctgtgtcttcccatggtgagaagggtggggtctctctggggcctttttttttttaggaagtcactgatgccactcaggtgggtgcccagctccccacctgatctctggagtggccccttctgctggaggctgccccaggctggatgccgtggcctgcagaccccccttcttgcagtccctgggcaggcagcacccatgcgcacacgtgcacacaggccgtgagcactgccctgtgagccaggtggtggtggggggtgttggggctaaggtttggttagggcccgagtgcttgcgcacccccccatccaatttcccatggtgctgggatgctgccgcctcctggaccctggcgttgaagtgccaccttcatctccctccccagacagtaagctccagacaagggcaggctgtggccgtcactctggccagctgctcgggggcttggtggctgctgggtggtcgcctggactctgccctcctgtctcctggtgtcccggaggggccttgctgggctgggccctccaccgccccattgggcgcctgactctcagggcgcagtcagttctttggggatggccctgatctctgagcgggactgcctctggcctttcttctgcatcccctacggaacagcagcctgctagacgccctgaggaggcaggctgaggggtggaaggggcgtggccgtgcccagcagagaccaccctctgatgacggtgggcgtcctttccagcccctctcggggcatcgcttcatcccttcccccatttccttcctggccctgctctccaagtcttgtgtgtgtggtggggcctggcttccctcccggcctctcgcctgttcccgcccatccctctctggttctctcaggcctcctctgggcttgccaggaatgtaggggaattagggggagggggacacaggaaatgcctcccctcctctgacaacagctccagctgcagggggaggggggaggggagagcagagtgggtgagacgagggagggctgaaggggggagtcggcttggggggagagtgttctcctgcccacccaggcactgggcgtggcccagccccacagacagaacagttctttcttccttattttattttttattagagacagggtctcactctgtcgcccaggctggagtgcagtcgtgtgattggcctcaagcgattctcccacctcagccttccaaagcactgggattacagcagtgagccagtgtgcccagcctcttcctaagtttacaccagtgtgggcatccagtgaggggaactggcctgtgatgcggtggtccttgtgacatgtcaggcagttttagagtagggtttgttaaaacatgggttaaattgggccccacccccagccctccactcctcagccattcaggagaagcgcgaggcatgggtgcgcgaaaattctgagtctgccttccacctgaaccccctctggaaggtctgaccacgggctgggtgtggtggctcatgcctgtaatcccagcacttttgggaggccgaggcgggtggctaatgaggtcaggagttaaagattagcctggctgatatggtgaaaccacgtatctactaaaaaaaaaaaaatacaaaaattagccggcattgtggcaggtgcctgtagtccccagctacttgggagggcgaggcaggagaa

SEQ ID NO: 389873 - DNA, 469 bp, Homo sapiens
ccttttgtgtcctttcacaatccctcttctgaaaaaatgattatcagaactgtcatcctgatgcttcccttcctaactgctttttatggatgattgtgaccactttttttcgtctgtattcagcagtagtatacacctgtaatctccttttttcatctcattttccttcccctgtggatagaatcatgctcagaaataaaaggaaattaaagctttccctggattctgttattttttaaattgctctccagtggttctttttccagatttctctaaaggaaggctattcccttgctattcagagctgtgtccaaggaccagcacaaacatcacctgagtgctcatgagaaatgcagactcccatacctgctgagtcagactgtgtactttcaagaagcaggaactggccagttcctgcttcttgaaaggcaaggaggaggagactggctcacacctctggaggttggtg

SEQ ID NO: 389874 - DNA, 665 bp, Homo sapiens
taattaaaatatgcataagtctttgaaagatttgtataaattttccacatgggaaagaagttattgtcacagtcagaagagatacaatatgtcatgttctcctgttattgttcgtgactaaaatacaagcaaataatatattctacatatgctatgccacaaatgttgcctctaatgaaatattgactcaaggatatctactgtaacatgtacatatataagaattgataggcaatgaaatatgtgatagttaaagacattatattttaaaaattttttattcttattgtactcccatttcaatcaatttaaagttttaaaattctgagtcatgtgttttggcaatcaaatggtctgtaactttggaaatttggtagcatttccaaaactttgaacatactcaaatgcttattttcatttaaaacaaagattttttaaaatgttgtatagtctgagacaaagacttaattttcagctgactaaaatttgtgcatgtaatttattcatcattgatggaatttaatcagaaataactcaaatatgaatcagaggaagaaataaccaataatatatctaaattaacattgttcaatatagtaatttcggtttttgtaatctgcagacctgttcgccttattcctattttgaaacatgtaggatatatg

SEQ ID NO: 389875 - DNA, 398 bp, Homo sapiens
tctcagtctgcagtacagtggtccccccagaaaccacaggtagtacaaaccctgtatatactgtatttctttctagagatacacctgtgataaatttatcaattaggcacagtaagaggttcacaacaataactgaaatgaaacggaacagttagaacagcatactgtggttgcgcagtggctcccgcctgtaatcccagcactgagaaggcggaggtgggcggatcgccgtagcccaacagcctgtttgttttctctataaaaacaaatcagtatactataatacaaattgtgattgcggtcagaaaatatcttattgtattgtgctgcagataacaaacagcagaaaactaacctttggctaagaggggactattgtatcccttaatctgaattct

SEQ ID NO: 389876 - DNA, 430 bp, Homo sapiens
tgggctgaggcttcccggaccacggaggatccgcgctgtcgagggcaggacccaggagggggaggaagcagaggatgctcggcgccttcttggctccgcccttagccccgccctactgcggcgtttaagggtctcttagcaggtggctacactggatccaaagtcgggggagtgttacggcagggaacactcgcagaccgcctagtctaggccctcattatggggaaactgaggaacagaaaggtcctgtttctaagtcttacattaccaagactgaggtgcgggggcggtcctggatcccccgccccaaggctgggaggggcacgcctcggaagggaggtttggggtcggtggtttcacagtgagtgtgtctgaagccaaatggtcggaaaccgttacccgctctcctaggcccggctagtggggaccc

SEQ ID NO: 389877 - DNA, 849 bp, Homo sapiens
cacattagactcccaagaccacagggcaaaaatccatctctggagcggcttgtaacaacagctcagtccaagccctggcttcttaggtccctattctgacacaaggggatcccacagcacccccaccacctcaccaccatgcttgcggtgctgtgacacaccatggtctgcccttggagcaagtcccaaaggccagcctcatcccttcagaagcttccagtattgaactgaacatagtctctctggctctccaagcccctgtctggcccttttctttcccacttgggcccacatgggcccacatgggctcctgtggcttacttagctgtccctttcactgatgttttttcagggaaggcaaatgcaaactcattttaatcttagtcccataaaaacagactcagaaggtaaattgcttcccacccaggcagctggcatcaagtgcactggcgtggatggtgacatatttcagtgtgcaaatgcacaggtgtggacagcatccatctccatgggtgctgaatttcctaacctgcctctcttcacctcagagaacaaaggaaaagcctccttaagaagagggcttgaggcagggcacagtggctcacgcttgtaatcccagcactttgggaggctgagacaggcggatcactggaggtcaggagtttgagaccagcctgcccaatgtgttgaaacgttgtctctactgaaaatacaaaaattagccaggcgtggtggcaagcgactgtaatcccagctactcgggaggctaagacagggagaattgcttgaacccaggagacagaggttgcagtgagccaagattgtgccactgcactccagcctgggcga

SEQ ID NO: 389878 - DNA, 422 bp, Homo sapiens
gagtaaaaaaacagccaagcatctttccagtagccccattgaaattgtgaatccgtcctggtctccctaaggactgcacacattgatattcaaggttggtggtcattagatatggaacagaactgaaataaccatggtagaactgaatgtgtaatgttggctttattctagctggtactacatggcacacagtttcaaaacataatttcacctactggaaagctcagacctgtaaaacagagcatgggaactgctggtctaaatgcagttgttcctgctcaaagagacctctggccaaactggcaagcagttaaagttttctttcagggccttcctctctatggcctcaacttcctcctcttctcttcttccagcaacttcccctttcatcattcctttccctggggacttggcattcagtg

SEQ ID NO: 389879 - DNA, 362 bp, Homo sapiens
aaaggggaatgataataacctacaacatagaattgtcatgaagacgaaatgaaaaaatatatgtaaagttatttgaatagctgatggtgcatggcaggcacttaataaatactagctattatcattactgttacaggtctgaaatccagcttcacaaattttgtcatctggtgctatgcaataccaaagaaaaaaaagactacaaccacttttaagcagtgattcttttactctctcccttttaagagacactattctaagatgattgtattaccaaacaaaaattaagtttatttttaaataaatgctttttctcttacttttatcagttctgatcacaatattatgagcacgtcatcata

SEQ ID NO: 389880 - DNA, 440 bp, Homo sapiens
tactgagttaagtaagacaatttgtgtgccttcaaaactcactctagagagaaagaaaggtaggcaatgatatgtaaatatcttgcttgtttaataaaaaactgacaaaggaaagcgtttggaggataaaaaaagtttgaagtccattgaggaaaagaagaaagttacttctgctaacccttcccccaaccctcaaatgacttacaatatggggctggagaaagtgggtgccaggaaaggggcaaaacctgcagccagctgagaatggtggagagacatgaagaccagagagggcactagggcaagttcatccagtgtgaacgtagcccttttaaataatctgatgtatacatatgtaactaacctgcacaatgtgcacatgtaccctaaaacttaaagtataataataaaagaaaaaaaaacttaaaaaataaataaat

SEQ ID NO: 389881 - DNA, 874 bp, Homo sapiens
ggttgcagtgagcccaaatcactgcactccagcctgggtgacagagcgagacacactatcttaaataaataaattaattaaaaatttcctctcttcaaatgtaacaagacacatagggacatgtctgtattttataccacttcataaaatttaacatgcaagactctaatatatgataattcttccctgtgagaaacgtgtgtgtgtgtgtgtgtgtgtgtgtgtgtaaaagattgctgaaaaagataggttagtcctaagatagagctggatatcttgaattaaatgaaaatatacccagacacatctagcttatgacttaagtttgttctgtgtgaaacagaaatgaacccggcatagagtagcgctcacggcgcatatgcagcacagagtgcactcacattttattgcatgtgcaagagccactgttggtctgcattcagatgacccacattttatttctagcagttgttttttattggcagatgaacgtcctaaaatcagcaagttcagcagtaacgtatattttgataattgtgttcttgagtgtcatggtttgttttattgtcctaccgccagtctctgaacatatgaaagacaattagtgaacccagtcattaagcttggagatgaataaattcaagctgaacttcattttgttaaactcagcctgtgccatttggatgtgttggcagagcttggggcagacagccatcagataggaaatgagagctgttagattagaaacaggcccgcccaagtccacttgctaatgtgggtaggaaattatacttggcataggaaacaatcctgaaaatcatacacttagcagtttttattggttctttatgtttccatgactgtttgaggagat

SEQ ID NO: 389882 - DNA, 220 bp, Homo sapiens
acgtcgccgtccccgcgcgcgccctggtaacggcggctcccgcgtcctcctccatgtccccgcctatccccgccgcagcccgccccgtctcctcctccctccgcagcctcgccgagtcctcggtgcgggctgcgagcgggacccgcggagctgcgctgtcctcgacgcctccgccaggcgcgggccgaggagcctccaagagctggcccggcccccggcc

SEQ ID NO: 389883 - DNA, 820 bp, Homo sapiens
tgaggagcggctgggggcgagggccggggaaggggcctgcagatgccgcctccgcctcccttccttgtccggggcccccatggtgtcggggagcaggaggaatcaatcaggataatgaagccgcagcctgccacgcactgcgggggcactgaggagcgggggccggtgccaagtccgccagacggttcggaggagcggagcccggcgcggcccggcggcggcggcggcggcggcggcggcggcgatggcggaaacccgaaggccgcgcgctaaagcaggacgcagctccgcgcagggcgctggcaaccgcgccttggcaaccgggacgcccgagagaaatcttaaagctgcagtggcctctttcccctccattgcggtcgccgccaggaccccaggggaaatggtcgtgcgggcaaaggttgctggtgggggtcaagctctgagcctctcaggacttgggaggccgactcatacactcgctcacttatttattttattttattttattttattttgagacggcgtctcgctctattgggtaagctggagtgcattggcgcgacctcggctcgctgcaacctccgcctcccgggttcaagcgattctcctgcctcagcctcccgagtagctgggattacaggcgcccgcaccacgcccggttaatttttttggactttaagtagagacggggtttcaccatgttggccaggctggttttgaactcctgacctcaagtgatctgcccgcctcggcctcccaaagtgctagcattacaggcgtgcagccgcgcctggccgtatttattaaatgtgtgttgaac

SEQ ID NO: 389884 - DNA, 468 bp, Homo sapiens
gcaaattttatcgtgttgcaccaaaaatatttctaacttaaagcatgatgcacagactgcttctaggaatgaactacaaatacaacaaatatggcattttttttctttttcattccttattgtaatgggatttcttctaataaaattggggtgagaggcgatagccagaattattatcaaatgtaaatattgtcatcactcttaggaagtatctttgtatactttattaccttggtgtcacctgtcttttcagaagaagagtctgcagtagcacaggaaatgttgttagcttgtgtccaatgaatacaatggacatactaccagaaacttgccctgagcttgccaatgaaaacatttattgccatatgtaactgcagcatcattaaaattacttagtctttcttaagtttatcatttagagaaagataaggaaaaaagttggaaattctacataaaatgtaaaatatc

SEQ ID NO: 389885 - DNA, 341 bp, Homo sapiens
gaatttatccattaacaaagtttttagacagagttgtttatatctactcaaggtgtcattatgcacatctgtttcttgtacctcaggttcatcctatagaaaatcatgctaactcacaagtcatgcagtgttttcaaaaagacaagtcatgcagtgttttcaagttcagagagtagcaaaggatgcaaatctaatttctttaccatttgctaccatctgaagttagtaacattttttggctaatcaccaagcacccagaaagaaagaaatagagcaaatttggtgcatcgtttgtcttccgtatctcctttcgaagtcatttccacaggataagtgccaaa

SEQ ID NO: 389886 - DNA, 369 bp, Homo sapiens
taagaaacatattttttcacaatctcccatggacaaaagcactgttatgagaacctgggagtccactggaaaagtgccagcagcccaatgggataaataatccaaaaatagacacactgaaaaaagtaagaagaacagttttactttatcagcatcaccccttttcccaaggcagtaaagctcagtgccaagagagaccctcttaatccatgatttctctaacggagaaaactgaaagcgtagtgaattcctaccttccttaatcatgtggaatgctgtctaagaggcatgccccttccaaacctcacagataacatgagaacagtaggtgtaagtatcctgcagatatttaagagtagaaaaaagaaa

SEQ ID NO: 389887 - DNA, 772 bp, Homo sapiens
gaggcgggggtaggaccttcactgacagactgaggagctggaatttacctagaggcacctgggagccattgagaattttttagcaaagatgtagcacagctacaatcagctgtgtttatttcccagcagaaggaaaatgatttgggggagtctgcgccacacccctaaagattgttcatccttgaagaataatcaagtgattaatgggggttagggaagatgctgtagaaataaattctgaggggggcaaaaagagacctggagcaggggagggaggttggaagagttagacggagaggaagtggcctccaagctgcaaaaaaggctggcagttgcaaacagcccagggtgcatgtgctgagcgctctgtagctactgcccctgtgcactctagaagagctcgctggtgaggtggggcgacaagttgagcctccttgaggctcccacacatggctgtgctacatagacattctgccaggagaagcagcacaaaagacaaaagagattggcttcaggtcagattcatcatgaaagacttcccagggctagtccaggaatccagggcttcagctgatgcacaggaggcgaggcagaggaccagtatgattagggacacaccggctgtatctgaagtgcctggctcccagcccccatcccatcccagatggtgcggcccatcagcaggccatgatggcaccaccataactgggtatcaggcaggaaaccttgcagcagaccagaatgggcccaagattggtgaaggaggaataac

SEQ ID NO: 389888 - DNA, 372 bp, Homo sapiens
acttcctctcattgtactggaaaagcagcgtaaaatctatgtgctgaacctgaaactctcctggcctgcaatccaaggagcctgtcattggctacaccatgtaagtacagtttgtttccaaggccatctctcaccgactttgttcttattaaaataattttttaaataatttttacttttccttcaaaggaagtttttttttagtaaatatgttcatattcccatcataagaagttgaaacaacacaagataaaaattccctggattcttcccagttttcatttactacctctgagataactactattacccatttggagtgtttcctttgtattctttccatatatttacatataaacatatgtgcacttt

SEQ ID NO: 389889 - DNA, 442 bp, Homo sapiens
tgacctcatgatccgcccgcctcggcctcacaaagtgctgggattacaggcataagccaccgcacccggccctgaagagcttttttaaaaactgcccatcccagagacttagtttcatttggtctggggtggggtccaagcatcagtatttttaaaaagtttccggatgattccaatgaacaaccaagttgagaacccctgacctctgttaagtatgccagctaatgtttattgagccctcactgtgtgcttgcagcggtgccacgtgtttcccacggatcatctcattctatcctcacaacaaccccgtggggaattattactagcttcattttatagatgaaaaaaccttcatgcattacggaggctaagctgcccgagttagcagagcttagtaagaggtggagctggttaggaagtcaatgcagggggtctggctcta

SEQ ID NO: 389890 - DNA, 1962 bp, Homo sapiens
ccgtccgcgcaggccctcggtccgctctgccctcggggtcgtggcgcccatccctcccctgttctgctgtcgccgcccggacaggggctcgggagccgggctgggggcaggggctggagccgcgggaccagcgcctgaggtgccccggagaggccatggagctgagcagcaagaagaagcttcacgccctgtccctggccgagaagatccaggtgctggaactcctggatgagtccaagatgtcccagtcggaggtggcccggcgcttccaggtttcccagccccagatctcgcgcatctgcaagaataaggagaagctgctggcggactggtgcagcggcacagccaaccgagagcgcaagcgcaagcgggagtccaagtacagcgggatcgacgaggctctgctctgctggtaccacattgcccgggccaaggcctgggacgtgacggggcccatgctgctccacaaagccaaggagctggccgatatcatgggccaggacttcgtgcccagcatcggctggctggtccgctggaaacgccgaaacaacgtcggctttggggcccgccatgttcttgcgccttcattcccccctgagccacctcccccggggctcacatcccaggctcagctgcctctttccctaaaagacttctctccagaggacgtgtttggctgtgctgaattgcccttgctgtatcgggcagtgcccggcagctttggtgcatgtgatcaagtacaggtgctgctgtgtgccaacagcaggggcaccgagaagcggcgggtactgctgggtgggctccaggctgccccgagatgcttctttgggatccgcagtgaggctctgcctgcctcctaccacccggacctgggcatcccctggttagagtggttggcacagtttgaccgggacatgggacagcagggccgacaggtggctttgctgctggctgcccgagtggtggaggagctggcaggcctgcctgggctctaccacgtgaagctcttgcctctggccgcctctagcaccacgcctcccctgcccagctcagtggtccgggcctttaaggcccattaccgacaccggctgttgggcaaactggctgccatccaaagcgagagggatggcacctcgctggccgaggccggggcaggcatcaccgtgctggacgccctgcacgtggcgtctgccgcctgggccaaggtgcctcctcagctcattttcagcagcttcattcaagaagggctggctcccggcaaaacgcccccgtcctcgcacaaaacctctgagatgccaccagtccccggcgggctgagcctggaggagttttcccgctttgtggacctggagggtgaggagccaaggtctggagtatgtaaggaggagataggcactgaagacgagaagggggacagagagggtgcctttgagcccctgcccaccaaagctgatgccctccgggccctgggcaccttgaggaggtggtttgaatgcaacagcacttctcctgagctattcgaaaaattctacgactgtgaggaggaggtggagcggctttgctgcctatgaaggcgccttcactgcttgccagagccccttcctctcttgtttcccatggaaacggcctcttcagaaggcagatcgggctgtctctttcctgtggaaatagaactgtcgtaaaggtgtagaagggagagaagttgggacaccaagtctgagcttggagtggcagtcgtccaaaccccaggaagagagctctaaagatggggcttcgggggtaggaatccaggatgcttagtttctagaccctgcttgaaagttctagagcctttgaaagggagttagtctagaggcagccacttagaaaggtggaatttgggctttttggacagactgcttccttgaactttgtgttaaaaacagttctgcttctgaaaataaagtttttaatcagaaaaga

SEQ ID NO: 389891 - DNA, 1964 bp, Homo sapiens
ccgtccgcgcaggccctcggtccgctctgccctcggggtcgtggcgcccatccctcccctgttctgctgtcgccgcccggacaggggctcgggagccgggctgggggcaggggctggagccgcgggaccagcgcctgaggtgccccggagaggccatggagctgagcagcaagaagaagcttcacgccctgtccctggccgagaagatccaggtgctggaactcctggatgagtccaagatgtcccagtcggaggtggcccggcgcttccaggtttcccagccccagatctcgcgcatctgcaagaataaggagaagctgctggcggactggtgcagcggcacagccaaccgagagcgcaagcgcaagcgggagtccaagtacagcgggatcgacgaggctctgctctgctggtaccacattgcccgggccaaggcctgggacgtgacggggcccatgctgctccacaaagccaaggagctggccgatatcatgggccaggacttcgtgcccagcatcggctggctggtccgctggaaacgccgaaacaacgtcggctttggggcccgccatgttcttgcgccttcattcccccctgagccacctcccccggggctcacatcccaggctcagctgcctctttccctaaaagacttctctccagaggacgtgtttggctgtgctgaattgcccttgctgtatcgggcagtgcccggcagctttggtgcatgtgatcaagtacaggtgctgctgtgtgccaacagcaggggcaccgagaagcggcgggtactgctgggtgggctccaggctgccccgagatgcttctttgggatccgcagtgaggctctgcctgcctcctaccacccggacctgggcatcccctggttagagtggttggcacagtttgaccgggacatgggacagcagggccgacaggtggctttgctgctggctgcccgagtggtggaggagctggcaggcctgcctgggctctaccacgtgaagctcttgcctctggccgcctctagcaccacgcctcccctgcccagctcagtggtccgggcctttaaggcccattaccgacaccggctgttgggcaaactggctgccatccaaagcgagagggatggcacctcgctggccgaggccggggcaggcatcaccgtgctggacgccctgcacgtggcgtctgccgcctgggccaaggtgcctcctcagctcattttcagcagcttcattcaagaagggctggctcccggcaaaacgcccccgtcctcgcacaaaacctctgagatgccaccagtccccggcgggctgagcctggaggagttttcccgctttgtggacctggagggtgaggagccaaggtctggagtatgtaaggaggagataggcactgaagacgagaagggggacagagagggtgcctttgagcccctgcccaccaaagctgatgccctccgggccctgggcaccttgaggaggtggtttgaatgcaacagcacttctcctgagctattcgaaaaattctacgactgtgaggaggaggtggagcggctttgctgcctatgaaggcgccttcactgcttgccagagccccttcctctcttgtttcccatggaaacggcctcttcagaaggcagatcgggctgtctctttcctgtggaaatagaactgtcgtaaaggtgtagaagggagagaagttgggacaccaagtctgagcttggagtggcagtcgtccaaaccccaggaagagagctctaaagatggggcttcgggggtaggaatccaggatgcttagtttctagaccctgcttgaaagttctagagcctttgaaagggagttagtctagaggcagccacttagaaaggtggaatttgggggctatttagaaacggacagcttcctgtaggactgttgtagttgtaagagcggttggttgcgctttggagattttagacagg

SEQ ID NO: 389892 - DNA, 228 bp, Homo sapiens
tatgaggcctcctaataagacattaacaatttcaagaaggtaacattagaacattcaactaatcacgaggaccttctggttgtggaaccttgtgctgaccctgatattatgcacagaatacgtgtccatgaagctgaccctaacattaagaggtcaccactgaaactttcttgattggtgtctgacgataatgagcacagactttcctaaagcagtttattcttctat

SEQ ID NO: 389893 - DNA, 329 bp, Homo sapiens
tttactgtgctcttttctcagttttgaatagcattaccacatcctgaatctcccatttttagagagaacctcccatggctctaagatgcttcaaagcttcaaatcaaccttgcttgaaaaactcttactagatacttcttttaatttctttctctaatagaagaggcctttacctatgtgttggttaatgaaaggtagtttttctgcctcagtgtcaacttggaggtctcttccttgtgtactgtatcgtacttacaactcagaaacagaaggagaaatcacataccaccacaataacactgaatagaataaaaaatcagtgatgggct

SEQ ID NO: 389894 - DNA, 247 bp, Homo sapiens
atccacatgactcagcctcccaaagtgctgggattacaggagtgggccaccaaagcctgtaaagcctggccaaagacttcacttttttagagcagttttaggttcacagcaaaattgaaaggaagatacacagatttcccatataccctctacccccaacacatacacagcctcccccattactcacataccctagcagagtggtgcatttgttacacttgaacttacatggacacatcattatcac

SEQ ID NO: 389895 - DNA, 224 bp, Homo sapiens
ctggtgtggttggccatcatgcgcccactgacccggtgggccaagggcaggtaaggagacttcctcgacagggccacctggatgctggtggggcccaacaggatgaagttggccaacttccattcccggatcctctgcaggctcttgtggacctgggtggggtccacctctccctggatggtgttgaggatggtgatgtaggagtggttggtctggcggtctcg

SEQ ID NO: 389896 - DNA, 189 bp, Homo sapiens
aaactgaatactttctaaagtacagaaacaaataggcctccccttctccctttggaagacccacaggactagccataccctgctaccacccccagccccagccagatcacttccctctgaccaggctggagagtggaaggcaaggacacccaacatgctgcattccagtacagctcttctgagtcaaaa

SEQ ID NO: 389897 - DNA, 413 bp, Homo sapiens
accctaggaggcgtgtgtcagaggaacaggcagaggcaaaggcgttccttagaagtcagtctttaggctggcaggccaggagcccacgctgcgtccccgctctgaggggcagcaaagagctgctttgtggcaaacagaacatgtcccactcctgcagggcggccatctcaggtgcagctcacacccaacatgtgcagaatgggcaggactcggtgcccccagagacttcctgggtgggctccagggcctgagcctcagggtcagggccacatccctcccgctccccaccaggccctccctctgcttctgctctgagctttggtgaagaaagcctgagttggcttcccttacgcggccaggacagctttacagggctggctcccagcaattcgcatggaaggtgctgccaacct

SEQ ID NO: 389898 - DNA, 354 bp, Homo sapiens
tgcacttccaccagctatgtatgagacttcccattgctccacatctccagtattttatgtggtcagtccttttgtttttggtcattttggtggatatgaaatggcatctcagtgtggcttttcattatatttccttgatgactaatggtattctttcaccctttcagtgcttattggccattcatgtatctttgttttttgtgtagcacttcaggtcttttgcccatagatttagtgggttgattgctctttattaatgatttgtagggatgttatatatattctggacacaagattattgttagagatacgtacttcagatattttctcccagtctgtagcttgcctaattat

SEQ ID NO: 389899 - DNA, 309 bp, Homo sapiens
cccaagtgggcagtactagggctagctcggtttagttcaactaatagttattgagactctagggtgtacaaggcacatgctttcaattgaaagtgatggagtggggaggaagagagaagaatatcttgcttaactcataataccaattaggtcagaacccagcaagtttgatattggtaggaaagtaaaatatttggtaaatcatgggataaatcaagaagttacagtctccaatgtctattcatggttgaagcaggagtaatgtaaaaatggacttggagattattgccacagtgataaatagaattt

SEQ ID NO: 389900 - DNA, 725 bp, Homo sapiens
aacggcagctggctgctttctgttggcatgcagtgtggtgtttgttcttttgctctttgcaataaatcttgttgctgctcactgtttgggtctgcactgcctttatgagctgtaacacttattgtgaaggtctgcaggttgactcctgaggccagggagaccacgaacccaccggtaggaagaaactctggacacatccgaacatcagaaggagcaaactccagacacaccatctttaagaactgcaacactcaccggagggtccgcggcttcattgttgaagtcagcgagaccaagaacccaccaattccagatgcagtctcacctgtatatggaatttaataaagccagactcatggaagcagagagtagagcagaggttgccagaagcttggattggaggtaaatggggagctgttggtcaaagggttaaaaaaaggcaagagtgacaaattgtattaaaaaaattatttaaaatgtgttttgacacatcatttttatgataataatgtttatttatacctttaacctaatataattcaaatttatactgacatcctcccatctgctccttctgaaggacaaagtcatctgtcattgatttagagttcccagggtattatttaattagggctttgtaattaataacaacaaggaaacatatttttgacatttttgacaaaaatattttttccccttctagcctggcagaatcaattatgtat

SEQ ID NO: 389901 - DNA, 572 bp, Homo sapiens
cttgagagtcccaggtcgacttcagactgctgtgctggcagcaagaatttcaagccagtggattttagcttgctgggctctgtggcggtgggatccactgatccacttggctccctggcttcagttccctttccaggagagtgaacagttctgtcgctggccttccaggtgtcactggggtatggaaaaaaaataaaaaaaaaaaacagcagaacatagaataataaaaactgcatacaaatcccctgtagaaatgggggagcggagaaagggcaggccgcatgggggcagagtgctcacctttcatagtggggctggattatgagtaggtaacgatggcgtagatctgaacaaacctccagttgaagagctcagaaatgagtgaggtatgcttactatgggctgtccaggagatggcgctaggggaaaacaggctggcgaccgcagtagttgagggttcctctgaggaggggactttggctttacattttatagtttgagtactttgttttcttgccatgtgttacttttatttgcggcaggagttgggggtggggcgacggggaatggta

SEQ ID NO: 389902 - DNA, 495 bp, Homo sapiens
ctctgccttagtcacaccacactggagagtgtttccatggccactgcattgcagagcggagatcatgccactgcactccagccttggggacaaagcgagactccgtctaaaaaaaataaaaaaaaaaaacagcagaacatagaataataaaaactgcatacaaatcccctgtagaaatgggggagcggagaaagggcaggccgcatgggggcagagtgctcacctttcatagtggggctggattatgagtaggtaacgatggcgtagatctgaacaaacctccagttgaagagctcagaaatgagtgaggtatgcttactatgggctgtccaggagatggcgctaggggaaaacaggctggcgaccgcagtagttgagggttcctctgaggaggggactttggctttacattttatagtttgagtactttgttttcttgccatgtgttacttttatttgcggcaggagttgggggtggggcgacggggaatggta

SEQ ID NO: 389903 - DNA, 807 bp, Homo sapiens
tgcaacgatgaggcttaatataggtataccttacaaactaaagtgctgtgtggatatatccagctcaaaacaacacacccccacggtggaatgagaacgcagtcatccttctgtgtactcaaggatatactcatcgtataacaaaatccgtgaatactcaagtcccgcatttggctctgtggatctgcagataccaaaagtcagccatccaaatatggaggtatcatattccccaatgctatactattaatccatgtttcatttaaaaaaaattctcatataggccgggtgcagtggctcacacctgtaatccagcactttgggaggctgagatgggcgcatcacaaggtcaggagttagagaccagcctggcctacatagtgaaaccccatctctactaaaaatacaaaaattagccaggcatggtcccagatatttggtaggctgaggcaagagaatcacttgaacctgggaggcaaaggttgtggtgagccaagatgacgccactgcactgcagcctgggcaacagagtgagactctgtctcaaaaaaagaaaaaagtcctcctcatataagtggacactcacagttaaaacctgtgttgttcaagggtcaactgtatattctcaataattaattatcctgcagcccatcgtcttgcatattctgacatgttgcttaaaatgttctcaagtgattacatttgtgtatatttaatctttctaaccatatagttacttgtctgaagttcaagtcctcccttgatttgtatctgttcagagcagctagtcaagtcttttgcatctga

SEQ ID NO: 389904 - DNA, 1348 bp, Homo sapiens
tagcttcaagccactgaagatggaaaacgagacagtcagtgaactgaaccaaacacagcttcagccacgagcagtggtggccttagaataccaggtggtcaccatcttacttgtactcattatttgtggcctgggcattgtaggcaacatcatggtagtcctggttgtcatgagaaccaagcacatgaggacccccacaaactgctacctggtgagcctggcagtagctgatctcatggtcttggtggccgcaggcctccccaacataacagacagtatctacggttcctgggtctatggctatgttggatgcctctgcattacttacctccagtatttgggaattaatgcatcctcttgttcaataacagcctttaccattgagaggtacatagcaatctgtcaccccatcaaagcccagtttctctgcacattttccagagccaaaaagattatcatctttgtctgggctttcacatctctttactgtatgctctggttcttcttgctggatctcaatattagcacctacaaagatgctattgtgatatcctgtggctacaagatctccaggaattactactcacctatttacctaatggactttggtgtcttttatgttgtgccaatgatcctggctaccgtcctctatggattcatagctagaatccttttcttaaatcccattccttcagatcctaaagaaaactctaagacatggaaaaatgattcaacccatcagaacacaaatctgaatgtaaatacctctaatagatgtttcaacagcacagtatcttcaaggaagcaggtcaccaagatgctggcagtggttgtaattctgtttgcccttttatggatgccctacaggactctagtggttgtcaactcatttctctccagtcctttccaagaaaattggtttttgctcttttgcagaatttgcatttatctcaacagtgccatcaacccggtgatttacaatctcatgtcccagaaattccgtgcagccttcagaaagctctgcaactgcaagcagaagccaacagagaaacctgctaactacagtgtggccctaaattacagcgtcatcaaggagtcagaccatttcagcacagagcttgatgatatcactgtcactgacacttacctgtctgccacaaaagtgtcttttgatgacacctgcttggcttctgaggtatcctttagccaaagttgattcatgaattagaagaaaatggatgacaaagaaattgagaatctgtgcagtcatcaacaaaagggagaacatggccaatagtcatatgtgaagacagagcagatcagtctttgtcaatgctctaacaaaccg

SEQ ID NO: 389905 - DNA, 3615 bp, Homo sapiens
tactaaaatgtagccccaaaatgacgggccagcctcagcgtatctgccatatgtatttcaaagattacagtcagaatgagttaatgaaaatggcaggttccttttcaaagtttatttgactcacagccatattgctaagtttgggtatagtgaagttaacaacaatcacttaaattaatatcttacagcaagatatactgatactgttttaaatgaaaaagactgtaaattcaatgtaaatattacctaactttatgtaccaagttaggagagtggaagaggggaatttttcaaaaaataagctgtatttgaacaaagcatgaaacttgttgttttaaaatttaagaataattgaatttaccatctaattggcatccgtactgtgcattgatagtaatatccaaatcatcttattcttccatagaggaagcgctcatataaatcacattgctgagaactatataaaactacatagaggtaaatggtgcttattaaatatgagtatagtttgttacttgctggaagtcttctagttcatttggaccattttcttaccctgaggtgaactcaatatctgttggcaatgggtggttaaatgtgaagtgcccttgttcagtgtcccttgttcttgtacaggtattttcttagtttaaaaaaaaaattctagcatgccaacatttgtctttggcctattcctttttttctgaagtgtgtaacttctgattttttctttgctatgttgtaaataacagtagctaaattctctgttttactatctacttttcttttcttcccagatcatttcattctaaaattaaattgcttggttttctttagaggaaattgctacatggtatacttgtagtagtgattcatattaaaaaaatagctggtaaatctttctaggtagtaacttatccaaacaatactttgagtatcatattttgtgaatgacttgcttaaactgggaaactgaatattctttttaaatcatataattcctgtattaaatgtgaaacacacagtctccaaagtcacctgattctctgtggaaaatgaaaggcattgaaggaaaccagatacattaatacttagttttggttgaaagtgcaacattactgtacttagaaggggcttggtttatttttagatatttaagctatcattaattttagaccaatggctaataataagagagatttttggttgctcatttatggagagacaaagaacagcatggcataaacaaacatcccagaaataaatgaaaagttttaagtgataaaattgtgttttctatgaaccagtgttgtacatgaaccaacattgtgtttcttagctctgacctgtacagtgaggtacctgtcaggacccctagtcttggcactggaaatgacaaagttctcctattactaaattctcatgccttccttttctgacttagtagattgaaattggtaggtactaatgatttatgtttgataaacttaagttctgctgatatcctgttactggtaattctggtaccaaaatttcaaacggtttgattattagtagcattttgagtacctaggtgcatataatacagttagcagacccttacagagtcaaaagagattttggaatctggtgatactgttgtttattacactagcctattacattttctttctttataataactgtttatgtgagtttcattgaaaatcgtggctctattgctttattcatggtttccacaactctttttgtaacaccttaattttctctcttaggtattttcctgttaaataagatatcaaaagcatcaatcacaagacagagaaaacgtattaggaaaaacttgtattagtatattctaaactgaaatggaaaaactcattattcatattttaataaataaaactcccaaatgatcttgctaaattatcccactatttagaagtagaaaataagagaagagtgctttcaaggaaatttgtcatattctcccttctatctagaagttgacaatgaattgcaataaaactaagaaataactgaatgctgaaaaataccatgaattaatgttatggcttctttatttttgtatatccattcccacaaaattgaatttaagattattaatgaaaattctatattaagtaataatgcttgtattagtaatgggcaaagaagtctttctttgttacattaaccgttagtaaaagatgtactttgacatttctgatgtaaaacctatatgtaaatattgtaatttaaatatgattggacagctgttaagttttggggagggaagcagatgccagcgttctctgctgaaaagacaagatggcgcttgacggaccacagcagatggagctggaggaggaaaaggcaggcagtggactctgccagtattatctgtccaagattgaagaactccagggtcaactgcaatataaattggatgggggaaagccacaaggaacagttctgaactccaggtgcatttgcagctgattttgaatgataagacccaaaacctctggaggcggcaggtgcacgggaatgaactaaatgttaaagtgtgcctattacaggaggagctacagctgctgcaggaataggactcctgtgtcagggaagtagtccaggccatgggtaagaagaaagtgttggtcaaggtgcatctcaaggacaagtttgtcatagatgtggacaaaaatatcagcatcagtgatgtgacacccagttccttggtggttctaagaaatgacagctacactttgcacaagatcctacccaacaaggtggactcattggtgtcactgatgatggtgaagaaagtaccagattcagcttatgaaatgattggtagactggataggcagatcaagaagatcaaagaagtgatcgacctgcctgctaagcatcccgagctcttcaaagcactgggcattgcacagcccaagggaatgctgcttggaagagactgttggcctgggctctggctcatcatagggactgtgtacctttattcatgtctctggctctgaattggtacagaaattcattggggaatttctgtgatggcagagaaaatgctcatctgtcatcttcatggatgaaattgactcttttggctcctcagagctggagggggatgctggagggaacagtgaagtgcagcagatgatgcttcgagggtggctttgaggccaccaagagtatcacggtttatcacggctgctaatacgattgatatcctggactcggcactgctttgcccagggcacattgacagaaaaattgaattcccaacctgcaatgagtaggcctggctggtcactttgaagattcattctcagaaatgaacctgacccaggggatcaacctgagaaaaattgctgagcttatgccaggagcatcaggctgaagtgaagggcatgtgcacagaaaccggcatgtatgccctgagtagcgagtccatgtcactcagaaggactttgaggtagtccaaagtcctatctcatgccaaaggacagtgaggaaaaacatgtccatcaagaaactatggaattgagggcacatcctttgtgtgtatccctacaataaaactcagtgggacaagca

SEQ ID NO: 389906 - DNA, 3747 bp, Homo sapiens
tactaaaatgtagccccaaaatgacgggccagcctcagcgtatctgccatatgtatttcaaagattacagtcagaatgagttaatgaaaatggcaggttccttttcaaagtttatttgactcacagccatattgctaagtttgggtatagtgaagttaacaacaatcacttaaattaatatcttacagcaagatatactgatactgttttaaatgaaaaagactgtaaattcaatgtaaatattacctaactttatgtaccaagttaggagagtggaagaggggaatttttcaaaaaataagctgtatttgaacaaagcatgaaacttgttgttttaaaatttaagaataattgaatttaccatctaattggcatccgtactgtgcattgatagtaatatccaaatcatcttattcttccatagaggaagcgctcatataaatcacattgctgagaactatataaaactacatagaggtaaatggtgcttattaaatatgagtatagtttgttacttgctggaagtcttctagttcatttggaccattttcttaccctgaggtgaactcaatatctgttggcaatgggtggttaaatgtgaagtgcccttgttcagtgtcccttgttcttgtacaggtattttcttagtttaaaaaaaaaattctagcatgccaacatttgtctttggcctattcctttttttctgaagtgtgtaacttctgattttttctttgctatgttgtaaataacagtagctaaattctctgttttactatctacttttcttttcttcccagatcatttcattctaaaattaaattgcttggttttctttagaggaaattgctacatggtatacttgtagtagtgattcatattaaaaaaatagctggtaaatctttctaggtagtaacttatccaaacaatactttgagtatcatattttgtgaatgacttgcttaaactgggaaactgaatattctttttaaatcatataattcctgtattaaatgtgaaacacacagtctccaaagtcacctgattctctgtggaaaatgaaaggcattgaaggaaaccagatacattaatacttagttttggttgaaagtgcaacattactgtacttagaaggggcttggtttatttttagatatttaagctatcattaattttagaccaatggctaataataagagagatttttggttgctcatttatggagagacaaagaacagcatggcataaacaaacatcccagaaataaatgaaaagttttaagtgataaaattgtgttttctatgaaccagtgttgtacatgaaccaacattgtgtttcttagctctgacctgtacagtgaggtacctgtcaggacccctagtcttggcactggaaatgacaaagttctcctattactaaattctcatgccttccttttctgacttagtagattgaaattggtaggtactaatgatttatgtttgataaacttaagttctgctgatatcctgttactggtaattctggtaccaaaatttcaaacggtttgattattagtagcattttgagtacctaggtgcatataatacagttagcagacccttacagagtcaaaagagattttggaatctggtgatactgttgtttattacactagcctattacattttctttctttataataactgtttatgtgagtttcattgaaaatcgtggctctattgctttattcatggtttccacaactctttttgtaacaccttaattttctctcttaggtattttcctgttaaataagatatcaaaagcatcaatcacaagacagagaaaacgtattaggaaaaacttgtattagtatattctaaactgaaatggaaaaactcattattcatattttaataaataaaactcccaaatgatcttgctaaattatcccactatttagaagtagaaaataagagaagagtgctttcaaggaaatttgtcatattctcccttctatctagaagttgacaatgaattgcaataaaactaagaaataactgaatgctgaaaaataccatgaattaatgttatggcttctttatttttgtatatccattcccacaaaattgaatttaagattattaatgaaaattctatattaagtaataatgcttgtattagtaatgggcaaagaagtctttctttgttacattaaccgttagtaaaagatgtactttgacatttctgatgtaaaacctatatgtaaatattgtaatttaaatatgattggacagctgttaagttttggggagggaagcagatgccagcgttctctgctgaaaagacaagatggcgcttgacggaccacagcagatggagctggaggaggaaaaggcaggcagtggactctgccagtattatctgtccaagattgaagaactccagggtcaactgcaatataaattggatgggggaaagccacaaggaacagttctgaactccaggtgcatttgcagctgattttgaatgataagacccaaaacctctggaggcggcaggtgcacgggaatgaactaaatgttaaagtgtgcctattacaggaggagctacagctgctgcaggaataggactcctgtgtcagggaagtagtccaggccatgggtaagaagaaagtgttggtcaaggtgcatctcaaggacaagtttgtcatagatgtggacaaaaatatcagcatcagtgatgtgacacccagttccttggtggttctaagaaatgacagctacactttgcacaagatcctacccaacaaggtggactcattggtgtcactgatgatggtgaagaaagtaccagattcagcttatgaaatgattggtagactggataggcagatcaagaagatcaaagaagtgatcgacctgcctgctaagcatcccgagctcttcaaagcactgggcattgcacagcccaagggaatgctgcttggaagagactgttggcctgggctctggctcatcatagggactgtgtacctttattcatgtctctggctctgaattggtacagaaattcattggggaatttctgtgatggcagagaaaatgctcatctgtcatcttcatggatgaaattgactcttttggctcctcagagctggagggggatgctggagggaacagtgaagtgcagcagatgatgcttcgagggtggctttgaggccaccaagagtatcacggtttatcacggctgctaatacgattgatatcctggactcggcactgctttgcccagggcacattgacagaaaaattgaattcccaacctgcaatgagtaggcctggctggtcactttgaagattcattctcagaaatgaacctgacccaggggatcaacctgagaaaaattgctgagcttatgccaggagcatcaggctgaagtgaagggcatgtgcacagaaaccggcatgtatgccctgagtagcgagtccatgtcactcagaaggactttgaggtagtccaaagtcctatctcatgccaaaggacagtgaggaaaaacatgtccatcaagaaactatggaattgagggcacatcctttgtgtgtatccctacaataaaactcagtgggacaagcaaaaaaaaaaaaaaaaaaaagttttggggagggatgatctgctagtgtataatcaataacttttaacatttagcttgtatttagtaacatttcattgtgttttgaaaaaaagtaaaaaatcttttgaagcaca

SEQ ID NO: 389907 - DNA, 2449 bp, Homo sapiens
tactaaaatgtagccccaaaatgacgggccagcctcagcgtatctgccatatgtatttcaaagattacagtcagaatgagttaatgaaaatggcaggttccttttcaaagtttatttgactcacagccatattgctaagtttgggtatagtgaagttaacaacaatcacttaaattaatatcttacagcaagatatactgatactgttttaaatgaaaaagactgtaaattcaatgtaaatattacctaactttatgtaccaagttaggagagtggaagaggggaatttttcaaaaaataagctgtatttgaacaaagcatgaaacttgttgttttaaaatttaagaataattgaatttaccatctaattggcatccgtactgtgcattgatagtaatatccaaatcatcttattcttccatagaggaagcgctcatataaatcacattgctgagaactatataaaactacatagaggtattttcctgttaaataagatatcaaaagcatcaatcacaagacagagaaaacgtattaggaaaaacttgtattagtatattctaaactgaaatggaaaaactcattattcatattttaataaataaaactcccaaatgatcttgctaaattatcccactatttagaagtagaaaataagagaagagtgctttcaaggaaatttgtcatattctcccttctatctagaagttgacaatgaattgcaataaaactaagaaataactgaatgctgaaaaataccatgaattaatgttatggcttctttatttttgtatatccattcccacaaaattgaatttaagattattaatgaaaattctatattaagtaataatgcttgtattagtaatgggcaaagaagtctttctttgttacattaaccgttagtaaaagatgtactttgacatttctgatgtaaaacctatatgtaaatattgtaatttaaatatgattggacagctgttaagttttggggagggaagcagatgccagcgttctctgctgaaaagacaagatggcgcttgacggaccacagcagatggagctggaggaggaaaaggcaggcagtggactctgccagtattatctgtccaagattgaagaactccagggtcaactgcaatataaattggatgggggaaagccacaaggaacagttctgaactccaggtgcatttgcagctgattttgaatgataagacccaaaacctctggaggcggcaggtgcacgggaatgaactaaatgttaaagtgtgcctattacaggaggagctacagctgctgcaggaataggactcctgtgtcagggaagtagtccaggccatgggtaagaagaaagtgttggtcaaggtgcatctcaaggacaagtttgtcatagatgtggacaaaaatatcagcatcagtgatgtgacacccagttccttggtggttctaagaaatgacagctacactttgcacaagatcctacccaacaaggtggactcattggtgtcactgatgatggtgaagaaagtaccagattcagcttatgaaatgattggtagactggataggcagatcaagaagatcaaagaagtgatcgacctgcctgctaagcatcccgagctcttcaaagcactgggcattgcacagcccaagggaatgctgcttggaagagactgttggcctgggctctggctcatcatagggactgtgtacctttattcatgtctctggctctgaattggtacagaaattcattggggaatttctgtgatggcagagaaaatgctcatctgtcatcttcatggatgaaattgactcttttggctcctcagagctggagggggatgctggagggaacagtgaagtgcagcagatgatgcttcgagggtggctttgaggccaccaagagtatcacggtttatcacggctgctaatacgattgatatcctggactcggcactgctttgcccagggcacattgacagaaaaattgaattcccaacctgcaatgagtaggcctggctggtcactttgaagattcattctcagaaatgaacctgacccaggggatcaacctgagaaaaattgctgagcttatgccaggagcatcaggctgaagtgaagggcatgtgcacagaaaccggcatgtatgccctgagtagcgagtccatgtcactcagaaggactttgaggtagtccaaagtcctatctcatgccaaaggacagtgaggaaaaacatgtccatcaagaaactatggaattgagggcacatcctttgtgtgtatccctacaataaaactcagtgggacaagcaaaaaaaaaaaaaaaaaaaagttttggggagggatgatctgctagtgtataatcaataacttttaacatttagcttgtatttagtaacatttcattgtgttttgaaaaaaagtaaaaaatcttttgaagcaca

SEQ ID NO: 389908 - DNA, 670 bp, Homo sapiens
caaaatacctcagactggatcatttataaataacagaaattcattgcttacaactctggaggctgggatgtccacgttcaaggcatcagcagattttgtgaggacctactgtgtgctatctatggcagaaggggaaaaacaagctttcataggcctcttttataaggacactaatctcatttgtgaaggagggccctcgtgacctaatggcctcttaaagacctcacctcataatacagttgcactggggattagatttcaacatacgtattttgagtggacacaaacattcagatctagcaccatgtcctagtcataagacatagatgagattgagagagttcaggttgcttgtttaggagacatgctatacatttcaccaatctctttcttcggttttctaggatttataaaaaccattcagtgattttagtccagtcttataacgtgtccctggcctgtcctgtacctcagcgtagaccagctcaagtggtgatgaactttccggagttgcactatcacacatactaatatggctgcttctaggatcttctggtttaccgtcaaattctagctcccagtttaaaatggccaaatacctgtccagcaatcttaaagtttggttcaagtattcgtaaaaatatggaatatgccttattgaggaatatgt

SEQ ID NO: 389909 - DNA, 203 bp, Homo sapiens
gtgtgcatgtgtaaatgtgtgtgaatgagtgtgtgtgcaagtgtgtttgtgtgagtgggagtgcaagtgtctgggtcagtgtgagtgcgtgtgggtgactgtgtaaatgtgtgtatggatgagtggtttgtgtgcacatgcgtgtgtgtaaaagtgtgtgtgcatgcgtgtgtgggagtgcaagtgtgtggatcagtgtgtat

SEQ ID NO: 389910 - DNA, 647 bp, Homo sapiens
taccagttaagttcactgttttactgggtgtcatttgtggtgccccccaaacaattacaataataactcaaagatcactgagcatagatcaccataaaggagagaataataatgaaagagtttgaaatattgtgagaattccaaaatgtgacacagagacacacagtgagaaaaatggtgctgatagacttgctcaatgcagggttgccacaaaccttcaatttgtaaaaaatgcagaggctatgacatgcaataaagcaaaatgcaacaaaacaaggtatacctgtatttgcttttggccttctttgccttgcctccaattgaaaatttggataatgaccttgtctttcatgactagttgacagcaggtattgtggacaactcccagtgactcagtccatcctgattaatttagactttgttaacaatggaactgtgtaggactggacttgagtttattctccatactttggatttgatgttttttttcatcctcagggagccagttatccttctgtgagtatctctcaacttcacttactttggtgcgatctaggcccttcatccaggcttcatctcttcaaaagagttcccagcatgttttcctgcttatgagttattccagtcacaaattcatccagccgtct

SEQ ID NO: 389911 - DNA, 331 bp, Homo sapiens
tgtgtagaaacttttactcttagctttggaatccattgtagtaatgagtctccttaaattgttttttcctaagtagtattgatttgtaactgacaagtgcaggcttatgctctttcttaatctctttcatcaagcaatattttccaattttgatgggattagttcttttattctactagaccgccataaaggaggcttttctggagaaaatctgccttttaaaatcttcaatgcccattttttctagtaaccatcttcaggctctctacataaagtccacgaaagcatcacctttatcagtttcatttattgttatatgtccaacacccag

SEQ ID NO: 389912 - DNA, 390 bp, Homo sapiens
gctggagataaaagccacgctttgcatggtttgttcgtaaggctgcaagagctggctgagaaagacagcggatactcaggattgcgacatgctattagtcacagtgtgttccaggagagctcacaaatgctttgaaacagttacaggatatttctaaggatatttagcttggacctaagaggcctgtctcatgggcaatgatggtttgccccccacccctagaagacgaaatttgccagaaactaaaactcagtccctgtggtatttctcatccaaaattatttctagccacattgtctagtgcaacttttcagaggttctgcaatgatataaaatgtcaacataataatgttcaaataaattaaatgcccttgtaggtcataatccaaa

SEQ ID NO: 389913 - DNA, 388 bp, Homo sapiens
ttttttttgtatttttgatagagacagagttttgctatgttgcccagggtgatctcaaactcctaagctcaggcgatccacctgcttcagcctcccaaagtgcagagattacaggcgtaagccagggtgctggccctcccctcaccatctgactcattccctttcaagtgtcacctctgtgttgatgcctccctgctagcttttgttttcatttctgctttactctgaaagtggcctgttccctcacttggccattctcacaaaagcgtcacttgggctgagaaatatcattcatgttgcctcagttcctataatcagttaccaggtctttcattctagctgtataatatttcattcattcattcattcattcactcgtctgacatta

SEQ ID NO: 389914 - DNA, 219 bp, Homo sapiens
aacccaggaggcagaagtttcagtgagctgagatcatgccattgcactctagcctgggcaataagtctcaaataaataaataattaaaaaagatacttaattttttttttaagtaacatgaaagtacaaagaagaaaattgaaacttaccagattctctgtcaattgtcagtgatattaacaaacataataatgttcaccaaatgccattggatacaga

SEQ ID NO: 389915 - DNA, 626 bp, Homo sapiens
gattacaggcctgagccactgcgcccggctgttatatacatccttctcgttattcctctatcatagcttactatttttaaatattaaatttctgtttgcattattgtatggtttctctctcctgattagacacagactaataaaacatttagtaattattttcctccatctcatatatccgtctgagtcgtaaacatcttttataccaaagacctatttaatccttcagcactatctctgtgttttgcaaataaccagcaattaataagtgatttgagtttgccgctattggagttattgttgctgtcatagagagatggaggagtgctgatgtggagggtggttataatgggtatttatttgacctttcttagaaaaacaacccaaagttcttactctgttactaatgggttaacttagtgttgctgtgaaagtctgtaactgttaagacaattacgcattgttgactcaactgttgaaaactacattttaaggcatctatataaagtcttcagaattatgtaaacagtgatttactgctacctatttgtcttcattgaccttttaaaaacaaattccttgcacaggcaagccttagagccaatggtgcctacaggttacctgta

SEQ ID NO: 389916 - DNA, 370 bp, Homo sapiens
ttaggaatttaatccattttgaggtaatttttgtgcatggtaagagataaagttctaattatattcttctgcatgtgaatatccagttttcccggcacaaatttatgaagagattgtcctttctcccattgtgcattgttggcacctatgtcaaaagtcaattgaccataaattcatggatttatttctgggctctgtattctcttccatttgcctatgtgtttgtttttatgccagtatcatgctgtttggattctatagctttgcaatgtatttcaaatcaggaagtataatgctttctgctttgttctgtttgctaaagatcactttggctattcagagtctttcgtggtttaatcttccataagta

SEQ ID NO: 389917 - DNA, 707 bp, Homo sapiens
ctaccacaaaaccaactaataccacacccaagaatatgtcgagaggggtggtgttcttcaggacccttcaaaaaatgatactatgcaaaagttgctgggcatattggattttacccatcataggcgctgttctcttaggtttcctgtaccgctactacacatcggaaagcaaatcctcctgaggaggccttgctgaagttagaaagtgcatccactttggggcgaaaactagagacttgcttgggggctgcagaagtgccctctcctcgaatcctgccagttgcattcttcccccttggagccaagacgattggccagacatcacctcagatctgagaccagcgtcttccatctctcagagccttactcccaaagtacctgctcactgttccgtgttgaacaattgccggtgtttcctctcttcactggtttccatgagtacccttatatttcacaactttctgttcataagttatagtgacattgctctttggtaaaaatgcctgctttccaatactttgattgcatattagacattcttaacagggcggcagtctagtgttgaaagttttatttttccatttttcttttaagtaaattttttttaaaaaattctgatttagggctggtcttgaactcctgacctcgtgatccacccgcctcggcctcccaaagtgctgggattacaggcgtgagccaccacgccc

SEQ ID NO: 389918 - DNA, 2823 bp, Homo sapiens
gtggtttgtgctttatttttaggctcaattcagctagaggcacacaacaaagcagaagacaggagtaggcctggacccaagtgaagcgcaggtggggtgtgaatcctaggcagctggcttctcaggcataggtggtgacatactggggccccatgttcccgaagtaggaacgttcccactcactcatgagctcaaagtgtacaggacggcgacagaaattgcaggcagccacagacacatcctggaggggcagccccaccgcagtccaagccagcagcagcttctccacaaaatcttccatcatctgagggctgtggtggggggagggtgccaagcgcaggagctcttcaccccgggggacagttgggtagttgatggcctgcacatagatgccatgcttggagagcaggagatcacagagcttgctgttgagtgctgcattgcccacccggatggggatgatgtggctggggcaggggatgacaggaaggcccctgtccatgagtagctggcgcatgtgcttgacattgcgctggtgggctcgcctcagggcttggccctcctctcccttgagcagccgcacagattctagagctccagagagcaccatggggggcagagaagtggtaaagatgaagcctgcagcataggagcgcaccatgtccaccaagtcacgggtgctggcaatgtagccgcccacacagccaaaggccttgccaagagttccagagatgatgtcaatcttatgcataattccatcacgctccccaatcccagcgccccgggacccatacagtcctacagcatggacctcatccacgaaggtcagggccccatactggtgggacacatcacacaactcctcgaggggacagatggcaccatccatggagtggacagtctcaaaggccacaattttgggtatcttagggttagacttctctagaagtttctttaggtggtcagggtcattgtgcctgaagacaaacttggctgctccacttggttacggaagccgaggaaggctgagcgcgggctctcaaggaaagtagtcgcggaatctcagttagcggtggagaggcagtatgtccggttcaatggcgactgcggaagctagcggcagcgatgggaaagggcaggaagtcgagacctcagtcacctattaccggttggaggaggtggcaaagcgcaactccttgaaggaactgtggcttgtgatccatgggcgagtctacgatgtcacccgcttcctcaacgagcaccctggaggagaagaggttctgctggaacaagctggtgtagatgcaagtgaaagctttgaagatgtaggacactcttctgatgccagagaaatgctaaagcagtactacattggtgatatccatccgagtgaccttaaacctgaaagtggtagcaaggacccttcaaaaaatgatacatgcaaaagttgctgggcatattggattttacccatcataggcgctgttctcttaggtttcctgtaccgctactacacatcggaaagcaaatcctcctgaggaggccttgctgaagttagaaagtgcatccactttggggcgaaaactagagacttgcttgggggctgcagaagtgccctctcctcgaatcctgccagttgcattcttcccccttggagccaagacgattggccagacatcacctcagatctgagaccagcgtcttccatctctcagagccttactcccaaagtacctgctcactgttccgtgttgaacaattgccggtgtttcctctcttcactggtttccatgagtacccttatatttcacaactttctgttcataagttatagtgacattgctctttggtaaaaatgcctgctttccaatactttgattgcatattagacattcttaacagggcggcagtctagtgttgaaagttttatttttccatttttcttttaagtaaattttttttaaaaaattctgatttagggctaggtgtggtggctcaggcctgtaatcctggcactttgggaggccaaggtgggaagatcgcttgaggccaagagttcaagaccagcctgggcaacatagcgagacccctatctgtattaaaaaaaaatctgatttaattcttttatttatcataaggggtttaattcctgaagtaaaggtttgcacctattaaacttaaaactgccaaatgatttttgttcttttatgtgcgtgataaaaatacaaagaatggtgtggccacctcctccctttcaagctagggcagcaggtagctcttcccagcccctgagcccagccccttcccaagtggtgccggacaaaaaactacatggccctttcgtgtcttgggggtggaaagggagggatgaattggggtgatagaaccctggtgaattcagagtaatctttctttagaaaactggtgttttctaaagaaacaggataggagtttagagaaggcaccaaagctttcactttggtttggcaccagtttctaaccatctgttttttctaccctagctatcttttattggtaaaatataaatgtataattatgtttgtagagctttaccaaggagtttccctccttttttgtttgttgattagcaaatttttgattctccattttccaaaagtaagagactccagcatggccttctgtttgccccgcagtaaagtaacttccatataaaatggtatttgaaagtgagagttcatgacaacagaccgttttccatttcatctgtattttatctccgtgactccaacttgtgggtttgttctgtttttccatgagaataaaatactggcggtttttttc

SEQ ID NO: 389919 - DNA, 4043 bp, Homo sapiens
gtggtttgtgctttatttttaggctcaattcagctagaggcacacaacaaagcagaagacaggagtaggcctggacccaagtgaagcgcaggtggggtgtgaatcctaggcagctggcttctcaggcataggtggtgacatactggggccccatgttcccgaagtaggaacgttcccactcactcatgagctcaaagtgtacaggacggcgacagaaattgcaggcagccacagacacatcctggaggggcagccccaccgcagtccaagccagcagcagcttctccacaaaatcttccatcatctgagggctgtggtggggggagggtgccaagcgcaggagctcttcaccccgggggacagttgggtagttgatggcctgcacatagatgccatgcttggagagcaggagatcacagagcttgctgttgagtgctgcattgcccacccggatggggatgatgtggctggggcaggggatgacaggaaggcccctgtccatgagtagctggcgcatgtgcttgacattgcgctggtgggctcgcctcagggcttggccctcctctcccttgagcagccgcacagattctagagctccagagagcaccatggggggcagagaagtggtaaagatgaagcctgcagcataggagcgcaccatgtccaccaagtcacgggtgctggcaatgtagccgcccacacagccaaaggccttgccaagagttccagagatgatgtcaatcttatgcataattccatcacgctccccaatcccagcgccccgggacccatacagtcctacagcatggacctcatccacgaaggtcagggccccatactggtgggacacatcacacaactcctcgaggggacagatggcaccatccatggagtggacagtctcaaaggccacaattttgggtatcttagggttagacttctctagaagtttctttaggtggtcagggtcattgtgcctgaagacaaacttggctgctccacttggttacggaagccgaggaaggctgagcgcgggctctcaaggaaagtagtcgcggaatctcagttagcggtggagaggcagtatgtccggttcaatggcgactgcggaagctagcggcagcgatgggaaagggcaggaagtcgagacctcagtcacctattaccggttggaggaggtggcaaagcgcaactccttgaaggaactgtggcttgtgatccatgggcgagtctacgatgtcacccgcttcctcaacgagcaccctggaggagaagaggttctgctggaacaagctggtgtagatgcaagtgaaagctttgaagatgtaggacactcttctgatgccagagaaatgctaaagcagtactacattggtgatatccatccgagtgaccttaaacctgaaagtggtagcaaggacccttcaaaaaatgatacatgcaaaagttgctgggcatattggattttacccatcataggcgctgttctcttaggtttcctgtaccgctactacacatcggaaagcaaatcctcctgaggaggccttgctgaagttagaaagtgcatccactttggggcgaaaactagagacttgcttgggggctgcagaagtgccctctcctcgaatcctgccagttgcattcttcccccttggagccaagacgattggccagacatcacctcagatctgagaccagcgtcttccatctctcagagccttactcccaaagtacctgctcactgttccgtgttgaacaattgccggtgtttcctctcttcactggtttccatgagtacccttatatttcacaactttctgttcataagttatagtgacattgctctttggtaaaaatgcctgctttccaatactttgattgcatattagacattcttaacagggcggcagtctagtgttgaaagttttatttttccatttttcttttaagtaaattttttttaaaaaattctgatttagggctaggtgtggtggctcaggcctgtaatcctggcactttgggaggccaaggtgggaagatcgcttgaggccaagagttcaagaccagcctgggcaacatagcgagacccctatctgtattaaaaaaaaatctgatttaattcttttatttatcataaggggtttaattcctgaagtaaaggtttgcacctattaaacttaaaactgccaaatgatttttgttcttttatgtgcgtgataaaaatacaaagaatggtgtggccacctcctccctttcaagctagggcagcaggtagctcttcccagcccctgagcccagccccttcccaagtggtgccggacaaaaaactacatggccctttcgtgtcttgggggtggaaagggagggatgaattggggtgatagaaccctggtgaattcagagtaatctttctttagaaaactggtgttttctaaagaaacaggataggagtttagagaaggcaccaaagctttcactttggtttggcaccagtttctaaccatctgttttttctaccctagctatcttttattggtaaaatataaatgtataattatgtttgtagagctttaccaaggagtttccctccttttttgtttgttgattagcaaatttttgattctccattttccaaaagtaagagactccagcatggccttctgtttgccccgcagtaaagtaacttccatataaaatggtatttgaaagtgagagttcatgacaacagaccgttttccatttcatctgtattttatctccgtgactccaacttgtgggtttgttctgtttttccatgagaataaaatactggcggtttttttctcagatgtgtgttcattgagaagtaggttactagaattatgttactgtgtcttattggttcaatgatgatttctctggcatattagacttttattttttcccccatggaagcacttgaggaaataaatagtacactggctgttttctgccagcaactgtggtgatttttctccctgtcctttgagaattgctagtctgcttctgagccattgtcatatccagcagggagcagcttggttcaagaaggaccatagaggctgctcagcatctcctccctccctcccagcttgccagggatttgatgagacaggaaactgcccagcaaaccagggactgcccatgtaaactatttaagaaaaagttcaacccaggtcttgtatcctgtgatttagcagttgaatgaatacagaattcatcaaaataatattaaccttgtacttgcacacttggatatatttgggagtaattttaggagatttctggctgacttttattatcagggatatgggtttagtaaagcttttatctttagaaaaatgtttgtatgcattataagatgctacttttaagacaatattgaaaaaaactttggttattatttaacaaaagtggtatgacttgatgcttctctatttaaaggcaaggaaggattggtatatgattgcctgtaataaataaattgcgtgattattggagtacattggggtaaaagtaaagaacagaggagtattgaggagcttgaaagggaacattcaaactaaagccaagcctgaagataacttgaatcagttgtaaaagtgtgttggcaatgtccgaaattgaatgaaaaacatctggcttataagaaatgttaaagaactaccatcttaagtaaaattggtgtttttgttatttttaaggtaaatgccaatgcaaaaggtatgtttttctacttcacattggttttcttttcctgtttacatctgcacttgttttttgctgagagccagaggaaaagataattagactttgtctcttccacccatgaaatcccccagtacccagggcttcttctgaactactgccgatgtgatgtcactttgtatctggaaaatcactttggggtccatttactgttattttgttgcctacaaaaacagccaggtgaaagctaaatcttgtgtgagagtttgcagaggtttttctatacaataaagtagtatagcacactagccaaatcc

SEQ ID NO: 389920 - DNA, 2808 bp, Homo sapiens
gtggtttgtgctttatttttaggctcaattcagctagaggcacacaacaaagcagaagacaggagtaggcctggacccaagtgaagcgcaggtggggtgtgaatcctaggcagctggcttctcaggcataggtggtgacatactggggccccatgttcccgaagtaggaacgttcccactcactcatgagctcaaagtgtacaggacggcgacagaaattgcaggcagccacagacacatcctggaggggcagccccaccgcagtccaagccagcagcagcttctccacaaaatcttccatcatctgagggctgtggtggggggagggtgccaagcgcaggagctcttcaccccgggggacagttgggtagttgatggcctgcacatagatgccatgcttggagagcaggagatcacagagcttgctgttgagtgctgcattgcccacccggatggggatgatgtggctggggcaggggatgacaggaaggcccctgtccatgagtagctggcgcatgtgcttgacattgcgctggtgggctcgcctcagggcttggccctcctctcccttgagcagccgcacagattctagagctccagagagcaccatggggggcagagaagtggtaaagatgaagcctgcagcataggagcgcaccatgtccaccaagtcacgggtgctggcaatgtagccgcccacacagccaaaggccttgccaagagttccagagatgatgtcaatcttatgcataattccatcacgctccccaatcccagcgccccgggacccatacagtcctacagcatggacctcatccacgaaggtcagggccccatactggtgggacacatcacacaactcctcgaggggacagatggcaccatccatggagtggacagtctcaaaggccacaattttgggtatcttagggttagacttctctagaagtttctttaggtggtcagggtcattgtgcctgaagacaaacttggctgctccacttggttacggaagccgaggaaggctgagcgcgggctctcaaggaaagtagtcgcggaatctcagttagcggtggagaggcagtatgtccggttcaatggcgactgcggaagctagcggcagcgatgggaaagggcaggaagtcgagacctcagtcacctattaccggttggaggaggtggcaaagcgcaactccttgaaggaactgtggcttgtgatccatgggcgagtctacgatgtcacccgcttcctcaacgagcaccctggaggagaagaggttctgctggaacaagctggtgtagatgcaagtgaaagctttgaagatgtaggacactcttctgatgccagagaaatgctaaagcagtactacattggtgatatccatccgagtgaccttaaacctgaaagtggtagcaaggacccttcaaaaaatgatacatgcaaaagttgctgggcatattggattttacccatcataggcgctgttctcttaggtttcctgtaccgctactacacatcggaaagcaaatcctcctgaggaggccttgctgaagttagaaagtgcatccactttggggcgaaaactagagacttgcttgggggctgcagaagtgccctctcctcgaatcctgccagttgcattcttcccccttggagccaagacgattggccagacatcacctcagatctgagaccagcgtcttccatctctcagagccttactcccaaagtacctgctcactgttccgtgttgaacaattgccggtgtttcctctcttcactggtttccatgagtacccttatatttcacaactttctgttcataagttatagtgacattgctctttggtaaaaatgcctgctttccaatactttgattgcatattagacattcttaacagggcggcagtctagtgttgaaagttttatttttccatttttcttttaagtaaattttttttaaaaaattctgatttagggctaggtgtggtggctcaggcctgtaatcctggcactttgggaggccaaggtgggaagatcgcttgaggccaagagttcaagaccagcctgggcaacatagcgagacccctatctgtattaaaaaaaaatctgatttaattcttttatttatcataaggggtttaattcctgaagtaaaggtttgcacctattaaacttaaaactgccaaatgatttttgttcttttatgtgcgtgataaaaatacaaagaatggtgtggccacctcctccctttcaagctagggcagcaggtagctcttcccagcccctgagcccagccccttcccaagtggtgccggacaaaaaactacatggccctttcgtgtcttgggggtggaaagggagggatgaattggggtgatagaaccctggtgaattcagagtaatctttctttagaaaactggtgttttctaaagaaacaggataggagtttagagaaggcaccaaagctttcactttggtttggcaccagtttctaaccatctgttttttctaccctagctatcttttattggtaaaatataaatgtataattatgtttgtagagctttaccaaggagtttccctccttttttgtttgttgattagcaaatttttgattctccattttccaaaagtaagagactccagcatggccttctgtttgccccgcagtaaagtaacttccatataaaatggtatttgaaagtgagagtcgcaacaacggttcctcatggttttccggacaaggggggctgttccgcaaaaagggggaaaaaggccagtacaggggagcctaagaaataaa

SEQ ID NO: 389921 - DNA, 2063 bp, Homo sapiens
gtggtttgtgctttatttttaggctcaattcagctagaggcacacaacaaagcagaagacaggagtaggcctggacccaagtgaagcgcaggtggggtgtgaatcctaggcagctggcttctcaggcataggtggtgacatactggggccccatgttcccgaagtaggaacgttcccactcactcatgagctcaaagtgtacaggacggcgacagaaattgcaggcagccacagacacatcctggaggggcagccccaccgcagtccaagccagcagcagcttctccacaaaatcttccatcatctgagggctgtggtggggggagggtgccaagcgcaggagctcttcaccccgggggacagttgggtagttgatggcctgcacatagatgccatgcttggagagcaggagatcacagagcttgctgttgagtgctgcattgcccacccggatggggatgatgtggctggggcaggggatgacaggaaggcccctgtccatgagtagctggcgcatgtgcttgacattgcgctggtgggctcgcctcagggcttggccctcctctcccttgagcagccgcacagattctagagctccagagagcaccatggggggcagagaagtggtaaagatgaagcctgcagcataggagcgcaccatgtccaccaagtcacgggtgctggcaatgtagccgcccacacagccaaaggccttgccaagagttccagagatgatgtcaatcttatgcataattccatcacgctccccaatcccagcgccccgggacccatacagtcctacagcatggacctcatccacgaaggtcagggccccatactggtgggacacatcacacaactcctcgaggggacagatggcaccatccatggagtggacagtctcaaaggccacaattttgggtatcttagggttagacttctctagaagtttctttaggtggtcagggtcattgtgcctgaagacaaacttggctgctccacttggttacggaagccgaggaaggctgagcgcgggctctcaaggaaagtagtcgcggaatctcagttagcggtggagaggcagtatgtccggttcaatggcgactgcggaagctagcggcagcgatgggaaagggcaggaagtcgagacctcagtcacctattaccggttggaggaggtggcaaagcgcaactccttgaaggaactgtggcttgtgatccatgggcgagtctacgatgtcacccgcttcctcaacgagcaccctggaggagaagaggttctgctggaacaagctggtgtagatgcaagtgaaagctttgaagatgtaggacactcttctgatgccagagaaatgctaaagcagtactacattggtgatatccatccgagtgaccttaaacctgaaagtggtagcaaggacccttcaaaaaatgatacatgcaaaagttgctgggcatattggattttacccatcataggcgctgttctcttaggtttcctgtaccgctactacacatcggaaagcaaatcctcctgaggaggccttgctgaagttagaaagtgcatccactttggggcgaaaactagagacttgcttgggggctgcagaagtgccctctcctcgaatcctgccagttgcattcttcccccttggagccaagacgattggccagacatcacctcagatctgagaccagcgtcttccatctctcagagccttactcccaaagtacctgctcactgttccgtgttgaacaattgccggtgtttcctctcttcactggtttccatgagtacccttatatttcacaactttctgttcataagttatagtgacattgctctttggtaaaaatgcctgctttccaatactttgattgcatattagacattcttaacagggcggcagtctagtgttgaaagttttatttttccatttttcttttaagtaaattttttttaaaaaattctgatttagggctggtcttgaactcctgacctcgtgatccacccgcctcggcctcccaaagtgctgggattacaggcgtgagccaccacgccc

SEQ ID NO: 389922 - DNA, 2049 bp, Homo sapiens
  misc_feature (1951)..(1951): n is a, c, g, or t
gtggtttgtgctttatttttaggctcaattcagctagaggcacacaacaaagcagaagacaggagtaggcctggacccaagtgaagcgcaggtggggtgtgaatcctaggcagctggcttctcaggcataggtggtgacatactggggccccatgttcccgaagtaggaacgttcccactcactcatgagctcaaagtgtacaggacggcgacagaaattgcaggcagccacagacacatcctggaggggcagccccaccgcagtccaagccagcagcagcttctccacaaaatcttccatcatctgagggctgtggtggggggagggtgccaagcgcaggagctcttcaccccgggggacagttgggtagttgatggcctgcacatagatgccatgcttggagagcaggagatcacagagcttgctgttgagtgctgcattgcccacccggatggggatgatgtggctggggcaggggatgacaggaaggcccctgtccatgagtagctggcgcatgtgcttgacattgcgctggtgggctcgcctcagggcttggccctcctctcccttgagcagccgcacagattctagagctccagagagcaccatggggggcagagaagtggtaaagatgaagcctgcagcataggagcgcaccatgtccaccaagtcacgggtgctggcaatgtagccgcccacacagccaaaggccttgccaagagttccagagatgatgtcaatcttatgcataattccatcacgctccccaatcccagcgccccgggacccatacagtcctacagcatggacctcatccacgaaggtcagggccccatactggtgggacacatcacacaactcctcgaggggacagatggcaccatccatggagtggacagtctcaaaggccacaattttgggtatcttagggttagacttctctagaagtttctttaggtggtcagggtcattgtgcctgaagacaaacttggctgctccacttggttacggaagccgaggaaggctgagcgcgggctctcaaggaaagtagtcgcggaatctcagttagcggtggagaggcagtatgtccggttcaatggcgactgcggaagctagcggcagcgatgggaaagggcaggaagtcgagacctcagtcacctattaccggttggaggaggtggcaaagcgcaactccttgaaggaactgtggcttgtgatccatgggcgagtctacgatgtcacccgcttcctcaacgagcaccctggaggagaagaggttctgctggaacaagctggtgtagatgcaagtgaaagctttgaagatgtaggacactcttctgatgccagagaaatgctaaagcagtactacattggtgatatccatccgagtgaccttaaacctgaaagtggtagcaaggacccttcaaaaaatgatacatgcaaaagttgctgggcatattggattttacccatcataggcgctgttctcttaggtttcctgtaccgctactacacatcggaaagcaaatcctcctgaggaggccttgctgaagttagaaagtgcatccactttggggcgaaaactagagacttgcttgggggctgcagaagtgccctctcctcgaatcctgccagttgcattcttcccccttggagccaagacgattggccagacatcacctcagatctgagaccagcgtcttccatctctcagagccttactcccaaagtacctgctcactgttccgtgttgaacaattgccggtgtttcctctcttcactggtttccatgagtacccttatatttcacaactttctgttcataagttatagtgacattgctctttggtaaaaatgcctgctttccaatactttgattgcatattagacattcttaacagggggcggcaacgggaaagttctttcccttcttaggaaattttaaaatgntagcgggggggggccgcggaccggccttggagccgggggaaactcgggcaattaaacacgggatggaactttgtttaaaagtgtctctaaggggccca

SEQ ID NO: 389923 - DNA, 2852 bp, Homo sapiens
atgtctggccaatcgtcttggctccaagggggaagaatgcaactggcaggattcgaggagagggcacttctgcagcccccaagcaagtctctagttttcgccccaaagtggatgcaagtgaaagctttgaagatgtaggacactcttctgatgccagagaaatgctaaagcagtactacattggtgatatccatccgagtgaccttaaacctgaaagtggtagcaaggacccttcaaaaaatgatacatgcaaaagttgctgggcatattggattttacccatcataggcgctgttctcttaggtttcctgtaccgctactacacatcggaaagcaaatcctcctgaggaggccttgctgaagttagaaagtgcatccactttggggcgaaaactagagacttgcttgggggctgcagaagtgccctctcctcgaatcctgccagttgcattcttcccccttggagccaagacgattggccagacatcacctcagatctgagaccagcgtcttccatctctcagagccttactcccaaagtacctgctcactgttccgtgttgaacaattgccggtgtttcctctcttcactggtttccatgagtacccttatatttcacaactttctgttcataagttatagtgacattgctctttggtaaaaatgcctgctttccaatactttgattgcatattagacattcttaacagggcggcagtctagtgttgaaagttttatttttccatttttcttttaagtaaattttttttaaaaaattctgatttagggctaggtgtggtggctcaggcctgtaatcctggcactttgggaggccaaggtgggaagatcgcttgaggccaagagttcaagaccagcctgggcaacatagcgagacccctatctgtattaaaaaaaaatctgatttaattcttttatttatcataaggggtttaattcctgaagtaaaggtttgcacctattaaacttaaaactgccaaatgatttttgttcttttatgtgcgtgataaaaatacaaagaatggtgtggccacctcctccctttcaagctagggcagcaggtagctcttcccagcccctgagcccagccccttcccaagtggtgccggacaaaaaactacatggccctttcgtgtcttgggggtggaaagggagggatgaattggggtgatagaaccctggtgaattcagagtaatctttctttagaaaactggtgttttctaaagaaacaggataggagtttagagaaggcaccaaagctttcactttggtttggcaccagtttctaaccatctgttttttctaccctagctatcttttattggtaaaatataaatgtataattatgtttgtagagctttaccaaggagtttccctccttttttgtttgttgattagcaaatttttgattctccattttccaaaagtaagagactccagcatggccttctgtttgccccgcagtaaagtaacttccatataaaatggtatttgaaagtgagagttcatgacaacagaccgttttccatttcatctgtattttatctccgtgactccaacttgtgggtttgttctgtttttccatgagaataaaatactggcggtttttttctcagatgtgtgttcattgagaagtaggttactagaattatgttactgtgtcttattggttcaatgatgatttctctggcatattagacttttattttttcccccatggaagcacttgaggaaataaatagtacactggctgttttctgccagcaactgtggtgatttttctccctgtcctttgagaattgctagtctgcttctgagccattgtcatatccagcagggagcagcttggttcaagaaggaccatagaggctgctcagcatctcctccctccctcccagcttgccagggatttgatgagacaggaaactgcccagcaaaccagggactgcccatgtaaactatttaagaaaaagttcaacccaggtcttgtatcctgtgatttagcagttgaatgaatacagaattcatcaaaataatattaaccttgtacttgcacacttggatatatttgggagtaattttaggagatttctggctgacttttattatcagggatatgggtttagtaaagcttttatctttagaaaaatgtttgtatgcattataagatgctacttttaagacaatattgaaaaaaactttggttattatttaacaaaagtggtatgacttgatgcttctctatttaaaggcaaggaaggattggtatatgattgcctgtaataaataaattgcgtgattattggagtacattggggtaaaagtaaagaacagaggagtattgaggagcttgaaagggaacattcaaactaaagccaagcctgaagataacttgaatcagttgtaaaagtgtgttggcaatgtccgaaattgaatgaaaaacatctggcttataagaaatgttaaagaactaccatcttaagtaaaattggtgtttttgttatttttaaggtaaatgccaatgcaaaaggtatgtttttctacttcacattggttttcttttcctgtttacatctgcacttgttttttgctgagagccagaggaaaagataattagactttgtctcttccacccatgaaatcccccagtacccagggcttcttctgaactactgccgatgtgatgtcactttgtatctggaaaatcactttggggtccatttactgttattttgttgcctacaaaaacagccaggtgaaagctaaatcttgtgtgagagtttgcagaggtttttctatacaataaagtagtatagcacactagccaaatcc

SEQ ID NO: 389924 - DNA, 2687 bp, Homo sapiens
ctaccacaaaaccaactaataccacacccaagaatatgtcgagaggggtggtgttcttcaggacccttcaaaaaatgatactatgcaaaagttgctgggcatattggattttacccatcataggcgctgttctcttaggtttcctgtaccgctactacacatcggaaagcaaatcctcctgaggaggccttgctgaagttagaaagtgcatccactttggggcgaaaactagagacttgcttgggggctgcagaagtgccctctcctcgaatcctgccagttgcattcttcccccttggagccaagacgattggccagacatcacctcagatctgagaccagcgtcttccatctctcagagccttactcccaaagtacctgctcactgttccgtgttgaacaattgccggtgtttcctctcttcactggtttccatgagtacccttatatttcacaactttctgttcataagttatagtgacattgctctttggtaaaaatgcctgctttccaatactttgattgcatattagacattcttaacagggcggcagtctagtgttgaaagttttatttttccatttttcttttaagtaaattttttttaaaaaattctgatttagggctaggtgtggtggctcaggcctgtaatcctggcactttgggaggccaaggtgggaagatcgcttgaggccaagagttcaagaccagcctgggcaacatagcgagacccctatctgtattaaaaaaaaatctgatttaattcttttatttatcataaggggtttaattcctgaagtaaaggtttgcacctattaaacttaaaactgccaaatgatttttgttcttttatgtgcgtgataaaaatacaaagaatggtgtggccacctcctccctttcaagctagggcagcaggtagctcttcccagcccctgagcccagccccttcccaagtggtgccggacaaaaaactacatggccctttcgtgtcttgggggtggaaagggagggatgaattggggtgatagaaccctggtgaattcagagtaatctttctttagaaaactggtgttttctaaagaaacaggataggagtttagagaaggcaccaaagctttcactttggtttggcaccagtttctaaccatctgttttttctaccctagctatcttttattggtaaaatataaatgtataattatgtttgtagagctttaccaaggagtttccctccttttttgtttgttgattagcaaatttttgattctccattttccaaaagtaagagactccagcatggccttctgtttgccccgcagtaaagtaacttccatataaaatggtatttgaaagtgagagttcatgacaacagaccgttttccatttcatctgtattttatctccgtgactccaacttgtgggtttgttctgtttttccatgagaataaaatactggcggtttttttctcagatgtgtgttcattgagaagtaggttactagaattatgttactgtgtcttattggttcaatgatgatttctctggcatattagacttttattttttcccccatggaagcacttgaggaaataaatagtacactggctgttttctgccagcaactgtggtgatttttctccctgtcctttgagaattgctagtctgcttctgagccattgtcatatccagcagggagcagcttggttcaagaaggaccatagaggctgctcagcatctcctccctccctcccagcttgccagggatttgatgagacaggaaactgcccagcaaaccagggactgcccatgtaaactatttaagaaaaagttcaacccaggtcttgtatcctgtgatttagcagttgaatgaatacagaattcatcaaaataatattaaccttgtacttgcacacttggatatatttgggagtaattttaggagatttctggctgacttttattatcagggatatgggtttagtaaagcttttatctttagaaaaatgtttgtatgcattataagatgctacttttaagacaatattgaaaaaaactttggttattatttaacaaaagtggtatgacttgatgcttctctatttaaaggcaaggaaggattggtatatgattgcctgtaataaataaattgcgtgattattggagtacattggggtaaaagtaaagaacagaggagtattgaggagcttgaaagggaacattcaaactaaagccaagcctgaagataacttgaatcagttgtaaaagtgtgttggcaatgtccgaaattgaatgaaaaacatctggcttataagaaatgttaaagaactaccatcttaagtaaaattggtgtttttgttatttttaaggtaaatgccaatgcaaaaggtatgtttttctacttcacattggttttcttttcctgtttacatctgcacttgttttttgctgagagccagaggaaaagataattagactttgtctcttccacccatgaaatcccccagtacccagggcttcttctgaactactgccgatgtgatgtcactttgtatctggaaaatcactttggggtccatttactgttattttgttgcctacaaaaacagccaggtgaaagctaaatcttgtgtgagagtttgcagaggtttttctatacaataaagtagtatagcacactagccaaatcc

SEQ ID NO: 389925 - DNA, 3305 bp, Homo sapiens
tcaccctgttagaactgtatatgctttgtgtgtatgtgtatccttattagtgtccaaacttaactagggattaagaggatgggtttggaatcagactgtccagctgcctttctagctttgggatttggggtgcaaagcttatatttcccttgtatgagatgagaataataaccctatttcgtaggttatcctatttcataaggattaaatctttaaaatacatatgaagcagataggatatttctggtagttatattagatatgattacttccaaatttatattgggatggatatgtttttatacatatatgaaatgtcacatacataatggtgttttttcctgtttaaaaatgtttaattgtagaatacgtgaaaagcaaaagcacaatgaagaaaatgtgagagtatccataatccctaactcagaaataaccactatatgactttgtagaaacacatatagaggcatttaaagacatcttatttgatatcatactattggttgtttttaaccttttaaaaaattactttgtaatattgtcactccaattcaaatatttttccccaactactttgtgataaaagcagttaaatttcccaaagtaaataaaaactccttgcctatataaaaacatgtgaaagctgaaagatagtgaacatttggcttaaaatattaacaactttattgctttctccccctattcctagttgctgggcatattggattttacccatcataggcgctgttctcttaggtttcctgtaccgctactacacatcggaaagcaaatcctcctgaggaggccttgctgaagttagaaagtgcatccactttggggcgaaaactagagacttgcttgggggctgcagaagtgccctctcctcgaatcctgccagttgcattcttcccccttggagccaagacgattggccagacatcacctcagatctgagaccagcgtcttccatctctcagagccttactcccaaagtacctgctcactgttccgtgttgaacaattgccggtgtttcctctcttcactggtttccatgagtacccttatatttcacaactttctgttcataagttatagtgacattgctctttggtaaaaatgcctgctttccaatactttgattgcatattagacattcttaacagggcggcagtctagtgttgaaagttttatttttccatttttcttttaagtaaattttttttaaaaaattctgatttagggctaggtgtggtggctcaggcctgtaatcctggcactttgggaggccaaggtgggaagatcgcttgaggccaagagttcaagaccagcctgggcaacatagcgagacccctatctgtattaaaaaaaaatctgatttaattcttttatttatcataaggggtttaattcctgaagtaaaggtttgcacctattaaacttaaaactgccaaatgatttttgttcttttatgtgcgtgataaaaatacaaagaatggtgtggccacctcctccctttcaagctagggcagcaggtagctcttcccagcccctgagcccagccccttcccaagtggtgccggacaaaaaactacatggccctttcgtgtcttgggggtggaaagggagggatgaattggggtgatagaaccctggtgaattcagagtaatctttctttagaaaactggtgttttctaaagaaacaggataggagtttagagaaggcaccaaagctttcactttggtttggcaccagtttctaaccatctgttttttctaccctagctatcttttattggtaaaatataaatgtataattatgtttgtagagctttaccaaggagtttccctccttttttgtttgttgattagcaaatttttgattctccattttccaaaagtaagagactccagcatggccttctgtttgccccgcagtaaagtaacttccatataaaatggtatttgaaagtgagagttcatgacaacagaccgttttccatttcatctgtattttatctccgtgactccaacttgtgggtttgttctgtttttccatgagaataaaatactggcggtttttttctcagatgtgtgttcattgagaagtaggttactagaattatgttactgtgtcttattggttcaatgatgatttctctggcatattagacttttattttttcccccatggaagcacttgaggaaataaatagtacactggctgttttctgccagcaactgtggtgatttttctccctgtcctttgagaattgctagtctgcttctgagccattgtcatatccagcagggagcagcttggttcaagaaggaccatagaggctgctcagcatctcctccctccctcccagcttgccagggatttgatgagacaggaaactgcccagcaaaccagggactgcccatgtaaactatttaagaaaaagttcaacccaggtcttgtatcctgtgatttagcagttgaatgaatacagaattcatcaaaataatattaaccttgtacttgcacacttggatatatttgggagtaattttaggagatttctggctgacttttattatcagggatatgggtttagtaaagcttttatctttagaaaaatgtttgtatgcattataagatgctacttttaagacaatattgaaaaaaactttggttattatttaacaaaagtggtatgacttgatgcttctctatttaaaggcaaggaaggattggtatatgattgcctgtaataaataaattgcgtgattattggagtacattggggtaaaagtaaagaacagaggagtattgaggagcttgaaagggaacattcaaactaaagccaagcctgaagataacttgaatcagttgtaaaagtgtgttggcaatgtccgaaattgaatgaaaaacatctggcttataagaaatgttaaagaactaccatcttaagtaaaattggtgtttttgttatttttaaggtaaatgccaatgcaaaaggtatgtttttctacttcacattggttttcttttcctgtttacatctgcacttgttttttgctgagagccagaggaaaagataattagactttgtctcttccacccatgaaatcccccagtacccagggcttcttctgaactactgccgatgtgatgtcactttgtatctggaaaatcactttggggtccatttactgttattttgttgcctacaaaaacagccaggtgaaagctaaatcttgtgtgagagtttgcagaggtttttctatacaataaagtagtatagcacactagccaaatcc

SEQ ID NO: 389926 - DNA, 2710 bp, Homo sapiens
  misc_feature (21)..(21): n is a, c, g, or t
aagaaaggaagaaagaaaagnaggagagaagaagattggaataatgggaattcttggatagacttaacctgaaatggtagcaaggacccttcaaaaaatgatactatgcaaaagttgctgggcatattggattttacccatcataggcgctgttctcttaggtttcctgtaccgctactacacatcggaaagcaaatcctcctgaggaggccttgctgaagttagaaagtgcatccactttggggcgaaaactagagacttgcttgggggctgcagaagtgccctctcctcgaatcctgccagttgcattcttcccccttggagccaagacgattggccagacatcacctcagatctgagaccagcgtcttccatctctcagagccttactcccaaagtacctgctcactgttccgtgttgaacaattgccggtgtttcctctcttcactggtttccatgagtacccttatatttcacaactttctgttcataagttatagtgacattgctctttggtaaaaatgcctgctttccaatactttgattgcatattagacattcttaacagggcggcagtctagtgttgaaagttttatttttccatttttcttttaagtaaattttttttaaaaaattctgatttagggctaggtgtggtggctcaggcctgtaatcctggcactttgggaggccaaggtgggaagatcgcttgaggccaagagttcaagaccagcctgggcaacatagcgagacccctatctgtattaaaaaaaaatctgatttaattcttttatttatcataaggggtttaattcctgaagtaaaggtttgcacctattaaacttaaaactgccaaatgatttttgttcttttatgtgcgtgataaaaatacaaagaatggtgtggccacctcctccctttcaagctagggcagcaggtagctcttcccagcccctgagcccagccccttcccaagtggtgccggacaaaaaactacatggccctttcgtgtcttgggggtggaaagggagggatgaattggggtgatagaaccctggtgaattcagagtaatctttctttagaaaactggtgttttctaaagaaacaggataggagtttagagaaggcaccaaagctttcactttggtttggcaccagtttctaaccatctgttttttctaccctagctatcttttattggtaaaatataaatgtataattatgtttgtagagctttaccaaggagtttccctccttttttgtttgttgattagcaaatttttgattctccattttccaaaagtaagagactccagcatggccttctgtttgccccgcagtaaagtaacttccatataaaatggtatttgaaagtgagagttcatgacaacagaccgttttccatttcatctgtattttatctccgtgactccaacttgtgggtttgttctgtttttccatgagaataaaatactggcggtttttttctcagatgtgtgttcattgagaagtaggttactagaattatgttactgtgtcttattggttcaatgatgatttctctggcatattagacttttattttttcccccatggaagcacttgaggaaataaatagtacactggctgttttctgccagcaactgtggtgatttttctccctgtcctttgagaattgctagtctgcttctgagccattgtcatatccagcagggagcagcttggttcaagaaggaccatagaggctgctcagcatctcctccctccctcccagcttgccagggatttgatgagacaggaaactgcccagcaaaccagggactgcccatgtaaactatttaagaaaaagttcaacccaggtcttgtatcctgtgatttagcagttgaatgaatacagaattcatcaaaataatattaaccttgtacttgcacacttggatatatttgggagtaattttaggagatttctggctgacttttattatcagggatatgggtttagtaaagcttttatctttagaaaaatgtttgtatgcattataagatgctacttttaagacaatattgaaaaaaactttggttattatttaacaaaagtggtatgacttgatgcttctctatttaaaggcaaggaaggattggtatatgattgcctgtaataaataaattgcgtgattattggagtacattggggtaaaagtaaagaacagaggagtattgaggagcttgaaagggaacattcaaactaaagccaagcctgaagataacttgaatcagttgtaaaagtgtgttggcaatgtccgaaattgaatgaaaaacatctggcttataagaaatgttaaagaactaccatcttaagtaaaattggtgtttttgttatttttaaggtaaatgccaatgcaaaaggtatgtttttctacttcacattggttttcttttcctgtttacatctgcacttgttttttgctgagagccagaggaaaagataattagactttgtctcttccacccatgaaatcccccagtacccagggcttcttctgaactactgccgatgtgatgtcactttgtatctggaaaatcactttggggtccatttactgttattttgttgcctacaaaaacagccaggtgaaagctaaatcttgtgtgagagtttgcagaggtttttctatacaataaagtagtatagcacactagccaaatcc

SEQ ID NO: 389927 - DNA, 3252 bp, Homo sapiens
tcaccctgttagaactgtatatgctttgtgtgtatgtgtatccttattagtgtccaaacttaactagggattaagaggatgggtttggaatcagactgtccagctgcctttctagctttgggatttggggtgcaaagcttatatttcccttgtatgagatgagaataataaccctatttcgtaggttatcctatttcataaggattaaatctttaaaatacatatgaagcagataggatatttctggtagttatattagatatgattacttccaaatttatattgggatggatatgtttttatacatatatgaaatgtcacatacataatggtgttttttcctgtttaaaaatgtttaattgtagaatacgtgaaaagcaaaagcacaatgaagaaaatgtgagagtatccataatccctaactcagaaataaccactatatgactttgtagaaacacatatagaggcatttaaagacatcttatttgatatcatactattggttgtttttaaccttttaaaaaattactttgtaatattgtcactccaattcaaatatttttccccaactactttgtgataaaagcagttaaatttcccaaagtaaataggcttaaaatattaacaactttattgctttctccccctattcctagttgctgggcatattggattttacccatcataggcgctgttctcttaggtttcctgtaccgctactacacatcggaaagcaaatcctcctgaggaggccttgctgaagttagaaagtgcatccactttggggcgaaaactagagacttgcttgggggctgcagaagtgccctctcctcgaatcctgccagttgcattcttcccccttggagccaagacgattggccagacatcacctcagatctgagaccagcgtcttccatctctcagagccttactcccaaagtacctgctcactgttccgtgttgaacaattgccggtgtttcctctcttcactggtttccatgagtacccttatatttcacaactttctgttcataagttatagtgacattgctctttggtaaaaatgcctgctttccaatactttgattgcatattagacattcttaacagggcggcagtctagtgttgaaagttttatttttccatttttcttttaagtaaattttttttaaaaaattctgatttagggctaggtgtggtggctcaggcctgtaatcctggcactttgggaggccaaggtgggaagatcgcttgaggccaagagttcaagaccagcctgggcaacatagcgagacccctatctgtattaaaaaaaaatctgatttaattcttttatttatcataaggggtttaattcctgaagtaaaggtttgcacctattaaacttaaaactgccaaatgatttttgttcttttatgtgcgtgataaaaatacaaagaatggtgtggccacctcctccctttcaagctagggcagcaggtagctcttcccagcccctgagcccagccccttcccaagtggtgccggacaaaaaactacatggccctttcgtgtcttgggggtggaaagggagggatgaattggggtgatagaaccctggtgaattcagagtaatctttctttagaaaactggtgttttctaaagaaacaggataggagtttagagaaggcaccaaagctttcactttggtttggcaccagtttctaaccatctgttttttctaccctagctatcttttattggtaaaatataaatgtataattatgtttgtagagctttaccaaggagtttccctccttttttgtttgttgattagcaaatttttgattctccattttccaaaagtaagagactccagcatggccttctgtttgccccgcagtaaagtaacttccatataaaatggtatttgaaagtgagagttcatgacaacagaccgttttccatttcatctgtattttatctccgtgactccaacttgtgggtttgttctgtttttccatgagaataaaatactggcggtttttttctcagatgtgtgttcattgagaagtaggttactagaattatgttactgtgtcttattggttcaatgatgatttctctggcatattagacttttattttttcccccatggaagcacttgaggaaataaatagtacactggctgttttctgccagcaactgtggtgatttttctccctgtcctttgagaattgctagtctgcttctgagccattgtcatatccagcagggagcagcttggttcaagaaggaccatagaggctgctcagcatctcctccctccctcccagcttgccagggatttgatgagacaggaaactgcccagcaaaccagggactgcccatgtaaactatttaagaaaaagttcaacccaggtcttgtatcctgtgatttagcagttgaatgaatacagaattcatcaaaataatattaaccttgtacttgcacacttggatatatttgggagtaattttaggagatttctggctgacttttattatcagggatatgggtttagtaaagcttttatctttagaaaaatgtttgtatgcattataagatgctacttttaagacaatattgaaaaaaactttggttattatttaacaaaagtggtatgacttgatgcttctctatttaaaggcaaggaaggattggtatatgattgcctgtaataaataaattgcgtgattattggagtacattggggtaaaagtaaagaacagaggagtattgaggagcttgaaagggaacattcaaactaaagccaagcctgaagataacttgaatcagttgtaaaagtgtgttggcaatgtccgaaattgaatgaaaaacatctggcttataagaaatgttaaagaactaccatcttaagtaaaattggtgtttttgttatttttaaggtaaatgccaatgcaaaaggtatgtttttctacttcacattggttttcttttcctgtttacatctgcacttgttttttgctgagagccagaggaaaagataattagactttgtctcttccacccatgaaatcccccagtacccagggcttcttctgaactactgccgatgtgatgtcactttgtatctggaaaatcactttggggtccatttactgttattttgttgcctacaaaaacagccaggtgaaagctaaatcttgtgtgagagtttgcagaggtttttctatacaataaagtagtatagcacactagccaaatcc

SEQ ID NO: 389928 - DNA, 2462 bp, Homo sapiens
atctcactgcaacctctgcctcccaggtgcaagcagttatcctgcctcagcctcccaagtagctgggattacaggcatgtgccaccatggctggctaatttttgtatttttagtagagacggggtttcgccatgttggccaggctagtctctaactcctgacctcaagtgatccgcccacctcgacctcccaaagtgctgggattacaggtgtgagccaccgtacccggctgtaaatggtggtatagctagctgataccacctctttggtaaaaatgcctgctttccaatactttgattgcatattagacattcttaacagggcggcagtctagtgttgaaagttttatttttccatttttcttttaagtaaattttttttaaaaaattctgatttagggctaggtgtggtggctcaggcctgtaatcctggcactttgggaggccaaggtgggaagatcgcttgaggccaagagttcaagaccagcctgggcaacatagcgagacccctatctgtattaaaaaaaaatctgatttaattcttttatttatcataaggggtttaattcctgaagtaaaggtttgcacctattaaacttaaaactgccaaatgatttttgttcttttatgtgcgtgataaaaatacaaagaatggtgtggccacctcctccctttcaagctagggcagcaggtagctcttcccagcccctgagcccagccccttcccaagtggtgccggacaaaaaactacatggccctttcgtgtcttgggggtggaaagggagggatgaattggggtgatagaaccctggtgaattcagagtaatctttctttagaaaactggtgttttctaaagaaacaggataggagtttagagaaggcaccaaagctttcactttggtttggcaccagtttctaaccatctgttttttctaccctagctatcttttattggtaaaatataaatgtataattatgtttgtagagctttaccaaggagtttccctccttttttgtttgttgattagcaaatttttgattctccattttccaaaagtaagagactccagcatggccttctgtttgccccgcagtaaagtaacttccatataaaatggtatttgaaagtgagagttcatgacaacagaccgttttccatttcatctgtattttatctccgtgactccaacttgtgggtttgttctgtttttccatgagaataaaatactggcggtttttttctcagatgtgtgttcattgagaagtaggttactagaattatgttactgtgtcttattggttcaatgatgatttctctggcatattagacttttattttttcccccatggaagcacttgaggaaataaatagtacactggctgttttctgccagcaactgtggtgatttttctccctgtcctttgagaattgctagtctgcttctgagccattgtcatatccagcagggagcagcttggttcaagaaggaccatagaggctgctcagcatctcctccctccctcccagcttgccagggatttgatgagacaggaaactgcccagcaaaccagggactgcccatgtaaactatttaagaaaaagttcaacccaggtcttgtatcctgtgatttagcagttgaatgaatacagaattcatcaaaataatattaaccttgtacttgcacacttggatatatttgggagtaattttaggagatttctggctgacttttattatcagggatatgggtttagtaaagcttttatctttagaaaaatgtttgtatgcattataagatgctacttttaagacaatattgaaaaaaactttggttattatttaacaaaagtggtatgacttgatgcttctctatttaaaggcaaggaaggattggtatatgattgcctgtaataaataaattgcgtgattattggagtacattggggtaaaagtaaagaacagaggagtattgaggagcttgaaagggaacattcaaactaaagccaagcctgaagataacttgaatcagttgtaaaagtgtgttggcaatgtccgaaattgaatgaaaaacatctggcttataagaaatgttaaagaactaccatcttaagtaaaattggtgtttttgttatttttaaggtaaatgccaatgcaaaaggtatgtttttctacttcacattggttttcttttcctgtttacatctgcacttgttttttgctgagagccagaggaaaagataattagactttgtctcttccacccatgaaatcccccagtacccagggcttcttctgaactactgccgatgtgatgtcactttgtatctggaaaatcactttggggtccatttactgttattttgttgcctacaaaaacagccaggtgaaagctaaatcttgtgtgagagtttgcagaggtttttctatacaataaagtagtatagcacactagccaaatcc

SEQ ID NO: 389929 - DNA, 3494 bp, Homo sapiens
gtggtttgtgctttatttttaggctcaattcagctagaggcacacaacaaagcagaagacaggagtaggcctggacccaagtgaagcgcaggtggggtgtgaatcctaggcagctggcttctcaggcataggtggtgacatactggggccccatgttcccgaagtaggaacgttcccactcactcatgagctcaaagtgtacaggacggcgacagaaattgcaggcagccacagacacatcctggaggggcagccccaccgcagtccaagccagcagcagcttctccacaaaatcttccatcatctgagggctgtggtggggggagggtgccaagcgcaggagctcttcaccccgggggacagttgggtagttgatggcctgcacatagatgccatgcttggagagcaggagatcacagagcttgctgttgagtgctgcattgcccacccggatggggatgatgtggctggggcaggggatgacaggaaggcccctgtccatgagtagctggcgcatgtgcttgacattgcgctggtgggctcgcctcagggcttggccctcctctcccttgagcagccgcacagattctagagctccagagagcaccatggggggcagagaagtggtaaagatgaagcctgcagcataggagcgcaccatgtccaccaagtcacgggtgctggcaatgtagccgcccacacagccaaaggccttgccaagagttccagagatgatgtcaatcttatgcataattccatcacgctccccaatcccagcgccccgggacccatacagtcctacagcatggacctcatccacgaaggtcagggccccatactggtgggacacatcacacaactcctcgaggggacagatggcaccatccatggagtggacagtctcaaaggccacaattttgggtatcttagggttagacttctctagaagtttctttaggtggtcagggtcattgtgcctgaagacaaacttggctgctccacttggttacggaagccgaggaaggctgagcgcgggctctcaaggaaagtagtcgcggaatctcagttagcggtggagaggcagtatgtccggttcaatggcgactgcggaagctagcggcagcgatgggaaagggcaggaagtcgagacctcagtcacctattaccggttggaggaggtggcaaagcgcaactccttgaaggaactgtggcttgtgatccatgggcgagtctacgatgtcacccgcttcctcaacgagcaccctggaggagaagaggttctgctggaacaagctggtgtagatgcaagtgaaagctttgaagatgtaggacactcttctgatgccagagaaatgctaaagcagtactacattggtgatatccatccgagtgaccttaaacctgaaagtggtagcaaggtaagaagtcagcggtttgtcttgtgtttatatttgtgtttactcaagtaggactgctttttgaaacattttttcttaacaagagaagttacaaagtatttactttttccccaagcaaaaatcctatttttctggaatttggactcagtatcatctcaggaataaaagaatagctgagtcttgaacagtaggaaacattttgctaatgcctttatacgctttttttttttaactgaaactccaaagctatgccctgtgtggttttgaaagaaattagtttatgggttcagttgtggaaaaatatcttacttttacattatgtaggacaagtgataataattgtttctgtgttggaaaaaaataattgcaaagttgttttgtttcttataggttatcttctttatctgtaatacagaggcctttctgtacttattttccaaatttaattcttttttcctgtaggctcaaacaggcccacacccttcccggttacttagtaatacagcgaaaacaaaagactaagtatttgagtgtttgaaaactttaatgtgtactacattgcataccaggaagaaaatatggaaccattttctgcctcccacatgctaggtggttcatttcccttattccctaacaattttccttaatttctgtccttcagatagctggtacacagcactctaatttaaagggacagcagtttaggtgccacctagaacataggaaagtgatgctgcctcccttccattttcctcctccttgctgcttgcttcccattcctcattgagccgaaattactgaataggtttgacacagcaattaaagttggcctagacacaagaattctattaactcaagagattgcttgcttaacagtgtctgccatctgttgccctgcaatccagagtgtttgtgtaaattaactcttccatgttgctagactgctactctgaactattgaattgtttctgaaaggggaatgaaatggttcttaaaacactttgtaacaactgttggttgtttgtcctctcctcctaacacatgtactatccattcttgaatccttaaaaaaaaaaaattaaatagttcaaaacagtattctgtaaaaagtttcttcctgtctcaagctctcagtgtcttagttccccttccctggaggtaaccagccatcattttttgttgttgcttactcttaataacttgtgttattatggtaaaatttgaacgaagcgtggccttgatttgtatattgaacatgtccagaaaataccactttcagaggtcaacatctgattcaaaggatataggagccataacacatttctgcacagcaactatgagagcatcttttatattaaaacaatagaaaaaatatgtttgcaattacaatgtctagaagtctacagattgcttcttgttgctgtttttctttcttggtagtacagttaggaccattcttaggaatgtagaacaatgttccccaaattctgttcttgtatcacctcagttggaatcccttggtatgtacatgaatatatataggaaatgtttatttcttgggcttctactcctactgctttggaatctctggagatagggtttaggaatttgcaatttaagtaatctaggtgataagtaggtagctaagcccaaactttttgctgaatgatatgcccatcttttcatttgaaaacttaggaaaatttaattctcttctgtggtaagcattgtctgccttctataggccaaaggattagagatttctcagctgaattaaaactattgagccatccaggtgcagtggctcacgcctgtaatccctacactttgggaggctgagatgggaggatggcttgagcccagcacttggagaccagcctgggcaacatggtgagaccctgtctctattttttaaaaatcataaaattagctgagcattataatgtgtgcctgcagtcccaactactggggaggctgaggctggaggatagcttgagcccgggagtttgaggctgcagtgagccatggtaacaccattgcacttccatctgggtaacacagcatgaccccatctca

SEQ ID NO: 389930 - DNA, 1420 bp, Homo sapiens
gtggtttgtgctttatttttaggctcaattcagctagaggcacacaacaaagcagaagacaggagtaggcctggacccaagtgaagcgcaggtggggtgtgaatcctaggcagctggcttctcaggcataggtggtgacatactggggccccatgttcccgaagtaggaacgttcccactcactcatgagctcaaagtgtacaggacggcgacagaaattgcaggcagccacagacacatcctggaggggcagccccaccgcagtccaagccagcagcagcttctccacaaaatcttccatcatctgagggctgtggtggggggagggtgccaagcgcaggagctcttcaccccgggggacagttgggtagttgatggcctgcacatagatgccatgcttggagagcaggagatcacagagcttgctgttgagtgctgcattgcccacccggatggggatgatgtggctggggcaggggatgacaggaaggcccctgtccatgagtagctggcgcatgtgcttgacattgcgctggtgggctcgcctcagggcttggccctcctctcccttgagcagccgcacagattctagagctccagagagcaccatggggggcagagaagtggtaaagatgaagcctgcagcataggagcgcaccatgtccaccaagtcacgggtgctggcaatgtagccgcccacacagccaaaggccttgccaagagttccagagatgatgtcaatcttatgcataattccatcacgctccccaatcccagcgccccgggacccatacagtcctacagcatggacctcatccacgaaggtcagggccccatactggtgggacacatcacacaactcctcgaggggacagatggcaccatccatggagtggacagtctcaaaggccacaattttgggtatcttagggttagacttctctagaagtttctttaggtggtcagggtcattgtgcctgaagacaaacttggctgctccacttggttacggaagccgaggaaggctgagcgcgggctctcaaggaaagtagtcgcggaatctcagttagcggtggagaggcagtatgtccggttcaatggcgactgcggaagctagcggcagcgatgggaaagggcaggaagtcgagacctcagtcacctattaccggttggaggaggtggcaaagcgcaactccttgaaggaactgtggcttgtgatccatgggcgagtctacgatgtcacccgcttcctcaacgagcctctactcttcatggatcttttggatgaaagaacactcgtggcagtagaacggcctctggatgacatcattgctcagctcccaccacccattaaaaagaagaaatttggaacctaaaacagggcactgtctgtgtccttccttgaactgtctaccctgtt

SEQ ID NO: 389931 - DNA, 423 bp, Homo sapiens
tagtaattatggactttaaaaactatccatatataccattctaacaagggactctgatatgctcagagtagaggtatctttctatggatcctcaaatctcccagggaattcactatcaccagaatatagtctcatgttccaaagttagaaacaagcatatagtgagaattcatttggctatgtcttaaaatattatttgttttcctttttttgacagagtgaccttaaacctgaaagtggtagcaaggtaagaagtcagcggtttgtcttgtgtttatatttgtgtttactcaagtaggactgctttttgaaacattttttcttaacaagagaagttacaaagtatttactttttccccaagcaaaaatcctatttttctggaatttggactcagtatcatctcaggaataaaagaatagctg

SEQ ID NO: 389932 - DNA, 781 bp, Homo sapiens
caaggaaagtagtcgcggaatctcagttagcggtggagaggcagtatgtccggttcaatggcgactgcggaagctagcggcagcgatgggaaagggcaggaagtcgagacctcagtcacctattaccggttggaggaggtggcaaagcgcaactccttgaaggaactgtggcttgtgatccatgggcgagtctacgatgtcacccgcttcctcaacgaggtggggcctgggaggtgggaggcctctgaagctgctggggcgaggggtgaaaaggctgtgtggagtgtatgtgggaaggaagggaggcttggctgggggcgataaggcgtaagaaagggatcacgaccctcagagggaaactggggtgggattgggggagggctttagtttgcatgcatttccagtcagctccgagttctggtgccttatgtaatatcatgtattacttatgtgtcgagcatttgctgtgtgctcagctaaactctaagccatcattatctttattttacagaaagggaaactgaggctcacaggttgaggactctcagggccatagagttagcagcttagatccgttgaacctaggtctgaagtgcacccacatctgtgcttttccagtgtgccttctgaagtaataccggttttggttttcgtcttctagagtagaagctgagatttctctccacacgcttccccatcttgattatgcctccactgtttttttttccccctaatctgagttgaccttgaggccagaaactcataaatcaacccttttttt

SEQ ID NO: 389933 - DNA, 1886 bp, Homo sapiens
gaaccaggaactattcggaagtgtgattggctgttgctaggaaccgtctcaaggccttatgggccctggttacggaagccgaggaaggctgagcgcgggctctcaaggaaagtagtcgcggaatctcagttagcggtggagaggcagtatgtccggttcaatggcgactgcggaagctagcggcagcgatgggaaagggcaggaagtcgagacctcagtcacctattaccggttggaggaggtggcaaagcgcaactccttgaaggaactgtggcttgtgatccatgggcgagtctacgatgtcacccgcttcctcaacgagcaccctggaggagaagaggttctgctggaacaagctggtgtagatgcaagtgaaagctttgaagatgtaggacactcttctgatgccagagaaatgctaaagcagtactacattggtgatatccatccgagtgaccttaaacctgaaagtggtagcaaggacccttcaaaaaatgatacatgcaaaagttgctgggcatattggattttacccatcataggcgctgttctcttaggtttcctgtaccgctactacacatcggaaagcaaatcctcctgaggaggccttgctgaagttagaaagtgcatccactttggggcgaaaactagagacttgcttgggggctgcagaagtgccctctcctcgaatcctgccagttgcattcttcccccttggagccaagacgattggccagacatcacctcagatctgagaccagcgtcttccatctctcagagccttactcccaaagtacctgctcactgttccgtgttgaacaattgccggtgtttcctctcttcactggtttccatgagtacccttatatttcacaactttctgttcataagttatagtgacattgctctttggtaaaaatgcctgctttccaatactttgattgcatattagacattcttaacagggcggcagtctagtgttgaaagttttatttttccatttttcttttaagtaaattttttttaaaaaattctgatttagggctaggtgtggtggctcaggcctgtaatcctggcactttgggaggccaaggtgggaagatcgcttgaggccaagagttcaagaccagcctgggcaacatagcgagacccctatctgtattaaaaaaaaatctgatttaattcttttatttatcataaggggtttaattcctgaagtaaaggtttgcacctattaaacttaaaactgccaaatgatttttgttcttttatgtgcgtgataaaaatacaaagaatggtgtggccacctcctccctttcaagctagggcagcaggtagctcttcccagcccctgagcccagccccttcccaagtggtgccggacaaaaaactacatggccctttcgtgtcttgggggtggaaagggagggatgaattggggtgatagaaccctggtgaattcagagtaatctttctttagaaaactggtgttttctaaagaaacaggataggagtttagagaaggcaccaaagctttcactttggtttggcaccagtttctaaccatctgttttttctaccctagctatcttttattggtaaaatataaatgtataattatgtttgtagagctttaccaaggagtttccctccttttttgtttgttgattagcaaatttttgattctccattttccaaaagtaagagactccagcatggccttctgtttgccccgcagtaaagtaacttccatataaaatggtatttgaaagtgagagttcatgacaacagaccgttttccatttcatctgtattttatctccgtgactccaacttgtgggtttgttctgtttttccatgagaataaaatactggcggtttttttc

SEQ ID NO: 389934 - DNA, 3397 bp, Homo sapiens
  misc_feature (2988)..(2988): n is a, c, g, or t
  misc_feature (2993)..(2993): n is a, c, g, or t
gtggtttgtgctttatttttaggctcaattcagctagaggcacacaacaaagcagaagacaggagtaggcctggacccaagtgaagcgcaggtggggtgtgaatcctaggcagctggcttctcaggcataggtggtgacatactggggccccatgttcccgaagtaggaacgttcccactcactcatgagctcaaagtgtacaggacggcgacagaaattgcaggcagccacagacacatcctggaggggcagccccaccgcagtccaagccagcagcagcttctccacaaaatcttccatcatctgagggctgtggtggggggagggtgccaagcgcaggagctcttcaccccgggggacagttgggtagttgatggcctgcacatagatgccatgcttggagagcaggagatcacagagcttgctgttgagtgctgcattgcccacccggatggggatgatgtggctggggcaggggatgacaggaaggcccctgtccatgagtagctggcgcatgtgcttgacattgcgctggtgggctcgcctcagggcttggccctcctctcccttgagcagccgcacagattctagagctccagagagcaccatggggggcagagaagtggtaaagatgaagcctgcagcataggagcgcaccatgtccaccaagtcacgggtgctggcaatgtagccgcccacacagccaaaggccttgccaagagttccagagatgatgtcaatcttatgcataattccatcacgctccccaatcccagcgccccgggacccatacagtcctacagcatggacctcatccacgaaggtcagggccccatactggtgggacacatcacacaactcctcgaggggacagatggcaccatccatggagtggacagtctcaaaggccacaattttgggtatcttagggttagacttctctagaagtttctttaggtggtcagggtcattgtgcctgaagacaaacttggctgctccacttggttacggaagccgaggaaggctgagcgcgggctctcaaggaaagtagtcgcggaatctcagttagcggtggagaggcagtatgtccggttcaatggcgactgcggaagctagcggcagcgatgggaaagggcaggaagtcgagacctcagtcacctattaccggttggaggaggtggcaaagcgcaactccttgaaggaactgtggcttgtgatccatgggcgagtctacgatgtcacccgcttcctcaacgagcaccctggaggagaagaggttctgctggaacaagctggtgtagatgcaagtgaaagctttgaagatgtaggacactcttctgatgccagagaaatgctaaagcagtactacattggtgatatccatccgagtgaccttaaacctgaaagtggtagcaaggacccttcaaaaaatgatacatgcaaaagttgctgggcatattggattttacccatcataggcgctgttctcttaggtttcctgtaccgctactacacatcggaaagcaaatcctcctgaggaggccttgctgaagttagaaagtgcatccactttggggcgaaaactagagacttgcttgggggctgcagaagtgccctctcctcgaatcctgccagttgcattcttcccccttggagccaagacgattggccagacatcacctcagatctgagaccagcgtcttccatctctcagagccttactcccaaagtacctgctcactgttccgtgttgaacaattgccggtgtttcctctcttcactggtttccatgagtacccttatatttcacaactttctgttcataagttatagtgacattgctctttggtaaaaatgcctgctttccaatactttgattgcatattagacattcttaacagggcggcagtctagtgttgaaagttttatttttccatttttcttttaagtaaattttttttaaaaaattctgatttagggctaggtgtggtggctcaggcctgtaatcctggcactttgggaggccaaggtgggaagatcgcttgaggccaagagttcaagaccagcctgggcaacatagcgagacccctatctgtattaaaaaaaaatctgatttaattcttttatttatcataaggggtttaattcctgaagtaaaggtttgcacctattaaacttaaaactgccaaatgatttttgttcttttatgtgcgtgataaaaatacaaagaatggtgtggccacctcctccctttcaagctagggcagcaggtagctcttcccagcccctgagcccagccccttcccaagtggtgccggacaaaaaactacatggccctttcgtgtcttgggggtggaaagggagggatgaattggggtgatagaaccctggtgaattcagagtaatctttctttagaaaactggtgttttctaaagaaacaggataggagtttagagaaggcaccaaagctttcactttggtttggcaccagtttctaaccatctgttttttctaccctagctatcttttattggtaaaatataaatgtataattatgtttgtagagctttaccaaggagtttccctccttttttgtttgttgattagcaaatttttgattctccattttccaaaagtaagagactccagcatggccttctgtttgccccgcagtaaagtaacttccatataaaatggtatttgaaagtgagagttcatgacaacagaccgttttccatttcatctgtattttatctccgtgactccaacttgtgggtttgttctgtttttccatgagaataaaatactggcggtttttttctcagatgtgtgttcattgagaagtaggttactagaattatgttactgtgtcttattggttcaatgatgatttctctggcatattagacttttattttttcccccatggaagcacttgaggaaataaatagtacactggctgttttctgccaaaaaaaaaaaaaanaaaanaaaaaaaaacaaatttaaaaaaaaaacaaaaaaaaaaaaaaaaaattttttgtggccccccggcgccccccaagaagagaatctttcttaaacccacactcttgcgtggtgaggcgcggccgggccccccggagtgaggtaagtcaaagaacagagtgtgagccacagaagtgtttcccgagagggaacacccggggggaaagaacaaagaggcgcggggattctctctcaccccaatataaaaaagaagcccgcggggggggaaaaaccacgaggtgttcttttggagaacaatatctccacgaaagagggagtattcgagagagggcactaacaaccggaggattcttataccaaggggaggcgttccaaaggagcaacccccaaaatttataatattcgcg

SEQ ID NO: 389935 - DNA, 2403 bp, Homo sapiens
  misc_feature (1982)..(1982): n is a, c, g, or t
  misc_feature (1987)..(1987): n is a, c, g, or t
gtggtttgtgctttatttttaggctcaattcagctagaggcacacaacaaagcagaagacaggagtaggcctggacccaagtgaagcgcaggtggggtgtgaatcctaggcagctggcttctcaggcataggtggtgacatactggggccccatgttcccgaagtaggaacgttcccactcactcatgagctcaaagtgtacaggacggcgacagaaattgcaggcagccacagacacatcctggaggggcagccccaccgcagtccaagccagcagcagcttctccacaaaatcttccatcatctgagggctgtggtggggggagggtgccaagcgcaggagctcttcaccccgggggacagttgggtagttgatggcctgcacatagatgccatgcttggagagcaggagatcacagagcttgctgttgagtgctgcattgcccacccggatggggatgatgtggctggggcaggggatgacaggaaggcccctgtccatgagtagctggcgcatgtgcttgacattgcgctggtgggctcgcctcagggcttggccctcctctcccttgagcagccgcacagattctagagctccagagagcaccatggggggcagagaagtggtaaagatgaagcctgcagcataggagcgcaccatgtccaccaagtcacgggtgctggcaatgtagccgcccacacagccaaaggccttgccaagagttccagagatgatgtcaatcttatgcataattccatcacgctccccaatcccagcgccccgggacccatacagtcctacagcatggacctcatccacgaaggtcagggccccatactggtgggacacatcacacaactcctcgaggggacagatggcaccatccatggagtggacagtctcaaaggccacaattttgggtatcttagggttagacttctctagaagtttctttaggtggtcagggtcattgtgcctgaagacaaacttggctgctccacttggttacggaagccgaggaaggctgagcgcgggctctcaaggaaagtagtcgcggaatctcagttagcggtggagaggcagtatgtccggttcaatggcgactgcggaagctagcggcagcgatgggaaagggcaggaagtcgagacctcagtcacctattaccggttggaggaggtggcaaagcgcaactccttgaaggaactgtggcttgtgatccatgggcgagtctacgatgtcacccgcttcctcaacgagcaccctggaggagaagaggttctgctggaacaagctggtgtagatgcaagtgaaagctttgaagatgtaggacactcttctgatgccagagaaatgctaaagcagtactacattggtgatatccatccgagtgaccttaaacctgaaagtggtagcaaggacccttcaaaaaatgatacatgcaaaagttgctgggcatattggattttacccatcataggcgctgttctcttaggtttcctgtaccgctactacacatcggaaagcaaatcctcctgaggaggccttgctgaagttagaaagtgcatccactttggggcgaaaactagagacttgcttgggggctgcagaagtgccctctcctcgaatcctgccagttgcattcttcccccttggagccaagacgattggccagacatcacctcagatctgagaccagcgtcttccatctctcagagccttactcccaaagtacctgctcactgttccgtgttgaacaattgccggtgtttcctctcttcactggtttccatgagtacccttatatttcacaactttctgttcataagttatagtgacattgctctttggtaaaaatgcctgctttccaatactttgattgcatattagacattcttaacagggcggcagtctagtgttgaaagttttatttttccatttttcttttaagtaaattttttttaaaaaaaaaaaaaaaaaaanaaaanaaaaaaaagggggggcgccgccaaaaaattctccccggggggcgccccaactgttccgcactctcaccccgttttttttgcccaagagggggcccccatgaggggggcgtattaaaaccaacggaaagcgggagcgccggctgtataaacaaggcgcggatgcggggaaaacgcgcgtccaacacgcgggaccctgctggcgagaagggaaccctgacttgcgcgggggggtggcaacaacaggtgggggcaaccatccctcaacgagacttaagagctctgcaggggcgaacatcttcacacttccgcggctgcctcgggtgctcaccccagcgggctacatgcagcggcccgcaaaactctggccccagggagacctatctcggcaaaattttcacgcgacggcgaaaaacagt

SEQ ID NO: 389936 - DNA, 1248 bp, Homo sapiens
gaaccaggaactattcggaagtgtgattggctgttgctaggaaccgtctcaaggccttatgggccctggttacggaagccgaggaaggctgagcgcgggctctcaaggaaagtagtcgcggaatctcagttagcggtggagaggcagtatgtccggttcaatggcgactgcggaagctagcggcagcgatgggaaagggcaggaagtcgagacctcagtcacctattaccggttggaggaggtggcaaagcgcaactccttgaaggaactgtggcttgtgatccatgggcgagtctacgatgtcacccgcttcctcaacgagcaccctggaggagaagaggttctgctggaacaagctggtgtagatgcaagtgaaagctttgaagatgtaggacactcttctgatgccagagaaatgctaaagcagtactacattggtgatatccatccgagtgaccttaaacctgaaagtggtagcaaggacccttcaaaaaatgatacatgcaaaagttgctgggcatattggattttacccatcataggcgctgttctcttaggtttcctgtaccgctactacacatcggaaagcaaatcctcctgaggaggccttgctgaagttagaaagtgcatccactttggggcgaaaactagagacttgcttgggggctgcagaagtgccctctcctcgaatcctgccagttgcattcttcccccttggagccaagacgattggccagacatcacctcagatctgagaccagcgtcttccatctctcagagccttactcccaaagtacctgctcactgttccgtgttgaacaattgccggtgtttcctctcttcactggtttccatgagtacccttatatttcacaactttctgttcataagttatagtgacattgcgtttggcaccagtttctaaccatctgttttttctaccctagctatcttttattggtaaaatataaatgtataattatgtttgtagagctttaccaaggagtttccctccttttttgtttgttgattagcaaatttttgattctccattttccaaaagtaagagactccagcatggccttctgtttgccccgcagtaaagtaacttccatataaaatggtatttgaaagtgagagttcatgacaacagaccgttttccatttcatctgtattttatctccgtgactccaacttgtgggtttgttctgtttttccatgagaataaaatactggcggtttttttc

SEQ ID NO: 389937 - DNA, 3121 bp, Homo sapiens
gtggtttgtgctttatttttaggctcaattcagctagaggcacacaacaaagcagaagacaggagtaggcctggacccaagtgaagcgcaggtggggtgtgaatcctaggcagctggcttctcaggcataggtggtgacatactggggccccatgttcccgaagtaggaacgttcccactcactcatgagctcaaagtgtacaggacggcgacagaaattgcaggcagccacagacacatcctggaggggcagccccaccgcagtccaagccagcagcagcttctccacaaaatcttccatcatctgagggctgtggtggggggagggtgccaagcgcaggagctcttcaccccgggggacagttgggtagttgatggcctgcacatagatgccatgcttggagagcaggagatcacagagcttgctgttgagtgctgcattgcccacccggatggggatgatgtggctggggcaggggatgacaggaaggcccctgtccatgagtagctggcgcatgtgcttgacattgcgctggtgggctcgcctcagggcttggccctcctctcccttgagcagccgcacagattctagagctccagagagcaccatggggggcagagaagtggtaaagatgaagcctgcagcataggagcgcaccatgtccaccaagtcacgggtgctggcaatgtagccgcccacacagccaaaggccttgccaagagttccagagatgatgtcaatcttatgcataattccatcacgctccccaatcccagcgccccgggacccatacagtcctacagcatggacctcatccacgaaggtcagggccccatactggtgggacacatcacacaactcctcgaggggacagatggcaccatccatggagtggacagtctcaaaggccacaattttgggtatcttagggttagacttctctagaagtttctttaggtggtcagggtcattgtgcctgaagacaaacttggctgctccacttggttacggaagccgaggaaggctgagcgcgggctctcaaggaaagtagtcgcggaatctcagttagcggtggagaggcagtatgtccggttcaatggcgactgcggaagctagcggcagcgatgggaaagggcaggaagtcgagacctcagtcacctattaccggttggaggaggtggcaaagcgcaactccttgaaggaactgtggcttgtgatccatgggcgagtctacgatgtcacccgcttcctcaacgagcaccctggaggagaagaggttctgctggaacaagctggtgtagatgcaagtgaaagctttgaagatgtaggacactcttctgatgccagagaaatgctaaagcagtactacattggtgatatccatccgtggtgccggacaaaaaactacatggccctttcgtgtcttgggggtggaaagggagggatgaattggggtgatagaaccctggtgaattcagagtaatctttctttagaaaactggtgttttctaaagaaacaggataggagtttagagaaggcaccaaagctttcactttggtttggcaccagtttctaaccatctgttttttctaccctagctatcttttattggtaaaatataaatgtataattatgtttgtagagctttaccaaggagtttccctccttttttgtttgttgattagcaaatttttgattctccattttccaaaagtaagagactccagcatggccttctgtttgccccgcagtaaagtaacttccatataaaatggtatttgaaagtgagagttcatgacaacagaccgttttccatttcatctgtattttatctccgtgactccaacttgtgggtttgttctgtttttccatgagaataaaatactggcggtttttttctcagatgtgtgttcattgagaagtaggttactagaattatgttactgtgtcttattggttcaatgatgatttctctggcatattagacttttattttttcccccatggaagcacttgaggaaataaatagtacactggctgttttctgccagcaactgtggtgatttttctccctgtcctttgagaattgctagtctgcttctgagccattgtcatatccagcagggagcagcttggttcaagaaggaccatagaggctgctcagcatctcctccctccctcccagcttgccagggatttgatgagacaggaaactgcccagcaaaccagggactgcccatgtaaactatttaagaaaaagttcaacccaggtcttgtatcctgtgatttagcagttgaatgaatacagaattcatcaaaataatattaaccttgtacttgcacacttggatatatttgggagtaattttaggagatttctggctgacttttattatcagggatatgggtttagtaaagcttttatctttagaaaaatgtttgtatgcattataagatgctacttttaagacaatattgaaaaaaactttggttattatttaacaaaagtggtatgacttgatgcttctctatttaaaggcaaggaaggattggtatatgattgcctgtaataaataaattgcgtgattattggagtacattggggtaaaagtaaagaacagaggagtattgaggagcttgaaagggaacattcaaactaaagccaagcctgaagataacttgaatcagttgtaaaagtgtgttggcaatgtccgaaattgaatgaaaaacatctggcttataagaaatgttaaagaactaccatcttaagtaaaattggtgtttttgttatttttaaggtaaatgccaatgcaaaaggtatgtttttctacttcacattggttttcttttcctgtttacatctgcacttgttttttgctgagagccagaggaaaagataattagactttgtctcttccacccatgaaatcccccagtacccagggcttcttctgaactactgccgatgtgatgtcactttgtatctggaaaatcactttggggtccatttactgttattttgttgcctacaaaaacagccaggtgaaagctaaatcttgtgtgagagtttgcagaggtttttctatacaataaagtagtatagcacactagccaaatcc

SEQ ID NO: 389938 - DNA, 1984 bp, Homo sapiens
gtggtttgtgctttatttttaggctcaattcagctagaggcacacaacaaagcagaagacaggagtaggcctggacccaagtgaagcgcaggtggggtgtgaatcctaggcagctggcttctcaggcataggtggtgacatactggggccccatgttcccgaagtaggaacgttcccactcactcatgagctcaaagtgtacaggacggcgacagaaattgcaggcagccacagacacatcctggaggggcagccccaccgcagtccaagccagcagcagcttctccacaaaatcttccatcatctgagggctgtggtggggggagggtgccaagcgcaggagctcttcaccccgggggacagttgggtagttgatggcctgcacatagatgccatgcttggagagcaggagatcacagagcttgctgttgagtgctgcattgcccacccggatggggatgatgtggctggggcaggggatgacaggaaggcccctgtccatgagtagctggcgcatgtgcttgacattgcgctggtgggctcgcctcagggcttggccctcctctcccttgagcagccgcacagattctagagctccagagagcaccatggggggcagagaagtggtaaagatgaagcctgcagcataggagcgcaccatgtccaccaagtcacgggtgctggcaatgtagccgcccacacagccaaaggccttgccaagagttccagagatgatgtcaatcttatgcataattccatcacgctccccaatcccagcgccccgggacccatacagtcctacagcatggacctcatccacgaaggtcagggccccatactggtgggacacatcacacaactcctcgaggggacagatggcaccatccatggagtggacagtctcaaaggccacaattttgggtatcttagggttagacttctctagaagtttctttaggtggtcagggtcattgtgcctgaagacaaacttggctgctccacttggttacggaagccgaggaaggctgagcgcgggctctcaaggaaagtagtcgcggaatctcagttagcggtggagaggcagtatgtccggttcaatggcgactgcggaagctagcggcagcgatgggaaagggcaggaagtcgagacctcagtcacctattaccggttggaggaggtggcaaagcgcaactccttgaaggaactgtggcttgtgatccatgggcgagtctacgatgtcacccgcttcctcaacgagcaccctggaggagaagaggttctgctggaacaagctggtgtagatgcaagtgaaagctttgaagatgtaggacactcttctgatgccagagaaatgctaaagcagtactacattggtgatatccatccgagtgaccttaaacctgaaagtggtagcaaggacccttcaaaaaatgatacatgcaaaaggttagtatctccttaacagctttccatacgttcaaggtaatgtctggcaagagactcttccataagtatatgtatgtaacataacttatgagtgcagtttgacaactaattcttttttggcccaaatcattgcaaattcagttgttccttgacattagaaaaattaacttttacagtttcagccattttgaataatctaaaagtttcatgccttgagtcattttttaatcttattgtgacataaattggaatcacactcagtaagaggccaggatgcatggacaggtagctactattgggtcagcctttagtcccgaagttcaacccagctacatgattctacttaaaacttaatcgcatttacttctcacaaccactctgtaaggtaagtgctattattacatattgcaggagaaaaaaatactacggtcatatttaggaatttgggttttctcaggtttatttacaatatattccttggcattaatattagtaattcattagtattagctctgaaagttataaattgccttacct

SEQ ID NO: 389939 - DNA, 323 bp, Homo sapiens
acacacacacacacacacacacacacacacacacacacaccaaaaacaaacaaactgatttcacttgaaatatttagataactaaaaccaaaagcaaattaagtcgttctaagaggagtggtttcactcttcactattgctttatgtagacatgttcttcacatgagacattcttaatgctgggagaactgggacagattagaagaaggtggcttgttctcggttttaactggttagttaatttctactgttaatggctttttttttttgagacaaggtctcactctgtcacccaagctggagtgcagtggtgcaatctcagc

SEQ ID NO: 389940 - DNA, 420 bp, Homo sapiens
aacacgaaggagtccttgcctctcattcaggggtgcacacagacatgaccctaccatgcttttccttccatcccaatctccatggtcatctagtccaagctgtacgctctagtttttctcaaagtggagcttatgggtaacctccatcagaatagctggggagctaatgacacatggatcccagatcaaccaaggggattttagagacatggggcctagcccccaagtgactctgatgcatattaagacttgagcatcacaggtcaagaagtacacagatcccagttatcaacatagccagatggctggtggtagaagcaaccctgtccctgtagcacctctctgtgtcctgctcaaaagcattaaaacatcattcttagataagaacagagacaaaggatatgtctttaacactttaca

SEQ ID NO: 389941 - DNA, 929 bp, Homo sapiens
agatgcaaagcttctcagcatcgcacttaccatcatcaccaccatcccaacagacgactgagagctttttgcaaggtcgcaattgacaaagaggactaggtccttgcggtttagagtcagttaagagtccgtgtgaactcaaccttgcctttggcgtttgattttcagaggtttaaaatgaacttctcattgatgtcccactctacttgacttagcaggaaaaagactagagttgaacttgctaacccaggaaaagtttgtgcctgttagttaaaaaaaaaaggggggggtggaattctaatatcaatgtttctgtaaagttataatctgtggtttacatatgttatcactgaggtccatttgtacatgtattattagattatctccagatagggatgtgtcttctatttccattttctctgccagtgcctttatttcctagaatactgtttttcatggatagtgttttcttttgtatttcatctacactttcatcctcattcccactccttatttagaaaagaaaatcaagactccgtagaggattccctccctctgaaagaatcctccttgcagtttttagttctgtcttcaaacaatatccatgctttcaaaagactaattcagtagtgctttgtgcttcctagatccggtaaatataaattacacttgttttactgattaaactaagggaagaaaagagttggtcattgtatacgccttgacctctcccaagggtcgggtctgttgatcttctgagtgtcttcttggtattttttccttatttccagtggtatgtcctacacagtgcatccttaggccaggagacgcagtaggaaaatgactctacctttcatgagaaaagggtaccagttggtattagctgatcagagagttgctttaaaaataaaatgcttatgtattgatga

SEQ ID NO: 389942 - DNA, 156 bp, Homo sapiens
tgagttgtttattagcaggacttttgctgacattttccttactgcttttttgagacctggtttgaccacccagcattggttggctcccagcaagacttgagccatacgcggccatttagacatggatcacgtgtgtgtgagcaaagaccccaaaag

SEQ ID NO: 389943 - DNA, 811 bp, Homo sapiens
ccgatcacagattgtaatggtccttacgatttaaccccaatctatcttttggttccatcttacaatgttctctttcaacctctcctctcaccctagagtccctgctaaaacatcacactgcatgtccagacacctctgggcaactctaccacccctaaatctccagccctctgtgtctttgctggtgctttttatctggttggaacacccagcatctttcaagtcaaaatattactcatttctattaaggatagagataaggtaagaagaaaacactgggtattcgtgagaatcaatccgtgagtaacagaagaaaaaggtggttgagaggttttcattttgattgtaagtattacagagtgtctttcaaacacctaaatctcaactatgtctgggagatcgtcctggtatataacactttataaattagccaactatgatagtttatcgtagttcatacttgaatggcaccatcaaggttgaaacactgagtataagatatctctctgctcattcaatgacaaaatcaggtaagaaaaattctagcatggctagaacttaacaactgcctaaagtgaaatatgccttcttgttagcagggcagcagcgtatttgcctaattacattacaggaagttacattctaatccaagattgtttcattaacattaaaaatataatattcctcttataaattgtccaggtcccatgcccaggaggcattccatttttaggtattatcctcatgtttctgattttccccaaactctaccaattacaaggtgtttcacacacccttcttgaggaacatc

SEQ ID NO: 389944 - DNA, 514 bp, Homo sapiens
cagcatacgtcagcgttttcttctatgcactgataagaaagatcaaagactttagactttcactatttcatctaccgctctgtactacgaacttcaaagaggaaccaggagtacgggaggaacatgaaagtggacaaggagcgtgagcattgaagcacagccccacagggaggggtttaggcctccggatgactgcggggaggcctggataatatccagccttccacaagaagctgctggagcagagtgttccctgactcctccaaggaaaggacactccttttcgcgatctgctaagtgatgggtgtcttcccaggcactagcgttaccgcttgaccaaggagccctcaagcggcccttatgcgagcgtgacagaaggttcacctcttgccttctaggtcacttctcacaatgtcccttcatcacctgaccctatacctgccggttattcgtaggttatattagtaatgcaacaaaaagtaatattaaaagctaatgattaataatgtctaaa

SEQ ID NO: 389945 - DNA, 351 bp, Homo sapiens
cttaattcctaataaaaaaatcacaaaatataaagtctaacgtttagtgtcatctcttattggaatatgtcagcttccccagagacaatgcattgccgcaagtaactatttgaaacaaatccttctgtgatatctgaagacactcttctgaaaggctttctcttcaagagttgcaaagcagcactttcccacccctctctgcatccagccaaacaaagcaagcaaaggactgtttctctttgacttatattttacttgttagtcattttatatcattataattctgaaataaaataagccttaagagaaaaaaatccaccacacattttatattaaatgttcattcctgag

SEQ ID NO: 389946 - DNA, 474 bp, Homo sapiens
acatgaatgtacttttaccaaaaacatcacagaatctacgatgtgttatttccatctggttaataattataactacctttggatttcttcctacatctttccacacttacttggggaaaatgcaaaaggaatatttcatcttcaccgcagtagtgcctgtgattaatgcagtcatgagctgctaacgatacaagcaagagctgcttagctttgattcaatccttaaatcacttgggaaaaaccaactgaagggggaaaaaaagaggtcggagaaggcactggaattctcttttctgttttttcaagagacaaggtctcgctatattgcccaggctggatttgaactcccaggctcaagcgatcctgcctctgcctcctgagcggttgggattacaggcatacaccactgctcccggcaacaatggaattgttaaagacagaggctggccacctgtctgacttgcttgcagttag

SEQ ID NO: 389947 - DNA, 763 bp, Homo sapiens
aatagcccaacccacaccagcctcagacaccaccatgaccggctcctgctgcggctccaccttgtcctccctgagctacgggggaggctgctgccagccctgctgctgccgcgacccctgctgctgccgccccgtgacctgccagaccaccgtgtgccgccccgtgacctgcgtgccccgctgcacgcgccccatctgcgagccctgccgccgcccggtgtgctgcgacccctgctccctgcaggaaggctgctgccgccccatcacctgctgcccctcgtcgtgcacggctgtggtgtgcaggccctgctgctgggccaccacctgctgccagcctgtgtctgtgcagtccccctgctgccggcccccctgcggccagccgaccccttgcagcaccacctgcaggacctcctcctgctgagaccccaatgcccccacagagcaatacactgaagcctaaacatctatctggtgtttttaaaaagttaaaagaaaaatagattttttttcacaaggtgacaatagtgatttttaccatctggatacagcctggtgtaagcagacgtccattaccaccctcacccacattttcaggtgtctacatcagccttagtcattatggatagtaaatcgacctttaagaattcctggggtggactttgcaaacacattctacaacctgatggtttttactgctcaaactgtcaccatcatcttttgcaatgtgttgctcactgttgtcaataaactaatttttcctggc

SEQ ID NO: 389948 - DNA, 158 bp, Homo sapiens
aaaagaagtaaattagggttatattagtttactagaagacatttcacaagattttttaagtgagaagcaagatgtagtgtaatatgtgtattataatttgtattaatctgttttcacattgctgtaaagacctacttgagactgggtaacattaagaa

SEQ ID NO: 389949 - DNA, 274 bp, Homo sapiens
ttatcacttaataactcacttattgcctataaaaaattgttcaggaaattcaaagtcgtgagagaatttctcactatccttcaaagtagttttaataaagtaatatcattaagctccaagttgaaatatagggtagaaattgtctgtctatattcctagactttaaaatgcttttcctatttaaaaaaacacattgtagtttccttgtaaaagattaatagggttcttgtgtaatgcagtttgacactttatagttggcctgcagaggcaagta

SEQ ID NO: 389950 - DNA, 407 bp, Homo sapiens
cttttcatcttccttcaccttctgaaacaagcaagtgtttttaccattgtcatatacaacactttgaaaatcagaaaatctcctgatcttttacttccataaaagtactgatttcctctcaatatatttaacataatatacatgcaaacaaaaagcacaaatccactgttagacttctggaacaagcataaataaacattcttgttatgatagtatctgctaagttaaaaatacccttttctagtaatgtcaaaatagaattattttgtagacagaatattaggtaggcatgtataaaccctgaactattcacatatactttaagtgtgcaaaaatgttcctattagaagtagaatgtgaataagggttttctgcactaggaacttacaccctctgtagacgcacaa

SEQ ID NO: 389951 - DNA, 1449 bp, Homo sapiens
cagggcccaggggcgggtggcgtgaccttggttcatcctcggccgcggagacgcggcgtgaccttggccaagtccccgcttccccatccgcagacttgcgcggctggaccgctcggtctccgctccggccgctaggcgtcctgcgccgctgttcttatctcccccggcttcctccgcgcaccccaccagttctacgcctacgctgccggcgtagcggtcgcctggagtcgcgcgtccctctcctttcagatgctggtttccaccgcgcgaactgggagggcgcgattcgcgaacgcggcctgcgctgcgagcgcgcggccgtcccgcaggccggtgcagccttacgccgctgacgcatcgcgcccaagatggcggcgcggtcgtcgtcgggggtggcggcggcagagggggcggcggccctggcggcagcggagacggcagccgtgacggtggcagcggcggcgcgggacctgggcctgggggaatgaggcggccgcggcgggccagcggcggagccgtgtagcggagaagctccccctccctgcttcccttggccgagccgggggcgcgcgcgcacgcggccgtccagagcgggctccccacccctcgactcctgcgacccgcaccgcacccccacccgggcccggaggatgatgaagctcaagtcgaaccagacccgcacctacgacggcgacggctacaagaagcgggccgcatgcctgtgtttccgcagcgagagcgaggaggaggtgctactcgtgagcagtagtcgccatccagacagatggattgtccctggaggaggcatggagcccgaggaggagccaagtgtggcagcagttcgtgaagtctgtgaggaggtatgcatggagaagagagggcacagctgtgcctcgtcatcatgaacctgtcctatctgtgtagttctttaatatgtcagcactcactgaataaatatacagtcacagaaaaagggcaatgaatggttatccggtccctcctttattaccgggtgatggagttgtgacatggtaatgttaaccggcactctgtgccagacttcccatgactttttatgccagacttttgttacttcccatggatttcttccaacactgcctgttacctgtggcacaaaatcaagaagcaaatagttcctgacctctaaggagtaagaggaacaggcagcattagtataaatgactcattgtcattaagctttggaggaggcccttgttttcctgtgcttactgcatcctagccatggaactgtggctaaaggagtgattatgttagccagatactgttaatggtacaacttgagagagaatagtatcttcttttttatttagtcacatgatgttccacatacatgtgttgagttcctgggccatgatatcctactagatactccagaataaataaaagaagtaaagtcatggactctta

SEQ ID NO: 389952 - DNA, 1054 bp, Homo sapiens
cagggcccaggggcgggtggcgtgaccttggttcatcctcggccgcggagacgcggcgtgaccttggccaagtccccgcttccccatccgcagacttgcgcggctggaccgctcggtctccgctccggccgctaggcgtcctgcgccgctgttcttatctcccccggcttcctccgcgcaccccaccagttctacgcctacgctgccggcgtagcggtcgcctggagtcgcgcgtccctctcctttcagatgctggtttccaccgcgcgaactgggagggcgcgattcgcgaacgcggcctgcgctgcgagcgcgcggccgtcccgcaggccggtgcagccttacgccgctgacgcatcgcgcccaagatggcggcgcggtcgtcgtcgggggtggcggcggcagagggggcggcggccctggcggcagcggagacggcagccgtgacggtggcagcggcggcgcgggacctgggcctgggggaatgaggcggccgcggcgggccagcggcggagccgtgtagcggagaagctccccctccctgcttcccttggccgagccgggggcgcgcgcgcacgcggccgtccagagcgggctccccacccctcgactcctgcgacccgcaccgcacccccacccgggcccggaggatgatgaagctcaagtcgaaccagacccgcacctacgacggcgacggctacaagaagcgggccgcatgcctgtgtttccgcagcgagagcgaggaggaggtgctactcgtgagcagtagtcgccatccagacagatggattgtccctggaggaggcatggagcccgaggaggagccaagtgtggcagcagttcgtgaagtctgtgaggagcctactcaatgtgaagatgacgaggaaaaaacctttactgggctccacttccacctaatgaacagtaaatatattttctcttccttatggttttcttaataacattttctttttctagctttaatataagagtatagtaaataatacacacaacatacagaatatatgttaatcaactgttattggtaaggctg

SEQ ID NO: 389953 - DNA, 533 bp, Homo sapiens
ggatataaaaatctgccgatgctcaagcgccttatataaagtggcagagtatttgcatatgacctacacatatcctcccatatactttagatcatttgtagattgcttatgctacctcatgcaatgtaaacactatgtaaatacagttgacccttaaacaacaggggattgaactgcacgggttcatttatatgtggatttttttccagtaaaagttacaccattatactgagtgtgcctgcctttcctgcttcctcttttacctccttcacttctgcctctgaggtggcccctgagacagcaagaccaacccctcctcttcctcctcctcttccttagcctactcaatgtgaagatgacgaggaaaaaacctttactgggctccacttccacctaatgaacagtaaatatattttctcttccttatggttttcttaataacattttctttttctagctttaatataagagtatagtaaataatacacacaacatacagaatatatgttaatcaactgttattggtaaggctg

SEQ ID NO: 389954 - DNA, 2992 bp, Homo sapiens
cagggcccaggggcgggtggcgtgaccttggttcatcctcggccgcggagacgcggcgtgaccttggccaagtccccgcttccccatccgcagacttgcgcggctggaccgctcggtctccgctccggccgctaggcgtcctgcgccgctgttcttatctcccccggcttcctccgcgcaccccaccagttctacgcctacgctgccggcgtagcggtcgcctggagtcgcgcgtccctctcctttcagatgctggtttccaccgcgcgaactgggagggcgcgattcgcgaacgcggcctgcgctgcgagcgcgcggccgtcccgcaggccggtgcagccttacgccgctgacgcatcgcgcccaagatggcggcgcggtcgtcgtcgggggtggcggcggcagagggggcggcggccctggcggcagcggagacggcagccgtgacggtggcagcggcggcgcgggacctgggcctgggggaatgaggcggccgcggcgggccagcggcggagccgtgtagcggagaagctccccctccctgcttcccttggccgagccgggggcgcgcgcgcacgcggccgtccagagcgggctccccacccctcgactcctgcgacccgcaccgcacccccacccgggcccggaggatgatgaagctcaagtcgaaccagacccgcacctacgacggcgacggctacaagaagcgggccgcatgcctgtgtttccgcagcgagagcgaggaggaggtgctactcgtgagcagtagtcgccatccagacagatggattgtccctggaggaggcatggagcccgaggaggagccaagtgtggcagcagttcgtgaagtctgtgaggaggctggagtaaaagggacattgggaagattagttggaatttttgagaaccaggagaggaagcacaggacgtatgtctatgtgctcattgtcactgaagtgctggaagactgggaagattcagttaacattggaaggaagagggaatggtttaaaatagaagacgccataaaagtgctgcagtatcacaaacccgtgcaggcatcatattttgaaacattgaggcaaggctactcagccaacaatggcaccccagtcgtggccaccacatactcggtttctgctcagagctcgatgtcaggcatcagatgactgaagacttcctgtaagagaaatggaaattggaaactagactgaagtgcaaatcttccctctcaccctggctctttccacttctcacaggcctcctctttcaaataaggcatggtgggcagcaaagaaagggtgtattgataatgttgctgtttggtgttaagtgatggggctttttcttctgtttttattgagggtgggggttgggtgtgtaatttgtaagtacttttgtgcatgatctgtccctccctcttcccacccctgcagtcctctgaagagaggccaacagccttcccctgccttggattctgaagtgttcctgtttgtcttatcctggccctggccagacgttttctttgatttttaattttttttttttattaaaagataccagtatgagatgaaaacttccaataatttgtcctataatgtgctgtacagttcagtagagtggtcactttcactgcagtatacatttatctacacattatatatcggacatataatatgtaaataaatgacttctagaaagagaaatttgtttaatttttcaaggtttttttctcttttaatttgggcatttctagaattgagagcctcacaattaacatacctttttgttttcgatgctagtggctgggcaggttgccctgtcctttctctatttcccagtcattgactgtagatatgggaagagtttagctaccttcatagtgctcccaggactcatggcctttccttctttaagctgtatttccctgcccagaaagaaacaggaagaaacctttttttatttttttatttttttttaaccaagcaaggagcaaatggcctcagcccagatctgtaaaaacaatgatagaaattgaattctgccccacatgttgacagtagagttggaactggattcttgggattacttatctaaaaaactggagcatcaggtccatttctgttctgctggtttggaatcttttccgtaatgctatttattgccaacaatggcctctctttgtgtccatatatgccttacaccgtgctgacctgggtatcatccatgtgctctgaagcatccaactttactttgcaggtgcatcaatgtagtcctgtccctgaactgagtaaccgtgttcctgaaaagtacactagggaaattcacctgcttgcttgtctttgtattggcatggcacttgtgattgcaccatggagcatgctcagagctattaaattggtctcccatctcccaccaggatatgaaaggtccatatgggaggccacgtaatcacttattacagtggttacataatacactggctcactgcagactctcttgttttttgatacagtttcgtgctggcttcatttgccaattgtgttgtttagttcggaagtaagagggtcttgagattgaggggtagggagggctacactgactgatccgtggcttaagacaggagattatctctgtactccagtggcatctccttagccaagatgtgaaattaaaatcatagttcgcctcatttaaaaattctaataaagcactcaaactttgaaaagcttttacttttccctcctactaaaagaaatgtatgtacctcatagccctgtgtcatttagtgttcagcacttttgggaacatcagttggtgaactttaaattttgctgtctactcactgggcacggtggctcacacctgtaatcccagctacttgggaggctgaggcgagataatcgcttgaacctgggaggcagaggttgcagtgagccgagattgcaccactgtcgtccagcctgggtgataagagtgaaactccatctca

SEQ ID NO: 389955 - DNA, 2471 bp, Homo sapiens
ctggaagggccgctccgcagttgtcagccaggcacatgtgtgcggaggccggcgtgcacgaggcgcgggccggcctttgtggcagagaaatagtgcacttcattggtgctactcgtgagcagtagtcgccatccagacagatggattgtccctggaggaggcatggagcccgaggaggagccaagtgtggcagcagttcgtgaagtctgtgaggaggctggagtaaaagggacattgggaagattagttggaatttttgagaaccaggagaggaagcacaggacgtatgtctatgtgctcattgtcactgaagtgctggaagactgggaagattcagttaacattggaaggaagagggaatggtttaaaatagaagacgccataaaagtgctgcagtatcacaaacccgtgcaggcatcatattttgaaacattgaggcaaggctactcagccaacaatggcaccccagtcgtggccaccacatactcggtttctgctcagagctcgatgtcaggcatcagatgactgaagacttcctgtaagagaaatggaaattggaaactagactgaagtgcaaatcttccctctcaccctggctctttccacttctcacaggcctcctctttcaaataaggcatggtgggcagcaaagaaagggtgtattgataatgttgctgtttggtgttaagtgatggggctttttcttctgtttttattgagggtgggggttgggtgtgtaatttgtaagtacttttgtgcatgatctgtccctccctcttcccacccctgcagtcctctgaagagaggccaacagccttcccctgccttggattctgaagtgttcctgtttgtcttatcctggccctggccagacgttttctttgatttttaattttttttttttattaaaagataccagtatgagatgaaaacttccaataatttgtcctataatgtgctgtacagttcagtagagtggtcactttcactgcagtatacatttatctacacattatatatcggacatataatatgtaaataaatgacttctagaaagagaaatttgtttaatttttcaaggtttttttctcttttaatttgggcatttctagaattgagagcctcacaattaacatacctttttgttttcgatgctagtggctgggcaggttgccctgtcctttctctatttcccagtcattgactgtagatatgggaagagtttagctaccttcatagtgctcccaggactcatggcctttccttctttaagctgtatttccctgcccagaaagaaacaggaagaaacctttttttatttttttatttttttttaaccaagcaaggagcaaatggcctcagcccagatctgtaaaaacaatgatagaaattgaattctgccccacatgttgacagtagagttggaactggattcttgggattacttatctaaaaaactggagcatcaggtccatttctgttctgctggtttggaatcttttccgtaatgctatttattgccaacaatggcctctctttgtgtccatatatgccttacaccgtgctgacctgggtatcatccatgtgctctgaagcatccaactttactttgcaggtgcatcaatgtagtcctgtccctgaactgagtaaccgtgttcctgaaaagtacactagggaaattcacctgcttgcttgtctttgtattggcatggcacttgtgattgcaccatggagcatgctcagagctattaaattggtctcccatctcccaccaggatatgaaaggtccatatgggaggccacgtaatcacttattacagtggttacataatacactggctcactgcagactctcttgttttttgatacagtttcgtgctggcttcatttgccaattgtgttgtttagttcggaagtaagagggtcttgagattgaggggtagggagggctacactgactgatccgtggcttaagacaggagattatctctgtactccagtggcatctccttagccaagatgtgaaattaaaatcatagttcgcctcatttaaaaattctaataaagcactcaaactttgaaaagcttttacttttccctcctactaaaagaaatgtatgtacctcatagccctgtgtcatttagtgttcagcacttttgggaacatcagttggtgaactttaaattttgctgtctactcactgggcacggtggctcacacctgtaatcccagcactttgggaggctgaggcaggtggatcacctgaggtcaggagtttgagaccagcctgaccaacatggtgaaaccccgtctctactaaaaatgcagaaattaggtgggcgcctgtaatcccagctacttgggaggctgaggcgagataatcgcttgaacctgggaggcagaggttgcagtgagccgagattgcaccactgtcgtccagcctgggtgataagagtgaaactccatctca

SEQ ID NO: 389956 - DNA, 3054 bp, Homo sapiens
cagggcccaggggcgggtggcgtgaccttggttcatcctcggccgcggagacgcggcgtgaccttggccaagtccccgcttccccatccgcagacttgcgcggctggaccgctcggtctccgctccggccgctaggcgtcctgcgccgctgttcttatctcccccggcttcctccgcgcaccccaccagttctacgcctacgctgccggcgtagcggtcgcctggagtcgcgcgtccctctcctttcagatgctggtttccaccgcgcgaactgggagggcgcgattcgcgaacgcggcctgcgctgcgagcgcgcggccgtcccgcaggccggtgcagccttacgccgctgacgcatcgcgcccaagatggcggcgcggtcgtcgtcgggggtggcggcggcagagggggcggcggccctggcggcagcggagacggcagccgtgacggtggcagcggcggcgcgggacctgggcctgggggaatgaggcggccgcggcgggccagcggcggagccgtgtagcggagaagctccccctccctgcttcccttggccgagccgggggcgcgcgcgcacgcggccgtccagagcgggctccccacccctcgactcctgcgacccgcaccgcacccccacccgggcccggaggatgatgaagctcaagtcgaaccagacccgcacctacgacggcgacggctacaagaagcgggccgcatgcctgtgtttccgcagcgagagcgaggaggagaaccaggagaggaagcacaggacgtatgtctatgtgctcattgtcactgaagtgctggaagactgggaagattcagttaacattggtacacccaactttctcccaaaggagccattttctttgatctcagatggctgttacgtttacatctttggaactataaactgtggtggtacaaaggaaggaagagggaatggtttaaaatagaagacgccataaaagtgctgcagtatcacaaacccgtgcaggcatcatattttgaaacattgaggcaaggctactcagccaacaatggcaccccagtcgtggccaccacatactcggtttctgctcagagctcgatgtcaggcatcagatgactgaagacttcctgtaagagaaatggaaattggaaactagactgaagtgcaaatcttccctctcaccctggctctttccacttctcacaggcctcctctttcaaataaggcatggtgggcagcaaagaaagggtgtattgataatgttgctgtttggtgttaagtgatggggctttttcttctgtttttattgagggtgggggttgggtgtgtaatttgtaagtacttttgtgcatgatctgtccctccctcttcccacccctgcagtcctctgaagagaggccaacagccttcccctgccttggattctgaagtgttcctgtttgtcttatcctggccctggccagacgttttctttgatttttaattttttttttttattaaaagataccagtatgagatgaaaacttccaataatttgtcctataatgtgctgtacagttcagtagagtggtcactttcactgcagtatacatttatctacacattatatatcggacatataatatgtaaataaatgacttctagaaagagaaatttgtttaatttttcaaggtttttttctcttttaatttgggcatttctagaattgagagcctcacaattaacatacctttttgttttcgatgctagtggctgggcaggttgccctgtcctttctctatttcccagtcattgactgtagatatgggaagagtttagctaccttcatagtgctcccaggactcatggcctttccttctttaagctgtatttccctgcccagaaagaaacaggaagaaacctttttttatttttttatttttttttaaccaagcaaggagcaaatggcctcagcccagatctgtaaaaacaatgatagaaattgaattctgccccacatgttgacagtagagttggaactggattcttgggattacttatctaaaaaactggagcatcaggtccatttctgttctgctggtttggaatcttttccgtaatgctatttattgccaacaatggcctctctttgtgtccatatatgccttacaccgtgctgacctgggtatcatccatgtgctctgaagcatccaactttactttgcaggtgcatcaatgtagtcctgtccctgaactgagtaaccgtgttcctgaaaagtacactagggaaattcacctgcttgcttgtctttgtattggcatggcacttgtgattgcaccatggagcatgctcagagctattaaattggtctcccatctcccaccaggatatgaaaggtccatatgggaggccacgtaatcacttattacagtggttacataatacactggctcactgcagactctcttgttttttgatacagtttcgtgctggcttcatttgccaattgtgttgtttagttcggaagtaagagggtcttgagattgaggggtagggagggctacactgactgatccgtggcttaagacaggagattatctctgtactccagtggcatctccttagccaagatgtgaaattaaaatcatagttcgcctcatttaaaaattctaataaagcactcaaactttgaaaagcttttacttttccctcctactaaaagaaatgtatgtacctcatagccctgtgtcatttagtgttcagcacttttgggaacatcagttggtgaactttaaattttgctgtctactcactgggcacggtggctcacacctgtaatcccagcactttgggaggctgaggcaggtggatcacctgaggtcaggagtttgagaccagcctgaccaacatggtgaaaccccgtctctactaaaaatgcagaaattaggtgggcgcctgtaatcccagctacttgggaggctgaggcgagataatcgcttgaacctgggaggcagaggttgcagtgagccgagattgcaccactgtcgtccagcctgggtgataagagtgaaactccatctca

SEQ ID NO: 389957 - DNA, 1498 bp, Homo sapiens
cagggcccaggggcgggtggcgtgaccttggttcatcctcggccgcggagacgcggcgtgaccttggccaagtccccgcttccccatccgcagacttgcgcggctggaccgctcggtctccgctccggccgctaggcgtcctgcgccgctgttcttatctcccccggcttcctccgcgcaccccaccagttctacgcctacgctgccggcgtagcggtcgcctggagtcgcgcgtccctctcctttcagatgctggtttccaccgcgcgaactgggagggcgcgattcgcgaacgcggcctgcgctgcgagcgcgcggccgtcccgcaggccggtgcagccttacgccgctgacgcatcgcgcccaagatggcggcgcggtcgtcgtcgggggtggcggcggcagagggggcggcggccctggcggcagcggagacggcagccgtgacggtggcagcggcggcgcgggacctgggcctgggggaatgaggcggccgcggcgggccagcggcggagccgtgtagcggagaagctccccctccctgcttcccttggccgagccgggggcgcgcgcgcacgcggccgtccagagcgggctccccacccctcgactcctgcgacccgcaccgcacccccacccgggcccggaggatgatgaagctcaagtcgaaccagacccgcacctacgacggcgacggctacaagaagcgggccgcatgcctgtgtttccgcagcgagagcgaggaggaggtgctactcgtgagcagtagtcgccatccagacagatggattgtccctggaggaggcatggagcccgaggaggagccaagtgtggcagcagttcgtgaagtctgtgaggaggctggagtaaaagggacattgggaagattagttggaatttttgagaaccaggagaggaagcacaggacgtatgtctatgtgctcattgtcactgaagtgctggaagactgggaagattcagttaacattggaaggaagagggaatggtttaaaatagaagacgccataaaagtgctgggattataggcgtaaaccactgcacgcagcctaccctctgcctttttaagatgatgtatttatttaatttttgccatcattggtgcttcaccttcctgcgaaggaaattccagagcctgtatttaagctacctaggcttttacactccctttattgcctttccaaatagtatctcatttggtgtactctagtgtcctatacctcttggaaacgaaagagggcccaacctacaactaagaagggacaaaccttgaactaagtaagaccttacacacccagaaagaacactgggccctccttcttcagggacaatgcagtagccacttggcttgtggaatttactgaaggtatttcctgtaacttgctagttaacttagttttgtatttcaggcagaggtgcgctctgtaaatgttggggcccccccccttttttttttgggggaaaaacccctttttttttg

SEQ ID NO: 389958 - DNA, 207 bp, Homo sapiens
aaaaagtgttaagaaacattgctttaatgttttctatattttctcaaaagttctaggctcagaaaccttattactcttgtactagtttcttttctctctgcctccacaggaaggaagagggaatggtttaaaatagaagacgccataaaagtgctgcagtatcacaaacccgtgcaggcatcatattttgaaacattgaggcaaggc

SEQ ID NO: 389959 - DNA, 1701 bp, Homo sapiens
cagggcccaggggcgggtggcgtgaccttggttcatcctcggccgcggagacgcggcgtgaccttggccaagtccccgcttccccatccgcagacttgcgcggctggaccgctcggtctccgctccggccgctaggcgtcctgcgccgctgttcttatctcccccggcttcctccgcgcaccccaccagttctacgcctacgctgccggcgtagcggtcgcctggagtcgcgcgtccctctcctttcagatgctggtttccaccgcgcgaactgggagggcgcgattcgcgaacgcggcctgcgctgcgagcgcgcggccgtcccgcaggccggtgcagccttacgccgctgacgcatcgcgcccaagatggcggcgcggtcgtcgtcgggggtggcggcggcagagggggcggcggccctggcggcagcggagacggcagccgtgacggtggcagcggcggcgcgggacctgggcctgggggaatgaggcggccgcggcgggccagcggcggagccgtgtagcggagaagctccccctccctgcttcccttggccgagccgggggcgcgcgcgcacgcggccgtccagagcgggctccccacccctcgactcctgcgacccgcaccgcacccccacccgggcccggaggatgatgaagctcaagtcgaaccagacccgcacctacgacggcgacggctacaagaagcgggccgcatgcctgtgtttccgcagcgagagcgaggaggaggtgctactcgtgagcagtagtcgccatccagacagatggattgtccctggaggaggcatggagcccgaggaggagccaagtgtggcagcagttcgtgaagtctgtgaggaggctggagtaaaagggacattgggaagattagttggaatttttgagaaccaggagaggaagcacaggacgtatgtctatgtgctcattgtcactgaagtgctggaagactgggaagattcagttaacattggaaggaagagggaatggtttaaaatagaagacgccataaaagtgctgcagtatcacaaacccgtgcaggcatcatattttgaaacattgaggcaaggctactcagccaacaatggcaccccagtcgtggccaccacatactcggtttctgctcagagctcgatgtcaggcatcagatgactgaagacttcctgtaagagaaatggaaattggaaactagactgaagtgcaaatcttccctctcaccctggctctttccacttctcacaggcctcctctttcaaataaggcatggtgggcagcaaagaaagggtgtattgataatgttgctgtttggtgttaagtgatggggctttttcttctgtttttattgagggtgggggttgggtgtgtaatttgtaagtacttttgtgcatgatctgtccctccctcttcccacccctgcagtcctctgaagagaggccaacagccttcccctgccttggattctgaagtgttcctgtttgtcttatcctggccctggccagacgttttctttgatttttaattttttttttttattaaaagataccagtatgagatgaaaacttccaataatttgtcctataatgtgctgtacagttcagtagagtggtcactttcactgcagtatacatttatctacacattatatatcggacatataatatgtaaataaatgacttctagaaag

SEQ ID NO: 389960 - DNA, 3115 bp, Homo sapiens
cagggcccaggggcgggtggcgtgaccttggttcatcctcggccgcggagacgcggcgtgaccttggccaagtccccgcttccccatccgcagacttgcgcggctggaccgctcggtctccgctccggccgctaggcgtcctgcgccgctgttcttatctcccccggcttcctccgcgcaccccaccagttctacgcctacgctgccggcgtagcggtcgcctggagtcgcgcgtccctctcctttcagatgctggtttccaccgcgcgaactgggagggcgcgattcgcgaacgcggcctgcgctgcgagcgcgcggccgtcccgcaggccggtgcagccttacgccgctgacgcatcgcgcccaagatggcggcgcggtcgtcgtcgggggtggcggcggcagagggggcggcggccctggcggcagcggagacggcagccgtgacggtggcagcggcggcgcgggacctgggcctgggggaatgaggcggccgcggcgggccagcggcggagccgtgtagcggagaagctccccctccctgcttcccttggccgagccgggggcgcgcgcgcacgcggccgtccagagcgggctccccacccctcgactcctgcgacccgcaccgcacccccacccgggcccggaggatgatgaagctcaagtcgaaccagacccgcacctacgacggcgacggctacaagaagcgggccgcatgcctgtgtttccgcagcgagagcgaggaggaggtgctactcgtgagcagtagtcgccatccagacagatggattgtccctggaggaggcatggagcccgaggaggagccaagtgtggcagcagttcgtgaagtctgtgaggaggctggagtaaaagggacattgggaagattagttggaatttttgagaaccaggagaggaagcacaggacgtatgtctatgtgctcattgtcactgaagtgctggaagactgggaagattcagttaacattggaaggaagagggaatggtttaaaatagaagacgccataaaagtgctgcagtatcacaaacccgtgcaggcatcatattttgaaacattgaggcaaggctactcagccaacaatggcaccccagtcgtggccaccacatactcggtttctgctcagagctcgatgtcaggcatcagatgactgaagacttcctgtaagagaaatggaaattggaaactagactgaagtgcaaatcttccctctcaccctggctctttccacttctcacaggcctcctctttcaaataaggcatggtgggcagcaaagaaagggtgtattgataatgttgctgtttggtgttaagtgatggggctttttcttctgtttttattgagggtgggggttgggtgtgtaatttgtaagtacttttgtgcatgatctgtccctccctcttcccacccctgcagtcctctgaagagaggccaacagccttcccctgccttggattctgaagtgttcctgtttgtcttatcctggccctggccagacgttttctttgatttttaattttttttttttattaaaagataccagtatgagatgaaaacttccaataatttgtcctataatgtgctgtacagttcagtagagtggtcactttcactgcagtatacatttatctacacattatatatcggacatataatatgtaaataaatgacttctagaaagagaaatttgtttaatttttcaaggtttttttctcttttaatttgggcatttctagaattgagagcctcacaattaacatacctttttgttttcgatgctagtggctgggcaggttgccctgtcctttctctatttcccagtcattgactgtagatatgggaagagtttagctaccttcatagtgctcccaggactcatggcctttccttctttaagctgtatttccctgcccagaaagaaacaggaagaaacctttttttatttttttatttttttttaaccaagcaaggagcaaatggcctcagcccagatctgtaaaaacaatgatagaaattgaattctgccccacatgttgacagtagagttggaactggattcttgggattacttatctaaaaaactggagcatcaggtccatttctgttctgctggtttggaatcttttccgtaatgctatttattgccaacaatggcctctctttgtgtccatatatgccttacaccgtgctgacctgggtatcatccatgtgctctgaagcatccaactttactttgcaggtgcatcaatgtagtcctgtccctgaactgagtaaccgtgttcctgaaaagtacactagggaaattcacctgcttgcttgtctttgtattggcatggcacttgtgattgcaccatggagcatgctcagagctattaaattggtctcccatctcccaccaggatatgaaaggtccatatgggaggccacgtaatcacttattacagtggttacataatacactggctcactgcagactctcttgttttttgatacagtttcgtgctggcttcatttgccaattgtgttgtttagttcggaagtaagagggtcttgagattgaggggtagggagggctacactgactgatccgtggcttaagacaggagattatctctgtactccagtggcatctccttagccaagatgtgaaattaaaatcatagttcgcctcatttaaaaattctaataaagcactcaaactttgaaaagcttttacttttccctcctactaaaagaaatgtatgtacctcatagccctgtgtcatttagtgttcagcacttttgggaacatcagttggtgaactttaaattttgctgtctactcactgggcacggtggctcacacctgtaatcccagcactttgggaggctgaggcaggtggatcacctgaggtcaggagtttgagaccagcctgaccaacatggtgaaaccccgtctctactaaaaatgcagaaattaggtgggcgcctgtaatcccagctacttgggaggctgaggcgagataatcgcttgaacctgggaggcagaggttgcagtgagccgagattgcaccactgtcgtccagcctgggtgataagagtgaaactccatctca

SEQ ID NO: 389961 - DNA, 2695 bp, Homo sapiens
ttcatgtcatgaaggccatgcagtctctcaagtcccgaggctacgtgaaggaacagtttgcctggagacatttctactggtaccttaccaatgagggtatccagtatctccgtgattaccttcatctgcccccggagattgtgcctgccaccctacgccgtagccgtccagagactggcaggcctcggcctaaaggtctggagggtgagcgacctgcgagactcacaagaggggaagctgacagagatacctacagacggagtgctgtgccacctggtgccgacaagaaagccgaggctggggctgggtcagcaaccgaattccagtttgtgctactcgtgagcagtagtcgccatccagacagatggattgtccctggaggaggcatggagcccgaggaggagccaagtgtggcagcagttcgtgaagtctgtgaggaggctggagtaaaagggacattgggaagattagttggaatttttgagaaccaggagaggaagcacaggacgtatgtctatgtgctcattgtcactgaagtgctggaagactgggaagattcagttaacattggaaggaagagggaatggtttaaaatagaagacgccataaaagtgctgcagtatcacaaacccgtgcaggcatcatattttgaaacattgaggcaaggctactcagccaacaatggcaccccagtcgtggccaccacatactcggtttctgctcagagctcgatgtcaggcatcagatgactgaagacttcctgtaagagaaatggaaattggaaactagactgaagtgcaaatcttccctctcaccctggctctttccacttctcacaggcctcctctttcaaataaggcatggtgggcagcaaagaaagggtgtattgataatgttgctgtttggtgttaagtgatggggctttttcttctgtttttattgagggtgggggttgggtgtgtaatttgtaagtacttttgtgcatgatctgtccctccctcttcccacccctgcagtcctctgaagagaggccaacagccttcccctgccttggattctgaagtgttcctgtttgtcttatcctggccctggccagacgttttctttgatttttaattttttttttttattaaaagataccagtatgagatgaaaacttccaataatttgtcctataatgtgctgtacagttcagtagagtggtcactttcactgcagtatacatttatctacacattatatatcggacatataatatgtaaataaatgacttctagaaagagaaatttgtttaatttttcaaggtttttttctcttttaatttgggcatttctagaattgagagcctcacaattaacatacctttttgttttcgatgctagtggctgggcaggttgccctgtcctttctctatttcccagtcattgactgtagatatgggaagagtttagctaccttcatagtgctcccaggactcatggcctttccttctttaagctgtatttccctgcccagaaagaaacaggaagaaacctttttttatttttttatttttttttaaccaagcaaggagcaaatggcctcagcccagatctgtaaaaacaatgatagaaattgaattctgccccacatgttgacagtagagttggaactggattcttgggattacttatctaaaaaactggagcatcaggtccatttctgttctgctggtttggaatcttttccgtaatgctatttattgccaacaatggcctctctttgtgtccatatatgccttacaccgtgctgacctgggtatcatccatgtgctctgaagcatccaactttactttgcaggtgcatcaatgtagtcctgtccctgaactgagtaaccgtgttcctgaaaagtacactagggaaattcacctgcttgcttgtctttgtattggcatggcacttgtgattgcaccatggagcatgctcagagctattaaattggtctcccatctcccaccaggatatgaaaggtccatatgggaggccacgtaatcacttattacagtggttacataatacactggctcactgcagactctcttgttttttgatacagtttcgtgctggcttcatttgccaattgtgttgtttagttcggaagtaagagggtcttgagattgaggggtagggagggctacactgactgatccgtggcttaagacaggagattatctctgtactccagtggcatctccttagccaagatgtgaaattaaaatcatagttcgcctcatttaaaaattctaataaagcactcaaactttgaaaagcttttacttttccctcctactaaaagaaatgtatgtacctcatagccctgtgtcatttagtgttcagcacttttgggaacatcagttggtgaactttaaattttgctgtctactcactgggcacggtggctcacacctgtaatcccagcactttgggaggctgaggcaggtggatcacctgaggtcaggagtttgagaccagcctgaccaacatggtgaaaccccgtctctactaaaaatgcagaaattaggtgggcgcctgtaatcccagctacttgggaggctgaggcgagataatcgcttgaacctgggaggcagaggttgcagtgagccgagattgcaccactgtcgtccagcctgggtgataagagtgaaactccatctca

SEQ ID NO: 389962 - DNA, 2767 bp, Homo sapiens
cagggcccaggggcgggtggcgtgaccttggttcatcctcggccgcggagacgcggcgtgaccttggccaagtccccgcttccccatccgcagacttgcgcggctggaccgctcggtctccgctccggccgctaggcgtcctgcgccgctgttcttatctcccccggcttcctccgcgcaccccaccagttctacgcctacgctgccggcgtagcggtcgcctggagtcgcgcgtccctctcctttcagatgctggtttccaccgcgcgaactgggagggcgcgattcgcgaacgcggcctgcgctgcgagcgcgcggccgtcccgcaggccggtgcagccttacgccgctgacgcatcgcgcccaagatggcggcgcggtcgtcgtcgggggtggcggcggcagagggggcggcggccctggcggcagcggagacggcagccgtgacggtggcagcggcggcgcgggacctgggcctgggggaatgaggcggccgcggcgggccagcggcggagccgtgtagcggagaagctccccctccctgcttcccttggccgagccgggggcgcgcgcgcacgcggccgtccagagcgggctccccacccctcgactcctgcgacccgcaccgcacccccacccgggcccggaggatgatgaagctcaagtcgaaccagacccgcacctacgacggcgacggctacaagaagcgggcatcatattttgaaacattgaggcaaggctactcagccaacaatggcaccccagtcgtggccaccacatactcggtttctgctcagagctcgatgtcaggcatcagatgactgaagacttcctgtaagagaaatggaaattggaaactagactgaagtgcaaatcttccctctcaccctggctctttccacttctcacaggcctcctctttcaaataaggcatggtgggcagcaaagaaagggtgtattgataatgttgctgtttggtgttaagtgatggggctttttcttctgtttttattgagggtgggggttgggtgtgtaatttgtaagtacttttgtgcatgatctgtccctccctcttcccacccctgcagtcctctgaagagaggccaacagccttcccctgccttggattctgaagtgttcctgtttgtcttatcctggccctggccagacgttttctttgatttttaattttttttttttattaaaagataccagtatgagatgaaaacttccaataatttgtcctataatgtgctgtacagttcagtagagtggtcactttcactgcagtatacatttatctacacattatatatcggacatataatatgtaaataaatgacttctagaaagagaaatttgtttaatttttcaaggtttttttctcttttaatttgggcatttctagaattgagagcctcacaattaacatacctttttgttttcgatgctagtggctgggcaggttgccctgtcctttctctatttcccagtcattgactgtagatatgggaagagtttagctaccttcatagtgctcccaggactcatggcctttccttctttaagctgtatttccctgcccagaaagaaacaggaagaaacctttttttatttttttatttttttttaaccaagcaaggagcaaatggcctcagcccagatctgtaaaaacaatgatagaaattgaattctgccccacatgttgacagtagagttggaactggattcttgggattacttatctaaaaaactggagcatcaggtccatttctgttctgctggtttggaatcttttccgtaatgctatttattgccaacaatggcctctctttgtgtccatatatgccttacaccgtgctgacctgggtatcatccatgtgctctgaagcatccaactttactttgcaggtgcatcaatgtagtcctgtccctgaactgagtaaccgtgttcctgaaaagtacactagggaaattcacctgcttgcttgtctttgtattggcatggcacttgtgattgcaccatggagcatgctcagagctattaaattggtctcccatctcccaccaggatatgaaaggtccatatgggaggccacgtaatcacttattacagtggttacataatacactggctcactgcagactctcttgttttttgatacagtttcgtgctggcttcatttgccaattgtgttgtttagttcggaagtaagagggtcttgagattgaggggtagggagggctacactgactgatccgtggcttaagacaggagattatctctgtactccagtggcatctccttagccaagatgtgaaattaaaatcatagttcgcctcatttaaaaattctaataaagcactcaaactttgaaaagcttttacttttccctcctactaaaagaaatgtatgtacctcatagccctgtgtcatttagtgttcagcacttttgggaacatcagttggtgaactttaaattttgctgtctactcactgggcacggtggctcacacctgtaatcccagcactttgggaggctgaggcaggtggatcacctgaggtcaggagtttgagaccagcctgaccaacatggtgaaaccccgtctctactaaaaatgcagaaattaggtgggcgcctgtaatcccagctacttgggaggctgaggcgagataatcgcttgaacctgggaggcagaggttgcagtgagccgagattgcaccactgtcgtccagcctgggtgataagagtgaaactccatctca

SEQ ID NO: 389963 - DNA, 159 bp, Homo sapiens
tctctccaatgtgcatcctcttatgtatggttagtgctgagggttggctaaatgctttgccacattcttcacatttgcagggtttctctccagtatgtatcctcttatgtatggttagtgttgaggattggctaaatgctttgccacattcttcacact

SEQ ID NO: 389964 - DNA, 559 bp, Homo sapiens
tacatttttttattgcccatttgttcaaagagaattgtttgtaagtaaatgtatgaacaagataaaaaagaacattctggttgaaggggcaggaaaaattgtattatttctcacagttaatctgtgacatgcggaacacaaaatgtaattggtgagctattaactttttctctaattgtatattatttaggtttgtctaatacaaactggaatttcagggatatcaagatgctccatgaagaaaataattttaggtcaaatatgtttgaagcttaaaagttacaactttgtcacctttgaaagtataaagatactaagtttctagctcactttgatattaaatattcttaaatgtaaatttaaaatatatgtttttgccataggtttctcagtaaatacttattctccacattgctaagtaaaatgaagagtaaaatgtgcattaatgtaaatcaaagcacagaagttaagaaattgttcagaataatgaaagcaaaattaggggcaggctcaaatccctttactatcaatttctttcatttacatgattaaagtaatt

SEQ ID NO: 389965 - DNA, 771 bp, Homo sapiens
gacattaggaaattaccattcccagatgtcttctgaagctggcaggtaagaaatcccaggtaccttagtgccaagttctccaaatactctagatctatccagtgaactagatttaataaattacttgatttgggtggtagctgtctcacagtgttgaaggagagctagaggaaaatttcaaatctcatggccaaatgtgtgtcacctctttgtgatgagtgtccattgtgccccaatcctttgttagtgtgttggctgtccagatggtgcagtctacttggtttcccttctttaccagtccacgtgggcaacctctttatatcctctggagatgaaggatattccaatgaaaagaagggatgccttttgaatatttgaaatttcttgaggggaaaagtgttgctgtccttttatattgtcaaaggctgtgtcgaagttggagtcttagaattaaggatgcagttgtgtcactttgaatagaaagaatattatagctggaagggatcaacccttaaattttattttattttattttattttattttatttttttagacggagtctcgctctgtcgcccaggctggagtgcagtggcgcgatctcagctcactgcaagctccgcctcccgggttcacgccattctcctgcctcagcctcccgagtagctgggactacaggcacccgccactgcacacagctaattttttgtatttttagtagagatggggtttcaccatggtctcgatctcctgacctcatgatccgcccgcc

SEQ ID NO: 389966 - DNA, 336 bp, Homo sapiens
gttgttgttgttaaagattggacatgttagataatatattgtaggaactctggctagtgattccctttcctccccaggacttgtttttatttctctttgcttgtttactttttcatacagtctgtttccccacagtgtctgcctctgactttattccttagagggcgcagctgtggccatgtacgtagtcactctgggaagacagtggttttagcagcgtgctcattaactttctctgacctctttgttatacctcctgcctctgtggatattagacccagttattacatttcattgtttactgattggtctattgttttccagaatgccttggga

SEQ ID NO: 389967 - DNA, 754 bp, Homo sapiens
gtaatgaaaatacagtggggggtccttaaggcatcattcagggtctacctttaagcgactccagctcttgaacttaatgaactggacactttcaagttctgaacatggtaaataaaagccagcacctgctgccaaaataccttgtctcataatcaaaatcatttctagagccagcggaacatggattccctgagaaattcccactgactcagcaattttaggttgggattttattttagagtcacttaacgaaaagatttcacctagtggcatggccccaatatttatcaggtaactctggccccatctcagcagactgactgattcaatcatcttaccctttactggggatgaaacgaaatgcttactaactcactcctgaccccacctgccactccaagtcattccagcaaacaaatccgtaatagattgctgagagggggaagataggtgaaattggagaatacactaaaaatcaactagttttaaacggtacgggtgggagccatgccccctctgtactggtccactttataaatcccagagggaactcattctatgcttgaaggaaaactttgccttgttctttggttagattgtgctgaacagatcaattcatgtcaaagagcatcaacttttcttatttatgccatggcttccataccacatcacactttatttactcttagtggaaccttgaatcaatgatcaattttgttttgtccttcagtggagtatcagacaccaggacaac

SEQ ID NO: 389968 - DNA, 162 bp, Homo sapiens
agttgcatttaagtgaggctcaggaccccagtgtgactccccttcaggtcaagacccctgcaacctcaaaagatagtttggcttgagcactcaagaggcagtatgggccagtgaggacagccgagcacccttggacaggtgatgccgcctctcagagcctca

SEQ ID NO: 389969 - DNA, 165 bp, Homo sapiens
agaacaaggtgagtgttatcctgaaacacagagaaggaagggattaattccaggtgcagggtaaataataaactgggctaatactgattgaacacctactaggtaccaaggactataccatgcattttacatatattatcccaattaattgccctatggaatatg

SEQ ID NO: 389970 - DNA, 312 bp, Homo sapiens
acacagctctcagtgtaactacctggcacacaccacacttctctgagaaggtttgattcatacttccccataccctagtggcaacaaaaggaaaaaaaccttgctcaggtcaggcgtggtagctcacgcctgtaatcccagcactttgggaggccgaggcgagaggatcacctgaggtcaggagttcaagaccagcctggccaacatggtgaaaccccgtctatactaaaaatacaaaaaggagccaggcatggtggtgcacgcctgtaatctcagctactcgggaggctaaagcaggagaatcacttgaag

SEQ ID NO: 389971 - DNA, 296 bp, Homo sapiens
ttgggaaagaaaagggaaaatagggtgtttgttactctagtcttcataaaagacagacaggggggttgtgtatccaatggagtttgattgatgtctgggagaaaattagtcggattgatcttgggaaagaaaagggaaaatagggtgtttgttactctagtcttcataactcaacaagtggctataatccttggtgttaatgaactattttgtttcattttaattatgtccagaattgttatttctagaataacaggttaacactggtcatttactttataacttttagattttgt

SEQ ID NO: 389972 - DNA, 582 bp, Homo sapiens
tggagagatcataacaataatgtttctggtgttagacatttcagaatgaatgtcgtaacctaggcagaaatagaatatggggagaaaaatatacttgtgcatgtatgtgcatacatacacacacacacacacaaaaaaatggccaaaaaaatgctgctaaagtcctagattttcagatccaaactgcaaaagttatcaactaccaaatgcagcaactagcattaaatgaatccccaaaactttataaatctaaaccttcttccaaccatgctttctattccttttccttagagtaacaacaaaatacaaagcgttagggtttcaaatcagccaatgacagtttacaatctctcctcatagccttttaactcagggaactctaaggtggtcatcagtttctattagcttcttaggctcccatccacctaattggctgaaattttctggaagcccacaaagctcatgtgtctttctctcaaaagggggaaatgcaactagcattggaaaaaactactaaagagggaatcctcaaggaacccactgaactctgtccctttattttcagttcttgaaaacaaggtg

SEQ ID NO: 389973 - DNA, 745 bp, Homo sapiens
gtttcttttttccctttttttaaatatattttcctccagaaagttgcagaagcttcctggtagaattgttataaggcataaatgaattattatatgtaaagtgaccagtaagtagattagttattactattattataaagtttttattcttctacactgcccattctattaaatatttttcagaaatgtgattttggctgggtgcagtggcttacaccttgtaatcccagcactttgggaggccgcagcaggaaatcacttgagtccagaagtttgagaccagcctgggtaacatagtgagactcctatcttggtaaaaaaattttaaataaattagctgggcacggtggtatgcatccatagtcccagctacttgagaggctgaggcaagaggatctcttgagcccaagagttcaaggttacagtgagctatgattgtgccactgcactccagtctgggtgacagagtgagaacctgtctctaaacagtcaaaaataaataaatgtgaatttcaagactgtttaatattctgtcatataaatacacagtaatttgacaaactattcttctgttggatattttaggttattttctttcctgtccttatataaataatattctgatgaactcatatctttgtctgtaactattttcttaaatataaggaatttcatgtaagtagatactaggccagttaatattttaagtattcttgatataaagacaaagtaccccccagaaatg

SEQ ID NO: 389974 - DNA, 273 bp, Homo sapiens
attttttctccaatcctttaacattcacgctactgggctttcatgttgaaagctgccagttaggtgtggggcccacccatatttctactttagaggccctctgatagcttcagagaagctgttctcaatgcagtcattttcttattttagagttattcatccaggttgggcacagtggctgacgcctgtaatcccagcactttgggaggccaaggcgggcgatcacctgaggtcaggaggtcacgaccagcctcatcaacatggggaaaccct

SEQ ID NO: 389975 - DNA, 384 bp, Homo sapiens
gccctgtacgccggcagtatatatgggagcggcgccgggcagacgggacacagtgacaaccaacaagctgctgctttccattatcatcttactggagctcgccatcctgggaggcctggtttactacaaattctttcgcagccattgaacttctatagggaagggtttgtggaccagaactttgaccttgtgaatgcatgatgttagggatgtggatagaataagcatattgctgctgtgggctgacagttcaaggatgcactgtatagccaggctgtgggaggagggaggaaagatgaaaaaccacttaaatgtgaaggaacaacagcaacaagaccagtatgatataccaaggtaataaatgctgtttatgacttctttaaa

SEQ ID NO: 389976 - DNA, 4825 bp, Homo sapiens
gcaagaagggaccttgtaatttttaacacgtgacacttagtggcagatgagacctaatgaagccaggcccaccttccacaccagattataaattcccctggagcagagattaaatgttttattcaccaacatgcccagatccctcgcaatgcctacgcttgacaaacacctgttgtcaacaagtgcacgaggcagcctaggaggagaattagtctccacgaggagaattactcgggcctagcagctagagtatttcgaggtcatcctaactgggttccacttttgaatttttggtttttgggttttttgtttttttggagacaagatctcgctccacttgggagcaaggtctcccaaagctggagtgcagtggtgggacctcagcctccgggggtagctggggccaaaagtgcgcgccaccatgcccggttcttattttgggtttctggtagagctctcgctattgtgcccaggctggtctcgaactactgggttcaagcaatcctcccacctcggcctcccaaagtactgggattacaggcgcgagccactcgcccggccgggttccacttctgaaagcttggggagccgctgggccttccaagaaaagtgctccacctcccgacggcaggcagagcccctggcccggctatctttccagggccgaaagctaacagtcaagacgcgaaacgaggaattcgggtcagggtggcaaagcaaagcgcgatgacagtgaggacgacgtctagacgcaaacatacatcaaatcgggccgaagcccgctgtcgccgcgcgggctgaacctggcacccggagcaacgcgcgaccccgggacgagacgctctcgtccgagccaaactacatcccccggcgtgcactgcagcgcccgcccctcgccggccggcggggcccgggaggaaggcggccgcgctgccagtcccgcaggtcccctaggcccctttcgctgcggcctttccccaacccggacccggcacttctcgggttccgcgactgccgatcgccccggcgcggcaccgctccctcaggagtcgcctaggccgcgcagtctcccgacttctcgtcaggctttcgcgccggcgctccagcaatcactggctggagaaggtgggcgttccggctcgagaggaccctgccgcggctccggaagagcctcgtcctgggcggcggtggtgcggcggtcgccgttatggccactgggctgggcggctgaccgccgggctaggaaagggcccagggccccgaatctcggtggccgctgctccagcgcggcctgcgccatggcctcctccgccgcctcctcggagcatttcgagaagctgcacgagatcttccgcggcctccatgaagacctacaaggggtgcccgagcggctgctggggacggcggggaccgaagaaaagaagaaattgatcagggattttgatgaaaagcaacaggaagcaaatgaaacgctggcagagatggaggaggagctacgttatgcacccctgtctttccgaaaccccatgatgtctaagcttcgaaactaccggaaggaccttgctaaactccatcgggaggtgagaagcacacctttgacagccacacctggaggccgaggagacatgaaatatggcatatatgctgtagagaatgagcatatgaatcggctacagtctcaaagggcaatgcttctgcagggcactgaaagcctgaaccgggccacccaaagtattgaacgttctcatcggattgccacagagactgaccagattggctcagaaatcatagaagagctgggggaacaacgagaccagttagaacgtaccaagagtagactggtaaacacaagtgaaaacttgagcaaaagtcggaagattctccgttcaatgtccagaaaagtgacaaccaacaagctgctgctttccattatcatcttactggagctcgccatcctgggaggcctggtttactacaaattctttcgcagccattgaacttctatagggaagggtttgtggaccagaactttgaccttgtgaatgcatgatgttagggatgtggatagaataagcatattgctgctgtgggctgacagttcaaggatgcactgtatagccaggctgtgggaggagggaggaaagatgaaaaaccacttaaatgtgaaggaacaacagcaacaagaccagtatgatataccaaggtaataaatgctgtttatgacttctttaaatttacatagtactgtagcatattaataccctgtgaactgcaaaaaaccaaatacatttacagtagtattggtcaccaaaatagaggggaaactttacaattgtgagaatgtgtaaatgttctcattaaggcagtattgacccagacaaccatttagtattcatctatcccctcaatgcctcataattctggaatgcctgttgtgaaacatgtcagtgcacagtgtctcctaaattctcacacgtgcttgattttctgattcatctggtgaactgggagtaggaagttggtcatagacaatatgccctccttctcttgtctgaccaaagcttgaagcaatcacatctactgccaggttagctgtagtcttcgcctcttcctctgaggtggccaactgaggattgacttcaacaagatccagtgctgatagcaaccctggaagaacaaagtgtgacaaaacctcaggttcccttgctgctactctcagtgagggtcatcccactgggacagggagaacaagccaaagtaaaaacaagagtccattttatagtagaaaatacctatttttaggaagccccttgcacctcatcctcttggccatgaatttaagttaaaacactgttgtgctatagtagattaaaagaaaccttttaagataatgaaataaaccatccctgttcaactaacataacaggcataattgtcaggcgttctggaaaaggaaaaggcttggtgttgggtgggggaggttttcatcctgcttgttggcaaaatgtatgccacctccagtatgactaggaaccttccagatgcctgcctggaaatgaatcaagtatgaaggcagaggaaatctgccacttgcactagccaaactgcattcccacttttgaactctaatgtgttatctgtatctgttagagcaccacaccatatgccctgaaatgtagttattactgcaaacttcattctcacccctgcaggcctgagctctggaggcaggttccacatctaacaacatctttttgtctcccagcagactgacccagtgtcttgtacttgatcaagagaaaattcagccatatgttaattattttatctggacttcagttaccttctgttaaggtttgagaacttgtgtcaaagttctcggtagtgttcctttggcctggagcaagtggaagggaagcttaaaccagaagaacctatccagacctgctactatgctcacccctctaaatgcctcacttctctatagaatttaactttttagttggttattctggatgaagggtgatctgaacaagctagtattcaggaatacaagtatctaagaatatttagggtggccataaagtctggaaacacaggcaaatgtacctaatggtttattgatattacactatagtacatgatgtgctgaatgccatcatgtccgttcagcatcttcccttattagcaatgcatagttgagtgtacagtgccaaactgcaaccaacaggtgtattactgtagcatttccatcatttcctgcacatggacctgtgttcctgatttgtctctgatttccactgactaaacctgcacctttagcatatcccagaagtggtcatcaaagtttgcactattagaaatatatacatgacttatgtttccagactattgccaccctataaattaagcaaactgctttatgtatctagttgacagcattataacagtgcagtggcacaatcatggctcactgcagcctcaacctcccaagtagttgggacacctggctaattattttttgtagaaacggggtcacactatgttgcccacgctggtcttgaacccctggggtcaagtaatcctcttgccttggcctcccagagtactgggattataggtatgaaccactgtgcctagccccatgagtgtcttttggagtaaaatattgtagcataggaacaaagagacaagccatgccatatataagtgctagaggttattaacccctgctctaagtggtgtttttaggaagcaaagcagagaattgaacccccaagttctctggccaataacctaaggaccactggcaacatctaagattgcagatctgagaattagaccagtactgcctgcctttttgtactgcctaaggttctggcaggctgtggcgctaaggagaccatttctcaatgtgagtttctatcccagctagtcaagggttctctatagccctgaacctttcaatctggggtctctatctataccctagttccatcagatggttactgaagcagtatgatttggtagttctttaaattttggaatgaaaggtcatttgaagtagctttaaaaccagaagctttctgacagaaatggaaactgtttgcaaacaagtatgagttttggaaaagtagccagtcttgataacgtagaattcatcttagtactctttccatcagccattcaaaaaaaaaaaaaaaaaaaaagggggggaaaactcagggggacggccttttaaaggcaagggttaaaaagggggtaaagggggagaggttgggaccttggtggccaagcgaaattgattgaggtaaaaaaaagagag

SEQ ID NO: 389977 - DNA, 2814 bp, Homo sapiens
gcaagaagggaccttgtaatttttaacacgtgacacttagtggcagatgagacctaatgaagccaggcccaccttccacaccagattataaattcccctggagcagagattaaatgttttattcaccaacatgcccagatccctcgcaatgcctacgcttgacaaacacctgttgtcaacaagtgcacgaggcagcctaggaggagaattagtctccacgaggagaattactcgggcctagcagctagagtatttcgaggtcatcctaactgggttccacttttgaatttttggtttttgggttttttgtttttttggagacaagatctcgctccacttgggagcaaggtctcccaaagctggagtgcagtggtgggacctcagcctccgggggtagctggggccaaaagtgcgcgccaccatgcccggttcttattttgggtttctggtagagctctcgctattgtgcccaggctggtctcgaactactgggttcaagcaatcctcccacctcggcctcccaaagtactgggattacaggcgcgagccactcgcccggccgggttccacttctgaaagcttggggagccgctgggccttccaagaaaagtgctccacctcccgacggcaggcagagcccctggcccggctatctttccagggccgaaagctaacagtcaagacgcgaaacgaggaattcgggtcagggtggcaaagcaaagcgcgatgacagtgaggacgacgtctagacgcaaacatacatcaaatcgggccgaagcccgctgtcgccgcgcgggctgaacctggcacccggagcaacgcgcgaccccgggacgagacgctctcgtccgagccaaactacatcccccggcgtgcactgcagcgcccgcccctcgccggccggcggggcccgggaggaaggcggccgcgctgccagtcccgcaggtcccctaggcccctttcgctgcggcctttccccaacccggacccggcacttctcgggttccgcgactgccgatcgccccggcgcggcaccgctccctcaggagtcgcctaggccgcgcagtctcccgacttctcgtcaggctttcgcgccggcgctccagcaatcactggctggagaaggtgggcgttccggctcgagaggaccctgccgcggctccggaagagcctcgtcctgggcggcggtggtgcggcggtcgccgttatggccactgggctgggcggctgaccgccgggctaggaaagggcccagggccccgaatctcggtggccgctgctccagcgcggcctgcgccatggcctcctccgccgcctcctcggagcatttcgagaagctgcacgagatcttccgcggcctccatgaagacctacaaggggtgcccgagcggctgctggggacggcggggaccgaagaaaagaagaaattgatcagggattttgatgaaaagcaacaggaagcaaatgaaacgctggcagagatggaggaggagctacgttatgcacccctgtctttccgaaaccccatgatgtctaagcttcgaaactaccggaaggaccttgctaaactccatcgggaggtgagaagcacacctttgacagccacacctggaggccgaggagacatgaaatatggcatatatgctgtagagaatgagcatatgaatcggctacagtctcaaagggcaatgcttctgcagggcactgaaagcctgaaccgggccacccaaagtattgaacgttctcatcggattgccacagagactgaccagattggctcagaaatcatagaagagctgggggaacaacgagaccagttagaacgtaccaagagtagactggtaaacacaagtgaaaacttgagcaaaagtcggaagattctccgttcaatgtccagaaaagtgacaaccaacaagctgctgctttccattatcatcttactggagctcgccatcctgggaggcctggtttactacaaattctttcgcagccattgaacttctatagggaagggtttgtggaccagaactttgaccttgtgaatgcatgatgttagggatgtggatagaataagcatattgctgctgtgggctgacagttcaaggatgcactgtatagccaggctgtgggaggagggaggaaagatgaaaaaccacttaaatgtgaaggaacaacagcaacaagaccagtatgatataccaaggtaataaatgctgtttatgacttctttaaatttacatagtactgtagcatattaataccctgtgaactgcaaaaaaccaaatacatttacagtagtattggtcaccaaaatagaggggaaactttacaattgtgagaatgtgtaaatgttctcattaaggcagtattgacccagacaaccatttagtattcatctatcccctcaatgcctcataattctggaatgcctgttgtgaaacatgtcagtgcacagtgtctcctaaattctcacacgtgcttgattttctgattcatctggtgaactgggagtaggaagttggtcatagacaatatgccctccttctcttgtctgaccaaagcttgaagcaatcacatctactgccaggttagctgtagtcttcgcctcttcctctgaggtggccaactgaggattgacttcaacaagatccagtgctgatagcaaccctgtattgtgtattttcctcagcaatatacatgccttctcgataggttagtcccccgacaacaggagttcctgtggctggagccagtgtagggtcaaatgcatcaatatcaaaactcaaatggattggtctttgtctcctaaaaagg

SEQ ID NO: 389978 - DNA, 2653 bp, Homo sapiens
  misc_feature (2614)..(2614): n is a, c, g, or t
gcaagaagggaccttgtaatttttaacacgtgacacttagtggcagatgagacctaatgaagccaggcccaccttccacaccagattataaattcccctggagcagagattaaatgttttattcaccaacatgcccagatccctcgcaatgcctacgcttgacaaacacctgttgtcaacaagtgcacgaggcagcctaggaggagaattagtctccacgaggagaattactcgggcctagcagctagagtatttcgaggtcatcctaactgggttccacttttgaatttttggtttttgggttttttgtttttttggagacaagatctcgctccacttgggagcaaggtctcccaaagctggagtgcagtggtgggacctcagcctccgggggtagctggggccaaaagtgcgcgccaccatgcccggttcttattttgggtttctggtagagctctcgctattgtgcccaggctggtctcgaactactgggttcaagcaatcctcccacctcggcctcccaaagtactgggattacaggcgcgagccactcgcccggccgggttccacttctgaaagcttggggagccgctgggccttccaagaaaagtgctccacctcccgacggcaggcagagcccctggcccggctatctttccagggccgaaagctaacagtcaagacgcgaaacgaggaattcgggtcagggtggcaaagcaaagcgcgatgacagtgaggacgacgtctagacgcaaacatacatcaaatcgggccgaagcccgctgtcgccgcgcgggctgaacctggcacccggagcaacgcgcgaccccgggacgagacgctctcgtccgagccaaactacatcccccggcgtgcactgcagcgcccgcccctcgccggccggcggggcccgggaggaaggcggccgcgctgccagtcccgcaggtcccctaggcccctttcgctgcggcctttccccaacccggacccggcacttctcgggttccgcgactgccgatcgccccggcgcggcaccgctccctcaggagtcgcctaggccgcgcagtctcccgacttctcgtcaggctttcgcgccggcgctccagcaatcactggctggagaaggtgggcgttccggctcgagaggaccctgccgcggctccggaagagcctcgtcctgggcggcggtggtgcggcggtcgccgttatggccactgggctgggcggctgaccgccgggctaggaaagggcccagggccccgaatctcggtggccgctgctccagcgcggcctgcgccatggcctcctccgccgcctcctcggagcatttcgagaagctgcacgagatcttccgcggcctccatgaagacctacaaggggtgcccgagcggctgctggggacggcggggaccgaagaaaagaagaaattgatcagggattttgatgaaaagcaacaggaagcaaatgaaacgctggcagagatggaggaggagctacgttatgcacccctgtctttccgaaaccccatgatgtctaagcttcgaaactaccggaaggaccttgctaaactccatcgggaggtgagaagcacacctttgacagccacacctggaggccgaggagacatgaaatatggcatatatgctgtagagaatgagcatatgaatcggctacagtctcaaagggcaatgcttctgcagggcactgaaagcctgaaccgggccacccaaagtattgaacgttctcatcggattgccacagagactgaccagattggctcagaaatcatagaagagctgggggaacaacgagaccagttagaacgtaccaagagtagactggtaaacacaagtgaaaacttgagcaaaagtcggaagattctccgttcaatgtccagaaaagtgacaaccaacaagctgctgctttccattatcatcttactggagctcgccatcctgggaggcctggtttactacaaattctttcgcagccattgaacttctatagggaagggtttgtggaccagaactttgaccttgtgaatgcatgatgttagggatgtggatagaataagcatattgctgctgtgggctgacagttcaaggatgcactgtatagccaggctgtgggaggagggaggaaagatgaaaaaccacttaaatgtgaaggaacaacagcaacaagaccagtatgatataccaaggtaataaatgctgtttatgacttctttaaatttacatagtactgtagcatattaataccctgtgaactgcaaaaaaccaaatacatttacagtagtattggtcaccaaaatagaggggaaactttacaattgtgagaatgtgtaaatgttctcattaaggcagtattgacccagacaaccatttagtattcatctatcccctcaatgcctcataattctggaatgcctgttgtgaaacatgtcagtgcacagtgtctcctaaattctcacacgtgcttgattttctgattcatctggtgaactgggagtaggaagttggtcatagacaatatgccctccttctcttgtctgaccaaagcttgaagcaatcacatctactgccaggttagctgtagtcttgccaatccacangggggccgggatcctctagaacgaccgcagcatcactcc

SEQ ID NO: 389979 - DNA, 4184 bp, Homo sapiens
aatatggcttggtcgggctgggttaatggacgagggtgggggtcgcgtatgcactgggctgggcggctgaccgccgggctaggaaagggcccagggccccgaatctcggtggccgctgctccagcgcggcctgcgccatggcctcctccgccgcctcctcggagcatttcgagaagctgcacgagatcttccgcggcctccatgaagacctacaaggggtgcccgagcggctgctggggacggcggggaccgaagaaaagaagaaattgatcagggattttgatgaaaagcaacaggaagcaaatgaaacgctggcagagatggaggaggagctacgttatgcacccctgtctttccgaaaccccatgatgtctaagcttcgaaactaccggaaggaccttgctaaactccatcgggaggtgagaagcacacctttgacagccacacctggaggccgaggagacatgaaatatggcatatatgctgtagagaatgagcatatgaatcggctacagtctcaaagggcaatgcttctgcagggcactgaaagcctgaaccgggccacccaaagtattgaacgttctcatcggattgccacagagactgaccagattggctcagaaatcatagaagagctgggggaacaacgagaccagttagaacgtaccaagagtagactggtaaacacaagtgaaaacttgagcaaaagtcggaagattctccgttcaatgtccagaaaagtgacaaccaacaagctgctgctttccattatcatcttactggagctcgccatcctgggaggcctggtttactacaaattctttcgcagccattgaacttctatagggaagggtttgtggaccagaactttgaccttgtgaatgcatgatgttagggatgtggatagaataagcatattgctgctgtgggctgacagttcaaggatgcactgtatagccaggctgtgggaggagggaggaaagatgaaaaaccacttaaatgtgaaggaacaacagcaacaagaccagtatgatataccaaggtaataaatgctgtttatgacttctttaaatttacatagtactgtagcatattaataccctgtgaactgcaaaaaaccaaatacatttacagtagtattggtcaccaaaatagaggggaaactttacaattgtgagaatgtgtaaatgttctcattaaggcagtattgacccagacaaccatttagtattcatctatcccctcaatgcctcataattctggaatgcctgttgtgaaacatgtcagtgcacagtgtctcctaaattctcacacgtgcttgattttctgattcatctggtgaactgggagtaggaagttggtcatagacaatatgccctccttctcttgtctgaccaaagcttgaagcaatcacatctactgccaggttagctgtagtcttcgcctcttcctctgaggtggccaactgaggattgacttcaacaagatccagtgctgatagcaaccctggaagaacaaagtgtgacaaaacctcaggttcccttgctgctactctcagtgagggtcatcccactgggacagggagaacaagccaaagtaaaaacaagagtccattttatagtagaaaatacctatttttaggaagccccttgcacctcatcctcttggccatgaatttaagttaaaacactgttgtgctatagtagattaaaagaaaccttttaagataatgaaataaaccatccctgttcaactaacataacaggcataattgtcaggcgttctggaaaaggaaaaggcttggtgttgggtgggggaggttttcatcctgcttgttggcaaaatgtatgccacctccagtatgactaggaaccttccagatgcctgcctggaaatgaatcaagtatgaaggcagaggaaatctgccacttgcactagccaaactgcattcccacttttgaactctaatgtgttatctgtatctgttagagcaccacaccatatgccctgaaatgtagttattactgcaaacttcattctcacccctgcaggcctgagctctggaggcaggttccacatctaacaacatctttttgtctcccagcagactgacccagtgtcttgtacttgatcaagagaaaattcagccatatgttaattattttatctggacttcagttaccttctgttaaggtttgagaacttgtgtcaaagttctcggtagtgttcctttggcctggagcaagtggaagggaagcttaaaccagaagaacctatccagacctgctactatgctcacccctctaaatgcctcacttctctatagaatttaactttttagttggttattctggatgaagggtgatctgaacaagctagtattcaggaatacaagtatctaagaatatttagggtggccataaagtctggaaacacaggcaaatgtacctaatggtttattgatattacactatagtacatgatgtgctgaatgccatcatgtccgttcagcatcttcccttattagcaatgcatagttgagtgtacagtgccaaactgcaaccaacaggtgtattactgtagcatttccatcatttcctgcacatggacctgtgttcctgatttgtctctgatttccactgactaaacctgcacctttagcatatcccagaagtggtcatcaaagtttgcactattagaaatatatacatgacttatgtttccagactattgccaccctataaattaagcaaactgctttatgtatctagttgacagcattataacagtgcagtggcacaatcatggctcactgcagcctcaacctcccaagtagttgggacacctggctaattattttttgtagaaacggggtcacactatgttgcccacgctggtcttgaacccctggggtcaagtaatcctcttgccttggcctcccagagtactgggattataggtatgaaccactgtgcctagccccatgagtgtcttttggagtaaaatattgtagcataggaacaaagagacaagccatgccatatataagtgctagaggttattaacccctgctctaagtggtgtttttaggaagcaaagcagagaattgaacccccaagttctctggccaataacctaaggaccactggcaacatctaagattgcagatctgagaattagaccagtactgcctgcctttttgtactgcctaaggttctggcaggctgtggcgctaaggagaccatttctcaatgtgagtttctatcccagctagtcaagggttctctatagccctgaacctttcaatctggggtctctatctataccctagttccatcagatggttactgaagcagtatgatttggtagttctttaaattttggaatgaaaggtcatttgaagtagctttaaaaccagaagctttctgacagaaatggaaactgtttgcaaacaagtatgagttttggaaaagtagccagtcttgataacgtagaattcatcttagtactctttccatcagccattctcatctaactgtatcccccttattagaaatcctttcaggctctagtacaagacctaccctacataaaggacccaagatattgtccagtttgcagatttcttcaagagatcagctttagctccaaattcacaactcccaatgaaccaatctcttagagtgcaaattacagccttgcactcttatcttatcttgccttcttatcttaatctgcctttagataactcaaagaactgcatcagtttgacaatttattcttgtatttaattgtttaaatatacaattttttactcattattaccttagtgtaatttggtaagagccatgtccaagcatgactctaaaggactatatcctttttattagcatggccatataatttttagctacaaaagtttaagcaaaaacaaactctgcaatgatgtggaatagcagaaaagatcctttgcaggcaagagactctagcatatttacctatgtagttaacaggctgcagacctggttgctacatacctgtattgtgtattttcctcagcaatatacatgccttctcgataggttagtcccccgacaacaggagttcctgtggctggagccagtgtagggtcaaatgcatcaatatcaaaactcaaatggattggtctttgtctcctaaaaagg

SEQ ID NO: 389980 - DNA, 5286 bp, Homo sapiens
gcaagaagggaccttgtaatttttaacacgtgacacttagtggcagatgagacctaatgaagccaggcccaccttccacaccagattataaattcccctggagcagagattaaatgttttattcaccaacatgcccagatccctcgcaatgcctacgcttgacaaacacctgttgtcaacaagtgcacgaggcagcctaggaggagaattagtctccacgaggagaattactcgggcctagcagctagagtatttcgaggtcatcctaactgggttccacttttgaatttttggtttttgggttttttgtttttttggagacaagatctcgctccacttgggagcaaggtctcccaaagctggagtgcagtggtgggacctcagcctccgggggtagctggggccaaaagtgcgcgccaccatgcccggttcttattttgggtttctggtagagctctcgctattgtgcccaggctggtctcgaactactgggttcaagcaatcctcccacctcggcctcccaaagtactgggattacaggcgcgagccactcgcccggccgggttccacttctgaaagcttggggagccgctgggccttccaagaaaagtgctccacctcccgacggcaggcagagcccctggcccggctatctttccagggccgaaagctaacagtcaagacgcgaaacgaggaattcgggtcagggtggcaaagcaaagcgcgatgacagtgaggacgacgtctagacgcaaacatacatcaaatcgggccgaagcccgctgtcgccgcgcgggctgaacctggcacccggagcaacgcgcgaccccgggacgagacgctctcgtccgagccaaactacatcccccggcgtgcactgcagcgcccgcccctcgccggccggcggggcccgggaggaaggcggccgcgctgccagtcccgcaggtcccctaggcccctttcgctgcggcctttccccaacccggacccggcacttctcgggttccgcgactgccgatcgccccggcgcggcaccgctccctcaggagtcgcctaggccgcgcagtctcccgacttctcgtcaggctttcgcgccggcgctccagcaatcactggctggagaaggtgggcgttccggctcgagaggaccctgccgcggctccggaagagcctcgtcctgggcggcggtggtgcggcggtcgccgttatggccactgggctgggcggctgaccgccgggctaggaaagggcccagggccccgaatctcggtggccgctgctccagcgcggcctgcgccatggcctcctccgccgcctcctcggagcatttcgagaagctgcacgagatcttccgcggcctccatgaagacctacaaggggtgcccgagcggctgctggggacggcggggaccgctggcagagatggaggaggagctacgttatgcacccctgtctttccgaaaccccatgatgtctaagcttcgaaactaccggaaggaccttgctaaactccatcgggaggtgagaagcacacctttgacagccacacctggaggccgaggagacatgaaatatggcatatatgctgtagagaatgagcatatgaatcggctacagtctcaaagggcaatgcttctgcagggcactgaaagcctgaaccgggccacccaaagtattgaacgttctcatcggattgccacagagactgaccagattggctcagaaatcatagaagagctgggggaacaacgagaccagttagaacgtaccaagagtagactggtaaacacaagtgaaaacttgagcaaaagtcggaagattctccgttcaatgtccagaaaagtgacaaccaacaagctgctgctttccattatcatcttactggagctcgccatcctgggaggcctggtttactacaaattctttcgcagccattgaacttctatagggaagggtttgtggaccagaactttgaccttgtgaatgcatgatgttagggatgtggatagaataagcatattgctgctgtgggctgacagttcaaggatgcactgtatagccaggctgtgggaggagggaggaaagatgaaaaaccacttaaatgtgaaggaacaacagcaacaagaccagtatgatataccaaggtaataaatgctgtttatgacttctttaaatttacatagtactgtagcatattaataccctgtgaactgcaaaaaaccaaatacatttacagtagtattggtcaccaaaatagaggggaaactttacaattgtgagaatgtgtaaatgttctcattaaggcagtattgacccagacaaccatttagtattcatctatcccctcaatgcctcataattctggaatgcctgttgtgaaacatgtcagtgcacagtgtctcctaaattctcacacgtgcttgattttctgattcatctggtgaactgggagtaggaagttggtcatagacaatatgccctccttctcttgtctgaccaaagcttgaagcaatcacatctactgccaggttagctgtagtcttcgcctcttcctctgaggtggccaactgaggattgacttcaacaagatccagtgctgatagcaaccctggaagaacaaagtgtgacaaaacctcaggttcccttgctgctactctcagtgagggtcatcccactgggacagggagaacaagccaaagtaaaaacaagagtccattttatagtagaaaatacctatttttaggaagccccttgcacctcatcctcttggccatgaatttaagttaaaacactgttgtgctatagtagattaaaagaaaccttttaagataatgaaataaaccatccctgttcaactaacataacaggcataattgtcaggcgttctggaaaaggaaaaggcttggtgttgggtgggggaggttttcatcctgcttgttggcaaaatgtatgccacctccagtatgactaggaaccttccagatgcctgcctggaaatgaatcaagtatgaaggcagaggaaatctgccacttgcactagccaaactgcattcccacttttgaactctaatgtgttatctgtatctgttagagcaccacaccatatgccctgaaatgtagttattactgcaaacttcattctcacccctgcaggcctgagctctggaggcaggttccacatctaacaacatctttttgtctcccagcagactgacccagtgtcttgtacttgatcaagagaaaattcagccatatgttaattattttatctggacttcagttaccttctgttaaggtttgagaacttgtgtcaaagttctcggtagtgttcctttggcctggagcaagtggaagggaagcttaaaccagaagaacctatccagacctgctactatgctcacccctctaaatgcctcacttctctatagaatttaactttttagttggttattctggatgaagggtgatctgaacaagctagtattcaggaatacaagtatctaagaatatttagggtggccataaagtctggaaacacaggcaaatgtacctaatggtttattgatattacactatagtacatgatgtgctgaatgccatcatgtccgttcagcatcttcccttattagcaatgcatagttgagtgtacagtgccaaactgcaaccaacaggtgtattactgtagcatttccatcatttcctgcacatggacctgtgttcctgatttgtctctgatttccactgactaaacctgcacctttagcatatcccagaagtggtcatcaaagtttgcactattagaaatatatacatgacttatgtttccagactattgccaccctataaattaagcaaactgctttatgtatctagttgacagcattataacagtgcagtggcacaatcatggctcactgcagcctcaacctcccaagtagttgggacacctggctaattattttttgtagaaacggggtcacactatgttgcccacgctggtcttgaacccctggggtcaagtaatcctcttgccttggcctcccagagtactgggattataggtatgaaccactgtgcctagccccatgagtgtcttttggagtaaaatattgtagcataggaacaaagagacaagccatgccatatataagtgctagaggttattaacccctgctctaagtggtgtttttaggaagcaaagcagagaattgaacccccaagttctctggccaataacctaaggaccactggcaacatctaagattgcagatctgagaattagaccagtactgcctgcctttttgtactgcctaaggttctggcaggctgtggcgctaaggagaccatttctcaatgtgagtttctatcccagctagtcaagggttctctatagccctgaacctttcaatctggggtctctatctataccctagttccatcagatggttactgaagcagtatgatttggtagttctttaaattttggaatgaaaggtcatttgaagtagctttaaaaccagaagctttctgacagaaatggaaactgtttgcaaacaagtatgagttttggaaaagtagccagtcttgataacgtagaattcatcttagtactctttccatcagccattctcatctaactgtatcccccttattagaaatcctttcaggctctagtacaagacctaccctacataaaggacccaagatattgtccagtttgcagatttcttcaagagatcagctttagctccaaattcacaactcccaatgaaccaatctcttagagtgcaaattacagccttgcactcttatcttatcttgccttcttatcttaatctgcctttagataactcaaagaactgcatcagtttgacaatttattcttgtatttaattgtttaaatatacaattttttactcattattaccttagtgtaatttggtaagagccatgtccaagcatgactctaaaggactatatcctttttattagcatggccatataatttttagctacaaaagtttaagcaaaaacaaactctgcaatgatgtggaatagcagaaaagatcctttgcaggcaagagactctagcatatttacctatgtagttaacaggctgcagacctggttgctacatacctgtattgtgtattttcctcagcaatatacatgccttctcgataggttagtcccccgacaacaggagttcctgtggctggagccagtgtagggtcaaatgcatcaatatcaaaactcaaatggattggtctttgtctcctaaaaagg

SEQ ID NO: 389981 - DNA, 2171 bp, Homo sapiens
gcaagaagggaccttgtaatttttaacacgtgacacttagtggcagatgagacctaatgaagccaggcccaccttccacaccagattataaattcccctggagcagagattaaatgttttattcaccaacatgcccagatccctcgcaatgcctacgcttgacaaacacctgttgtcaacaagtgcacgaggcagcctaggaggagaattagtctccacgaggagaattactcgggcctagcagctagagtatttcgaggtcatcctaactgggttccacttttgaatttttggtttttgggttttttgtttttttggagacaagatctcgctccacttgggagcaaggtctcccaaagctggagtgcagtggtgggacctcagcctccgggggtagctggggccaaaagtgcgcgccaccatgcccggttcttattttgggtttctggtagagctctcgctattgtgcccaggctggtctcgaactactgggttcaagcaatcctcccacctcggcctcccaaagtactgggattacaggcgcgagccactcgcccggccgggttccacttctgaaagcttggggagccgctgggccttccaagaaaagtgctccacctcccgacggcaggcagagcccctggcccggctatctttccagggccgaaagctaacagtcaagacgcgaaacgaggaattcgggtcagggtggcaaagcaaagcgcgatgacagtgaggacgacgtctagacgcaaacatacatcaaatcgggccgaagcccgctgtcgccgcgcgggctgaacctggcacccggagcaacgcgcgaccccgggacgagacgctctcgtccgagccaaactacatcccccggcgtgcactgcagcgcccgcccctcgccggccggcggggcccgggaggaaggcggccgcgctgccagtcccgcaggtcccctaggcccctttcgctgcggcctttccccaacccggacccggcacttctcgggttccgcgactgccgatcgccccggcgcggcaccgctccctcaggagtcgcctaggccgcgcagtctcccgacttctcgtcaggctttcgcgccggcgctccagcaatcactggctggagaaggtgggcgttccggctcgagaggaccctgccgcggctccggaagagcctcgtcctgggcggcggtggtgcggcggtcgccgttatggccactgggctgggcggctgaccgccgggctaggaaagggcccagggccccgaatctcggtggccgctgctccagcgcggcctgcgccatggcctcctccgccgcctcctcggagcatttcgagaagctgcacgagatcttccgcggcctccatgaagacctacaaggggtgcccgagcggctgctggggacggcggggaccgaagaaaagaagaaattgatcagggattttgatgaaaagcaacaggaagcaaatgaaacgctggcagagatggaggaggagctacgttatgcacccctgtctttccgaaaccccatgatgtctaagcttcgaaactaccggaaggaccttgctaaactccatcgggaggtgagaagcacacctttgacagccacacctggaggccgaggagacatgaaatatggcatatatgctgtagagaatgagcatatgaatcggctacagtctcaaagggcaatgcttctgcagggcactgaaagcctgaaccgggccacccaaagtattgaacgttctcatcggattgccacagagactgaccagattggctcagaaatcatagaagagctgggggaacaacgagaccagttagaacgtaccaagagtagaagtgacaaccaacaagctgctgctttccattatcatcttactggagctcgccatcctgggaggcctggtttactacaaattctttcgcagccattgaacttctatagggaagggtttgtggaccagaactttgaccttgtgaatgcatgatgttagggatgtggatagaataagcatattgctgctgtgggctgacagttcaaggatgcactgtatagccaggctgtgggaggagggaggaaagatgaaaaaccacttaaatgtgaaggaacaacagcaacaagaccagtatgatataccaaggtaataaatgctgtttatgacttctttaaa

SEQ ID NO: 389982 - DNA, 2986 bp, Homo sapiens
cgtcgacgtcagacaagagaaggagggcatattgtctatgaccaacttcctactcataattctggaatgcctgttgtgaaacatgtcagtgcacagtgtctcctaaattctcacacgtgcttgattttctgattcatctggtgaactgggagtaggaagttggtcatagacaatatgccctccttctcttgtctgaccaaagcttgaagcaatcacatctactgccaggttagctgtagtcttcgcctcttcctctgaggtggccaactgaggattgacttcaacaagatccagtgctgatagcaaccctggaagaacaaagtgtgacaaaacctcaggttcccttgctgctactctcagtgagggtcatcccactgggacagggagaacaagccaaagtaaaaacaagagtccattttatagtagaaaatacctatttttaggaagccccttgcacctcatcctcttggccatgaatttaagttaaaacactgttgtgctatagtagattaaaagaaaccttttaagataatgaaataaaccatccctgttcaactaacataacaggcataattgtcaggcgttctggaaaaggaaaaggcttggtgttgggtgggggaggttttcatcctgcttgttggcaaaatgtatgccacctccagtatgactaggaaccttccagatgcctgcctggaaatgaatcaagtatgaaggcagaggaaatctgccacttgcactagccaaactgcattcccacttttgaactctaatgtgttatctgtatctgttagagcaccacaccatatgccctgaaatgtagttattactgcaaacttcattctcacccctgcaggcctgagctctggaggcaggttccacatctaacaacatctttttgtctcccagcagactgacccagtgtcttgtacttgatcaagagaaaattcagccatatgttaattattttatctggacttcagttaccttctgttaaggtttgagaacttgtgtcaaagttctcggtagtgttcctttggcctggagcaagtggaagggaagcttaaaccagaagaacctatccagacctgctactatgctcacccctctaaatgcctcacttctctatagaatttaactttttagttggttattctggatgaagggtgatctgaacaagctagtattcaggaatacaagtatctaagaatatttagggtggccataaagtctggaaacacaggcaaatgtacctaatggtttattgatattacactatagtacatgatgtgctgaatgccatcatgtccgttcagcatcttcccttattagcaatgcatagttgagtgtacagtgccaaactgcaaccaacaggtgtattactgtagcatttccatcatttcctgcacatggacctgtgttcctgatttgtctctgatttccactgactaaacctgcacctttagcatatcccagaagtggtcatcaaagtttgcactattagaaatatatacatgacttatgtttccagactattgccaccctataaattaagcaaactgctttatgtatctagttgacagcattataacagtgcagtggcacaatcatggctcactgcagcctcaacctcccaagtagttgggacacctggctaattattttttgtagaaacggggtcacactatgttgcccacgctggtcttgaacccctggggtcaagtaatcctcttgccttggcctcccagagtactgggattataggtatgaaccactgtgcctagccccatgagtgtcttttggagtaaaatattgtagcataggaacaaagagacaagccatgccatatataagtgctagaggttattaacccctgctctaagtggtgtttttaggaagcaaagcagagaattgaacccccaagttctctggccaataacctaaggaccactggcaacatctaagattgcagatctgagaattagaccagtactgcctgcctttttgtactgcctaaggttctggcaggctgtggcgctaaggagaccatttctcaatgtgagtttctatcccagctagtcaagggttctctatagccctgaacctttcaatctggggtctctatctataccctagttccatcagatggttactgaagcagtatgatttggtagttctttaaattttggaatgaaaggtcatttgaagtagctttaaaaccagaagctttctgacagaaatggaaactgtttgcaaacaagtatgagttttggaaaagtagccagtcttgataacgtagaattcatcttagtactctttccatcagccattctcatctaactgtatcccccttattagaaatcctttcaggctctagtacaagacctaccctacataaaggacccaagatattgtccagtttgcagatttcttcaagagatcagctttagctccaaattcacaactcccaatgaaccaatctcttagagtgcaaattacagccttgcactcttatcttatcttgccttcttatcttaatctgcctttagataactcaaagaactgcatcagtttgacaatttattcttgtatttaattgtttaaatatacaattttttactcattattaccttagtgtaatttggtaagagccatgtccaagcatgactctaaaggactatatcctttttattagcatggccatataatttttagctacaaaagtttaagcaaaaacaaactctgcaatgatgtggaatagcagaaaagatcctttgcaggcaagagactctagcatatttacctatgtagttaacaggctgcagacctggttgctacatacctgtattgtgtattttcctcagcaatatacatgccttctcgataggttagtcccccgacaacaggagttcctgtggctggagccagtgtagggtcaaatgcatcaatatcaaaactcaaatggattggtctttgtctcctaaaaagg

SEQ ID NO: 389983 - DNA, 1575 bp, Homo sapiens
gcaagaagggaccttgtaatttttaacacgtgacacttagtggcagatgagacctaatgaagccaggcccaccttccacaccagattataaattcccctggagcagagattaaatgttttattcaccaacatgcccagatccctcgcaatgcctacgcttgacaaacacctgttgtcaacaagtgcacgaggcagcctaggaggagaattagtctccacgaggagaattactcgggcctagcagctagagtatttcgaggtcatcctaactgggttccacttttgaatttttggtttttgggttttttgtttttttggagacaagatctcgctccacttgggagcaaggtctcccaaagctggagtgcagtggtgggacctcagcctccgggggtagctggggccaaaagtgcgcgccaccatgcccggttcttattttgggtttctggtagagctctcgctattgtgcccaggctggtctcgaactactgggttcaagcaatcctcccacctcggcctcccaaagtactgggattacaggcgcgagccactcgcccggccgggttccacttctgaaagcttggggagccgctgggccttccaagaaaagtgctccacctcccgacggcaggcagagcccctggcccggctatctttccagggccgaaagctaacagtcaagacgcgaaacgaggaattcgggtcagggtggcaaagcaaagcgcgatgacagtgaggacgacgtctagacgcaaacatacatcaaatcgggccgaagcccgctgtcgccgcgcgggctgaacctggcacccggagcaacgcgcgaccccgggacgagacgctctcgtccgagccaaactacatcccccggcgtgcactgcagcgcccgcccctcgccggccggcggggcccgggaggaaggcggccgcgctgccagtcccgcaggtcccctaggcccctttcgctgcggcctttccccaacccggacccggcacttctcgggttccgcgactgccgatcgccccggcgcggcaccgctccctcaggagtcgcctaggccgcgcagtctcccgacttctcgtcaggctttcgcgccggcgctccagcaatcactggctggagaaggtgggcgttccggctcgagaggaccctgccgcggctccggaagagcctcgtcctgggcggcggtggtgcggcggtcgccgttatggccactgggctgggcggctgaccgccgggctaggaaagggcccagggccccgaatctcggtggccgctgctccagcgcggcctgcgccatggcctcctccgccgcctcctcggagcatttcgagaagctgcacgagatcttccgcggcctccatgaagacctacaaggggtgcccgagcggctgctggggacggcggggaccggggagattagtaatttttaggtattaaagatacactcaaccaaagggacagaatgggaaaggctgaaaggggaatgaataacgttctcatcgttcaagtcattgccggtgccacacccagagaaaaacaagcaccacaccagacagcctctcagcaagccga

SEQ ID NO: 389984 - DNA, 2233 bp, Homo sapiens
gcaagaagggaccttgtaatttttaacacgtgacacttagtggcagatgagacctaatgaagccaggcccaccttccacaccagattataaattcccctggagcagagattaaatgttttattcaccaacatgcccagatccctcgcaatgcctacgcttgacaaacacctgttgtcaacaagtgcacgaggcagcctaggaggagaattagtctccacgaggagaattactcgggcctagcagctagagtatttcgaggtcatcctaactgggttccacttttgaatttttggtttttgggttttttgtttttttggagacaagatctcgctccacttgggagcaaggtctcccaaagctggagtgcagtggtgggacctcagcctccgggggtagctggggccaaaagtgcgcgccaccatgcccggttcttattttgggtttctggtagagctctcgctattgtgcccaggctggtctcgaactactgggttcaagcaatcctcccacctcggcctcccaaagtactgggattacaggcgcgagccactcgcccggccgggttccacttctgaaagcttggggagccgctgggccttccaagaaaagtgctccacctcccgacggcaggcagagcccctggcccggctatctttccagggccgaaagctaacagtcaagacgcgaaacgaggaattcgggtcagggtggcaaagcaaagcgcgatgacagtgaggacgacgtctagacgcaaacatacatcaaatcgggccgaagcccgctgtcgccgcgcgggctgaacctggcacccggagcaacgcgcgaccccgggacgagacgctctcgtccgagccaaactacatcccccggcgtgcactgcagcgcccgcccctcgccggccggcggggcccgggaggaaggcggccgcgctgccagtcccgcaggtcccctaggcccctttcgctgcggcctttccccaacccggacccggcacttctcgggttccgcgactgccgatcgccccggcgcggcaccgctccctcaggagtcgcctaggccgcgcagtctcccgacttctcgtcaggctttcgcgccggcgctccagcaatcactggctggagaaggtgggcgttccggctcgagaggaccctgccgcggctccggaagagcctcgtcctgggcggcggtggtgcggcggtcgccgttatggccactgggctgggcggctgaccgccgggctaggaaagggcccagggccccgaatctcggtggccgctgctccagcgcggcctgcgccatggcctcctccgccgcctcctcggagcatttcgagaagctgcacgagatcttccgcggcctccatgaagacctacaaggggtgcccgagcggctgctggggacggcggggaccgaagaaaagaagaaattgatcagggattttgatgaaaagcaacaggaagcaaatgaaacgctggcagagatggaggaggagctacgttatgcacccctgtctttccgaaaccccatgatgtctaagcttcgaaactaccggaaggaccttgctaaactccatcgggaggtgagaagcacacctttgacagccacacctggaggccgaggagacatgaaatatggcatatatgctgtagagaatgagcatatgaatcggctacagtctcaaagggcaatgcttctgcagggcactgaaagcctgaaccgggccacccaaagtattgaacgttctcatcggattgccacagagactgaccagattggctcagaaatcatagaagagctgggggaacaacgagaccagttagaacgtaccaagagtagactggtaaacacaagtgaaaacttgagcaaaagtcggaagattctccgttcaatgtccagaaaagtgacaaccaacaagctgctgctttccattatcatcttactggagctcgccatcctgggaggcctggtttactacaaattctttcgcagccattgaacttctatagggaagggtttgtggaccagaactttgaccttgtgaatgcatgatgttagggatgtggatagaataagcatattgctgctgtgggctgacagttcaaggatgcactgtatagccaggctgtgggaggagggaggaaagatgaaaaaccacttaaatgtgaaggaacaacagcaacaagaccagtatgatataccaaggtaataaatgctgtttatgacttctttaaa

SEQ ID NO: 389985 - DNA, 5345 bp, Homo sapiens
gcaagaagggaccttgtaatttttaacacgtgacacttagtggcagatgagacctaatgaagccaggcccaccttccacaccagattataaattcccctggagcagagattaaatgttttattcaccaacatgcccagatccctcgcaatgcctacgcttgacaaacacctgttgtcaacaagtgcacgaggcagcctaggaggagaattagtctccacgaggagaattactcgggcctagcagctagagtatttcgaggtcatcctaactgggttccacttttgaatttttggtttttgggttttttgtttttttggagacaagatctcgctccacttgggagcaaggtctcccaaagctggagtgcagtggtgggacctcagcctccgggggtagctggggccaaaagtgcgcgccaccatgcccggttcttattttgggtttctggtagagctctcgctattgtgcccaggctggtctcgaactactgggttcaagcaatcctcccacctcggcctcccaaagtactgggattacaggcgcgagccactcgcccggccgggttccacttctgaaagcttggggagccgctgggccttccaagaaaagtgctccacctcccgacggcaggcagagcccctggcccggctatctttccagggccgaaagctaacagtcaagacgcgaaacgaggaattcgggtcagggtggcaaagcaaagcgcgatgacagtgaggacgacgtctagacgcaaacatacatcaaatcgggccgaagcccgctgtcgccgcgcgggctgaacctggcacccggagcaacgcgcgaccccgggacgagacgctctcgtccgagccaaactacatcccccggcgtgcactgcagcgcccgcccctcgccggccggcggggcccgggaggaaggcggccgcgctgccagtcccgcaggtcccctaggcccctttcgctgcggcctttccccaacccggacccggcacttctcgggttccgcgactgccgatcgccccggcgcggcaccgctccctcaggagtcgcctaggccgcgcagtctcccgacttctcgtcaggctttcgcgccggcgctccagcaatcactggctggagaaggtgggcgttccggctcgagaggaccctgccgcggctccggaagagcctcgtcctgggcggcggtggtgcggcggtcgccgttatggccactgggctgggcggctgaccgccgggctaggaaagggcccagggccccgaatctcggtggccgctgctccagcgcggcctgcgccatggcctcctccgccgcctcctcggagcatttcgagaagctgcacgagatcttccgcggcctccatgaagacctacaaggggtgcccgagcggctgctggggacggcggggaccgaagaaaagaagaaattgatcagggattttgatgaaaagcaacaggaagcaaatgaaacgctggcagagatggaggaggagctacgttatgcacccctgtctttccgaaaccccatgatgtctaagcttcgaaactaccggaaggaccttgctaaactccatcgggaggtgagaagcacacctttgacagccacacctggaggccgaggagacatgaaatatggcatatatgctgtagagaatgagcatatgaatcggctacagtctcaaagggcaatgcttctgcagggcactgaaagcctgaaccgggccacccaaagtattgaacgttctcatcggattgccacagagactgaccagattggctcagaaatcatagaagagctgggggaacaacgagaccagttagaacgtaccaagagtagactggtaaacacaagtgaaaacttgagcaaaagtcggaagattctccgttcaatgtccagaaaagtgacaaccaacaagctgctgctttccattatcatcttactggagctcgccatcctgggaggcctggtttactacaaattctttcgcagccattgaacttctatagggaagggtttgtggaccagaactttgaccttgtgaatgcatgatgttagggatgtggatagaataagcatattgctgctgtgggctgacagttcaaggatgcactgtatagccaggctgtgggaggagggaggaaagatgaaaaaccacttaaatgtgaaggaacaacagcaacaagaccagtatgatataccaaggtaataaatgctgtttatgacttctttaaatttacatagtactgtagcatattaataccctgtgaactgcaaaaaaccaaatacatttacagtagtattggtcaccaaaatagaggggaaactttacaattgtgagaatgtgtaaatgttctcattaaggcagtattgacccagacaaccatttagtattcatctatcccctcaatgcctcataattctggaatgcctgttgtgaaacatgtcagtgcacagtgtctcctaaattctcacacgtgcttgattttctgattcatctggtgaactgggagtaggaagttggtcatagacaatatgccctccttctcttgtctgaccaaagcttgaagcaatcacatctactgccaggttagctgtagtcttcgcctcttcctctgaggtggccaactgaggattgacttcaacaagatccagtgctgatagcaaccctggaagaacaaagtgtgacaaaacctcaggttcccttgctgctactctcagtgagggtcatcccactgggacagggagaacaagccaaagtaaaaacaagagtccattttatagtagaaaatacctatttttaggaagccccttgcacctcatcctcttggccatgaatttaagttaaaacactgttgtgctatagtagattaaaagaaaccttttaagataatgaaataaaccatccctgttcaactaacataacaggcataattgtcaggcgttctggaaaaggaaaaggcttggtgttgggtgggggaggttttcatcctgcttgttggcaaaatgtatgccacctccagtatgactaggaaccttccagatgcctgcctggaaatgaatcaagtatgaaggcagaggaaatctgccacttgcactagccaaactgcattcccacttttgaactctaatgtgttatctgtatctgttagagcaccacaccatatgccctgaaatgtagttattactgcaaacttcattctcacccctgcaggcctgagctctggaggcaggttccacatctaacaacatctttttgtctcccagcagactgacccagtgtcttgtacttgatcaagagaaaattcagccatatgttaattattttatctggacttcagttaccttctgttaaggtttgagaacttgtgtcaaagttctcggtagtgttcctttggcctggagcaagtggaagggaagcttaaaccagaagaacctatccagacctgctactatgctcacccctctaaatgcctcacttctctatagaatttaactttttagttggttattctggatgaagggtgatctgaacaagctagtattcaggaatacaagtatctaagaatatttagggtggccataaagtctggaaacacaggcaaatgtacctaatggtttattgatattacactatagtacatgatgtgctgaatgccatcatgtccgttcagcatcttcccttattagcaatgcatagttgagtgtacagtgccaaactgcaaccaacaggtgtattactgtagcatttccatcatttcctgcacatggacctgtgttcctgatttgtctctgatttccactgactaaacctgcacctttagcatatcccagaagtggtcatcaaagtttgcactattagaaatatatacatgacttatgtttccagactattgccaccctataaattaagcaaactgctttatgtatctagttgacagcattataacagtgcagtggcacaatcatggctcactgcagcctcaacctcccaagtagttgggacacctggctaattattttttgtagaaacggggtcacactatgttgcccacgctggtcttgaacccctggggtcaagtaatcctcttgccttggcctcccagagtactgggattataggtatgaaccactgtgcctagccccatgagtgtcttttggagtaaaatattgtagcataggaacaaagagacaagccatgccatatataagtgctagaggttattaacccctgctctaagtggtgtttttaggaagcaaagcagagaattgaacccccaagttctctggccaataacctaaggaccactggcaacatctaagattgcagatctgagaattagaccagtactgcctgcctttttgtactgcctaaggttctggcaggctgtggcgctaaggagaccatttctcaatgtgagtttctatcccagctagtcaagggttctctatagccctgaacctttcaatctggggtctctatctataccctagttccatcagatggttactgaagcagtatgatttggtagttctttaaattttggaatgaaaggtcatttgaagtagctttaaaaccagaagctttctgacagaaatggaaactgtttgcaaacaagtatgagttttggaaaagtagccagtcttgataacgtagaattcatcttagtactctttccatcagccattctcatctaactgtatcccccttattagaaatcctttcaggctctagtacaagacctaccctacataaaggacccaagatattgtccagtttgcagatttcttcaagagatcagctttagctccaaattcacaactcccaatgaaccaatctcttagagtgcaaattacagccttgcactcttatcttatcttgccttcttatcttaatctgcctttagataactcaaagaactgcatcagtttgacaatttattcttgtatttaattgtttaaatatacaattttttactcattattaccttagtgtaatttggtaagagccatgtccaagcatgactctaaaggactatatcctttttattagcatggccatataatttttagctacaaaagtttaagcaaaaacaaactctgcaatgatgtggaatagcagaaaagatcctttgcaggcaagagactctagcatatttacctatgtagttaacaggctgcagacctggttgctacatacctgtattgtgtattttcctcagcaatatacatgccttctcgataggttagtcccccgacaacaggagttcctgtggctggagccagtgtagggtcaaatgcatcaatatcaaaactcaaatggattggtctttgtctcctaaaaagg
